United States Patent Application Publication US 2014/0057251 A1 - sequence listing, part 39

SEQ ID NO: 42550 - DNA, 4123 bp, Cannabis sativa
ccagctccttgaaggtaatagactacttctaatgctatttctactggtgctgattttggtttcatttgatggagttaatgtatactaaaatgggcaaaacatttccactctgcagcatagaagaaaacctcataaatctggcttttggactggtagtgcagcaatgcttggaaaggagctgcgtaaacggggaaaggaagacttgtatgaatctgctcctgatccattgctttcaccgtttatttgcagcctatcatttccagagcctaaacttgtccaccaagatgaatgtttaagctctgatgcacctgtgtttaccgacgacaaaaggtatatactctctcttaaatgcaaagtgcatcttgttaatttcttttttggttgacatttaacaaggcacaggggggactgaaatgattcctcttaattggaaatgtgattgtaaaattttgtaatgtggaatctctgttctgtgtaaggaaatcattgttgaaggctgaaaagaaagatcttgtttttaaaatgaaaatatggtatttcttcccactttgtaaccaagttagtaaaccgctccattacagctctgaatctctcattagtttttcttgtagtacttgacactcacacatatagaattccatttctcatctgtgaaaatatggtttaaaattccacagtaatgataagattggcttattctttgaagattgattctgtttgtgttctttattacaaattatgatcgattctgtttgtttgtgaagcaccgaggcatcattttgcgaaaaagataatgaagaaaagaggaaaagagcagcatttgtgcaacagttgatagcatcaaccatcttcttggatcattaaatttcacagtgcagaaggttgcttcactcatcagccgcagattagtatcaatgatggatttgcagggatttagagaagagtcaacaatagattccacactaggtactttagaagagttaatctctgaatggcgaataatatgacttgtagtaaggggtaatttgtatttgccccatataaatattgtatgtatgtatatctacaacaattcagtagcctgtatcaaggcctacttattataatcaccagaatgagaaaatcacctattttaaggttagctgtgaatttttcttaaatgttagacatataattcttctttgtttcttcttgtttgatggggttgttgctttggtctattaaattgtggtgaactgcatatgagacctcttccccatttttaacgtttgccaagttcacaagtcactactacaaaagtaataatttaaaataacgacctctttcgttgatctaaaagactgtaaagtgtaaagttcatggtagtaaatgatcaattgatcaagattttgaaatgtccaatgtaatgaaaaccttaatttaatacttctctaaccaagttccaagaaaatagtgcttttgaaatgttgcagttaccttaagacatataatattaaaaaagcttaatattatcatgttattaaacacaactttggtaaatcaccagatgcaaacactgcttccacaaaatataacagccattatgacatgaagaggaaaaatctattgcagttatagttcaaaaaaccatctcaatttctttttcacaattaaaaagttgaacagattcggctttggcagcctaggtgaaagaagatattaaagccaaacttttgttgaattatatcaattatcaccaaagacatcatccagctagactaaacaacaataaaagggagaaaagggaaacaagcctacaaaatatatgacattgaataaaaggaaaggatattgagttaagtcccaaaactaaacaagaattaagctgataacataaaagtttttgacaccactcaaaatggtgagaatgacaaagtttgctaacaggctccaaaagtaaagttcctcttttttactcaattatggattgaataacaccagctccgactgttttccctccttctctaatggcaaacctcattccctgctcacaagccactggaacaatgagttcgacaaccatcttgacacggtcgccaggcataaccatcttagactcttcatccttatcattcataatggtgagcactttaccagtgacatcagtagtcctcatgtaaaactgaggcctgtaacctgcgaaaaagggcgaatgccggccaccctcttccttcttcaacacatacacaattgcctcaaacttggtatgtggggtaatggtaccaggcttagacaaaaccatccctctctgtatatcagccttctgaatacctctaagcaacaatcccacattatcaccagccatagcatcatcaaggattttctgaaacatttcaaccccagtaactgtagtggttctggtgtcccttagaccaacaatttcgactgtatcggtaaccttaatggtacccctttcaatacggccagtggccacagtaccacgacctgtaattgaaaacacatcttctatggcaagtaaaaatgggagatcagtttggcgttgtgggattggaatgtaatcatcaacagagtccataagctcataaattttatcaacccattggttctctcctcgtttaatgctgggattagccattaaagcctctaaagctaataaagcagaaccagaaataataggcacatcatcaccaggaaactcatacgaagaaagtaactcacgaacctctaattccacaagctgcaaaagctcctcatcatcaacttggtcctgtttattcaagaaaaccaccatgttaggcacacccacttgcttagccaacagaatgtgctccttggtctgaggcattggaccatcggcacctgaaacgacgaggatagctccgtccatctgggcagcaccagtaatcatgttcttcacatagtcagcgtgaccagggcagtcaacatgggcgtaatgcctgttttcggtctcgtactcgacggtggcggtattgatggtgataccacgagcacgctcctctggggctgcgtcaatttcgtcgtacttctttggggcgcctcctccggtggaagccaaagccatggtcagagcagcagtgagagtggtcttgccgtggtcgacgtggcctattgtgccgatattgacatggggtttcttcctctcgaatttcccacgagcagctcggattgtgaatgaccgggattggcgagagggggcagttgaggtaactggtgtgaggtggagaatggtggatgggtttatgaacgaagaagagagatgggtcagtttcgatgtgggtctagaggctaaaatggcagtgcttgaaggataagaagaagaagatgaagaagaagaaggagaagatgaagatgcatatgggtaaatgagcttagtggaagctgaggctgcagctgaagaaatcgccattgtagtaaagttgagctaacccaaggttttcttcttcttcctcttgttagctcaagggagagagagattgagcaatggtgggattttgggggaggaaggagaaggagatagggatatggattggagtgaaatgagtttagagtgtgaagtgttatcttttaggaagtgaaaacagggcctcacatatggggttctattctatccacttctcattcttctgccgcatagtttttggtttttggagagactaatcaagtggttcacctattggggtatggtgtgttgtgtgcaacctccttttgatgattacacgtgtcaaatcatgtcttttattatggttgggattgctcatcactttaggtttcttacgtggaagcactgagactgttgatttatgctacttgcgaaattacggtctctattttccctatttatccaactctatataaatctatatgtaagagaaatataagatgataacatgactcattaatgtttcaaaaaaaaaaaaaacatgactcattaaaataactccaaataacatatttatttgttttaattttcttatttttattaattttataaatatttatttatttttctatattttatattttaaaaataatgaattttctattcatgtaacatattccaaaaattaatttattatttgaaaaaaattaattaatcattttt

SEQ ID NO: 42551 - DNA, 1504 bp, Cannabis sativa
gggcccatatatttttagggccggccctgactaaatggaccaataaatcagcaccactctacacatatcatccataactaaaaactaataacttctcaatccaactttgagaagaaataaacttcctccccaccacattcccaacaattcgactcacgcaaccttcttcaacctcatttgcatgcatgttagaagacacttggacaaagcacgcttaaatcattcgtcctaggaggaaccttaagctgcaaaaactttggacaaaacgatttctccaaagggaaccatgagtctatagtaatactaacagaagataataacaagtgacaaaacattttatcttttaacacttaaaattattcgaaattttcttaaattttacatgtaatattaaataattacaaaaagcccactagggtaaaaaagaaaatacaatttcaatctttgaaatcttattttcattctacacctttttgtcatgccctttttccctctctcaaacatacccttctccttttcattttctctgatatattttctctttttcattattttcctctcagccaaacataaacccaaaccaaacccaaagtaactcaagtgtcagctggtacgacttttttcgtttaacaaaaaactatagtcttataaattaataactcatcaattttgcaacccactcactatatattatataatagaaaaataggggaaatggccatgaaatgtgtgcatatatatcatatcctaataaaaataaaaacaaaaacaaagaaaacgatgacaatgtgagtgagggaataggaacgattgaggtaaaggtcagagaaagctgaggcaacagtatggaggagttgttgtttgtttctcgggaaaatgccatttgaggaattgggcagcaaaaacagaaagcctttccctccttatctgcttcccaaaagccagctcgctctctcttcattgccctatggcatgtagtgtgtgacgaaatataacatataaattccttcctacataatttaatatctccaaaatttgtcctgctttttcaaacatttttggctttaatttctcctaaaaaaatagaaaaacaacaattttagcttgcttctgtattatttttaataatataaaaaaataaatgatactaactattttttttcttcttaaaaaatactaactatcctatggttttcagaagcacttcagctttatcagaatatcattaaaatatcattagaatataattaaaatattaactattacatattaaaatattttcttataacaatattcgttataattacaatatcatttatgtaaattatttttgaataaaaattataagatctattaattaataaattcgttcaaaataatagaacgcactttagagaaacagtcgtccaactaaagcacacgacctgtaaaaaaacaagagtctcttgccaagcaatgagccaacttatttgcagatcgttttacaaaacacaaattgtgaagg

SEQ ID NO: 42552 - DNA, 2809 bp, Cannabis sativa
gcggcttgtatgttagctttggagacggcggccaaaatgcatcacccttttgttatggtggagagtgattctaagatggtgatcaagaacctaaagggtgtcgaatgcttttggcggcttgagaactatgtaagacaatgcaaacatctctctacttttttcactagttgtaattttttttatatttctagaaactgtaattttgcggcccataatgtggtcaattgggcgtttgccaacaatgtttctagtatggtagaagtttttactattctgagtattattttctgtaatgaccgtaaggtttaactatttagttccttctaatatatagactttattttcaaaaataaaaataaaaaaacttatcctacttatatatacatacgtgtagggtctttgttgatgatctggaattagatatattaggcagcagagtgttagggcatcactttgggtaattggcatcttcttcaaatgtcaaacctaattaatataaaagaatctctcatcactctgtctcccacattaatattcatcattaagtaatttccaaattaattatatatatatatatatatatacgtgtgagtgcagtaattaatgctctctctctctgtatcatgaaaaaacttgacaacgtagcttcagtcctgaccctgatcagaggaagaacgtatcaacttcaagtttgtttgtatttatataaacataggatatgattttgtcatgttattgtactttcacggattgtaatccgtgatgtacgacagccgtcagacgagagagttatttgatttgactgttgagattgatctaagagtaattaaggttaaaaagtggaaacgtacttgacactcatttaatgtaccataagactcatctaatgtatcacagaatacattccgtgaaagtacgtcacccacaaatcatatccctataaacatatataaatatatatacgtacgacatcttctttaatataaataagataagcagagcaccgagtgtgtactgactcctcccacgtggttaactaataaattattattagtattaatttctcataactattttgttggaaggagagaaaaaaggcagaaattttcaaaaacacttttcttattaaccatcatgcaaaaaaaaaaaaaatgtaaatagtaaaaactctataaaaagcaaaccattatataacctctactactttcttgtttaattaaccacaaaatataaataataataaatttaatttaattcaatccttaaactatatatgatcaatatttaccataccttcaacggtttcttcttttgtcgttttctgttttttcaatggtctttctttccaaaatggaaaaagagaaagaacaacaaaaatcaaagagaaaagaattagggctctcatgcatgctcaacaccgaagtgggagctctcctcgccgtaatccgccgtccggccgatcctaattcccactacctcggatcgcccgaagaatcccaagacaatgcaattctccaatccctaaaatccctaagagctctaattttcaatccacaacaacaatggtgcacaatagacccttctatctacctctccccatttctcgaggtgatacagagcgacgacatccctgcttcggccacgggagtcgccctctctgctctcctcaagattctaaaactcgagttttttaatttaaagaccccagccgcagctgaggccattgctacaattgtaacttccattacaaattgtagactagaaaaaaccgattcaatctcagaagatgctgtaatgatgaagatcttacaagtcttatccgcgattatgaaccactctgcctcagctctattaaccgatcaagcggtttgtgttctcgtcaatacttgttttcaagttgttcaacagtctattggccgaggcgatttgcttcaaagaagcgctcggtacacaatgcacgaactgatccagaaaatattttctaaattgcccgaaatagaggtggttacgagcattgagggttcgagattgggtgaagaagaggaagaaggaggtgaattcgaaggggaatcgggttatgggattcggtgtgcagttgatgtatttcatttcttgtgttctttgttaaatgtggtggaattggttgagaatagtggttcggaattggctaataatacttcattttgtggtgatgaagatgttcaagtatttgctttggttttaattaactcagctattgaattgagtggtgatgggattggaaaacatccaaagcttcttagaatggttcaagatgatttgtttcatcatttgatacattatgggacttgttcttcaccacttgttctatccatgatttgtagtacagtcttgaatacctatcattttcttcgcaggtttaacattcctaaattttatatttattccttaattcatttttgcatgcatatatgctaataatcatgattatgatattataacattcatcataaaatatagtgcattgctattattctagctaggcacataataagagtgcctaacaccacaccaaaactatattatacattaaattaaaatatgttaactcgttattaaattgtactattagtgatatgataattttttttagtggttaagggaaaaattctacaaaaggaatacaacttttgctaggacatctctaattttgatattcggaaaaattataatctaattttttttttatatacgacctatcttatagttacatttattttcgaaaaaattaaaataattcatgaaagttcacacatgtataaaaaaaaaa

SEQ ID NO: 42553 - DNA, 12244 bp, Cannabis sativa
  modified_base (12165)..(12169): a, c, t, g, unknown or other
ctcatttttattaaacttaaaaattgttattattttttcaattatttcattataaaaatatattaaatttctttgttcattctgctatttttaatatttatcacaaaattattatccgtctatatatttaaaaaataacaaaattatatatgtttttaacttcaaaactgttactttatttataatacatatatctaaatattatatatatgattataatcacttaattagtataaaaaaattaaaatatgaaaaaaattataaaagttggataattttttaaataaaaaattaaaagcaaagcgccgcttagttttaaaaagtaagagatttaataattatttattttattataattaatttatttctatatatttttatttttttaatatataataaataaataaatatggttttcgtacaaaaaatttattatagtcttttaatcaaaataattttgtaaaaaaattgggttggagcagctttagcttttagttgtagcttttccaaatttttttcgaaaagctgttttttgactgcttaccaaatacatttttatcacagtttttattaaaagcaactttcagctttttcaaaacctgtgccaaacgggtaagactaatgactagattaaattccaactctctctgaagctagattatacaagctaaacattcctagtttagaagcataaaaactcaaatctccttaactgtttgaactcatattgagggaactatgaaattgtttacaacaaagtgaaatcataggggtgagtttcgttattttataaaacaatatggggttatccaatttagttaaaattaatggacgtgtttgtaattatctaaaatattactaaatagagaaaaggacctattttggtgtgttcgagttggaagagcaaaagcgcgctcaactggtcatcgtcttcccccctaacacaccacaaaagtgaggaaagagagagaaaggaaacaaagagaggcgcccttaaacccctactctcccttttatcttctcttctaagaacccaaggtatcaacaacctctttcgaaagcttgaaacgaagaagaagccatagccatagctatagcctatagctatatccaaatagtgatagaaacgcttaaaaactattagaaaacctggctgttttggcatagacatgcgtcttctttatcgtccacttcacaagctctctctatcctcgaccagtgtgttcatggcctcaaaccattttctcaagcctacatttttctcaaaccctttaaccccttcttcacatagacagctcttccacacttttagactctctttctctgcttttcctctaaaacccaactccagaattcagcccttctgtcttaagactaatgggtattctaatgtatctcaggtcaatgaccccccaaccggtatgaccctttaagcccatgtctgctttatctgtttgaggtttttattttatgattataataaagataatcatgtgcttgttttattaaaaaagttactttgagaaagtacagtgaaggaggtagaagattgtttgtctgcccatgttggtatttatgtgaatgttaactaagctttactcctatgtagtctttttggagaacacggaggaggcttcttctcttaaaattgagattttgaagaataaactgagcgaccttggtgtggactgtgacatatctatacctgggcagttcaaccatttgctttgtccaatggtagtttcacttctgcccctgcattttagatttatattgggatgttttgattaggaattatggggtttaatgctttatttgacattgtctttagttttccaagtctagttgtaacttgttagtaactggttttagtttttcagtccataggattttattgtgcttcgatgattgttaaagtttaaactctagacaacttagctgtatatcacaagtgtagattttgcatgtgatttgcccccgcagagtctaaagttttagtcttttctggatacttatgtagcagcaagtactatacttctcttactcccaaatattgtaagattataaggagagcctactaattattattattttggtgttgtttggtatttgtactaatctgccaatctggctaagagcaatttatgttgtattcatgtgatttgattggttttagattctaaatttgtataaaggtaatatcttttcatgaaattctctcgtttatttgagatattttaatgtactgtaatgtggtaactttaacactatttatgcagtgctcgggtggtgattctggggagaagagcttatctctttttattgaaccagatgggtatgtttctattcacattataaattttattccttaaaagattccaaagcttaattatattgggtatgcttggttcttagaagttctgctgtgtggacgtgctttcggggaaaatgtgggtggacaggtaacacaagagtaagttggcattgcctcctcctccgagctgtatttaagaatatttcttacaatattgttttggaaattaatggattagtaatcagccaagccatgctggtttgttgcagcctttcgcaaatagtaagtcatcgtatcaaacatctagcaaaaccaccaaaattaagataaaaagagaaataacagtggagagcttgcaactggagccaccttgcgaagaggttgttatattataatttcttctacctctttcttttaaacctctttgcctaccaatttgattttcagttactagataagctgagctgtcaagtgcatggctttgtaatgtgtagtctttcccctaattcttattctttcttttgtttcagctagtctcttattttgcagagagaatgatttcgaaggaaacacttgaaagaaatgcagtcatgcagagatgttatggtgatcaggtgcactctaatgttgagtaaagaaaaagatctacaaatgttatttaaaataagatgtttttgcattttcattgtgtatcagaacagtatatgatgtatatgttttcgtatttagcagtcaaaaccaaactgaaatggacaactggcaagcaagctatatttacaccagttacttatacagtatttaacacttgaaagacttatcataatatagtatgaagtgtaactaaggtatcattaaacaatagcacacatgtacaaaaattatagtacatattgtttttttgttactagagtcaactcttggtttaaacacaacattagaagcagtgtaatcactaagatgcccctggaattacacatctgtttcttccctagaaaactctataggaaaagcaaaaggtagtctttgccaatataacaatcacctttggaaaaagatattgctgtatatggtactcgaaatatgattatgaatcaaagccatgcacatggaaaggataagtctttatatgaagagagttgtccatttattggagtattagttgagtttgagacataacagctggtttatattactgtaaaaagtgaattgtgccaaaaattggagagtaaaaaacagagaggctggagagcttacaaaatataaaaaatactggtgcactggagacagttataggaagcaggtgaagcactgaaggaaattttgtggaattttgatgtaccattaaggggatagttctacagaagcctttcctagtggctcaatttcttataaatttgtaagagaggcagctagggtaggatctatctaaatggtgctccatatcttttgggtaacattgtttcatttgcggctattcattgccttatggtcttctgaaatttattgacagattaccattgcatttacatattggcgagaaggatcacttatcagttgcaagtatcgagacatcaacaagaagttttggcaggttcttttaatcatccttaaattgaatattagtataagcatcatgtgtaaatttaaatgtctgctacgtgtatatgtattcactaacataactgtatttataagtaaacacatgcgtacattgttttaaatttactttttgaaattaatactttaaaacccttaatacagtatttttctcttaaatgtttagtgtggttcaattatacatgcttatacacttgattgaaataattgtaatatatatatcgtgttcacttgatttttttttttatcatgttcaattgatttcttgctatatttacatttcacatgttatctttttcttgttctcttttccaggaagcggatactgagaagattttctatggcctggatgatataaaggatattaatgatattattattgtacgtcttccaccattgctggtaacggatgtcccccaaatcattacactacctgatgcttgttccaaatttattacaggttgagggtgaaatggataagcttgcaatggaagaagctggatttcggaattgtgttagtgtccctgatggtgcacctccttcggcttccacaaaggacttgccacctgaagaacaggtttgtgtcattattcattattagaggatttgtctatgattctgtattaattgacaatgaggaatgcctacctttatactttggtattcttcatctattgttaatgtctcaaacaaagaaccatcttttcattgcaaatggaattaaatccacaaattacaaaaagggataattataagaaaaaataaagatttcattaatactaaatcctaaacctaaatccatgaaaactatctattattaatgtctctgttactatttttcttttgtgtgtgcgtgtgtgtaaaggtttacttattgaaactgaacaaactgtttttataattagatctctgctatgagatcaagcaacggtacatggcattgttttctaaacaagtttccaatgtcattccaaaaataaaccaaacattgcaatatcatttctattactattattattctcattaccattacattacaatgaaaccatacaacacctaagttctttgctttttaccctctcaaatttttagcagttgacaatttctggcgcttgttctttgggaacagcaaaaaagagtttttattcacaaattttcatttgttccctaaaggcttgtctaaagtaattgaagctctttccttcaacaatactgtcttaactattttcccttttcttactctccaattgatgtgaatttgcaaatcttggtccaagaagatatatatttgtgtgtatatatatatacacgatccttctgtactttgcttactttttatgttcctaattgtttttcattgctttctgaattcatgggtctatgtctgtgttattgatcacttaattttggggatatgttttttttctttttttttttcctttcgaagtcgaggtttgtaactttgcatatcctcatctgcttctaaaactttaactgaaacataagcaagggatatgtatttcgatactctaataagtgcgaacacaccctttgacacgtagctgtcttcttttccgccctcaaagtattttatgtatctgatatgaatttcgtacttaaggaccattggctataacactcacaacatcatttgcattttatcattgccatctgatcttgtctagtttctacttaccatagttcttgtttattttctttgttattttttcttgtcttgttcatcagaatggctctgatgttttttttttttctatctgttttctgtaaagctaggacacaaagtattcgtacttgtggaactgtaaagagtacttaaagaaggttcgtaaattattcttgtgcataagacacgatactcacgatactattggagttgtcaggtttttactaaatttgccaattatgttaggcatcacgcattatacttgctactgatggagatacacctggccaagccttggccgaagagctagcgcgtcggcttggacgagagaggttcgttgatagtgtagtgttgttctgtgttgaaacaatttttagctggtgctagtatgaatgacttaactgatgttgcagatgttggcgagtcaagtggccaaagaaaactgacgatacctattttaaagatgcaaatgaggtcagtcaactagtcaggctttacttattacttatcaactgcaaatattttgctcctataatttttactgtgtaagcatttattaataatactttttcagttgaggcagttaataataatattgtgcattacgaatcaaaggaaacaaattttcttcgaaaactgacttcaactgataacaaatatgtttactaatgaacaccttttatttaatatatgaaaatactgactattttatgttgcatatttgagaaagttgtatttacaaagtaaatgcattttttttcgttaatcaagaaaaaaaaaactttgtggccattttctgaagagttattttattttatttttattgggatttactgtctctccgaagtgaaccttacaattatgtacaaaatgcttttacaggtactcatgtatatgggtgctgatgtactgaaagaagttattgagaatgctgaattataccccatacgtgggctgttcaagttcagtgattacttcgatgaaatagatgcatattattatggcactgctggatatgggtttggtgcctcaactggatggaagtctctgaacgagttatacaatgtaagcatattggctatcttgtctacagttgaaaagaaaaaaaatgctagaaaataccttcagctgctttaggtgcacattatttctacattaattaatacccattactagcactgtcatttgtttggtaagtgagtgggaagcagtatctagttctttcttgaatatctcacttataaaattacacacctattcctaaggaaatatttcttttggtaaataatttaaatatgaaactataacttttcattcacactcattgataatttatgttagaatttgttgtcattgcccaaactatttttttctgaaaacgaactcaaatacctttaggaaaatagaaaggtgggaaggaagaaaagaagaaatcgaaagtgaattgaattagaggatactaaaatatgagaattcagctggtgaggaaaagactgagagatgcaggtggccttattttggttagtagtgaacttttattacaatgcacaaaaacacgaagtggagtggtttaattactattattcctacatctaaaatactatgttgaaatgctgttattctcattcttatttgttttttaattttaattaggtcgtgccaggtgaattaactattgtaactggtgtccctaattcggggaagagtgagtggattgatgctcttttgtgcaatcttaatcataatgtgggttggaaatttgctctttgctcaatggagaacaaggtaaagctaattactgaaaaaatccgaattttctattcttctgtatagatattttgtcattttgtggaatctgatctaagaaagcttaccaatttgattggataactttttggatttctattatgtcttgttagttttacataaattcaaattaagatagataaagtatttagataatatttgtatcttttttttattatttatttattttatataagaaacaaggatgtattgataaaagaagatataaataattataatctgagttacaacctaaaatggcaacccaaacctccttataaggcaaatcctcgaattttttactcttgaaaatccaaaagaattgggcaatgtatatcttctagattttacatttctttctcctttgcttcataggttgaattccattttttgattatggtcttcatatcttttctgtttctggtcttattcattctattcttaataatttacaggtgagggagcatgcacgaaaacttttggagaaacacgtaaaaaaacctttctttactttacggtgagtttgagagatagtgtattctttttattgttgtctattttttttttgactctcttgaactgtcaacttattgatgttcagttattacatgctaaatctaacgcacagatgcttttatttaaacgcattgtcctttgctaaattgtcccatctctctgaacaaagagtaaaactacaaattgaatattgtcccgtctctcttgtctttatcaatgaaggtgccgaaatctgtattctgtaccttgattctagcaaattctcattcacggagcaagatactagggatatgaataataatgaaaatagaaatgttttagataaaaaaaaaaaagaaaatagaaatgtagaaacagaaaacaaaccttaactagttgatatattaaaaggataacaaggaaaatgaaagaggaacacaatggtcttcctagcacagagggattacaatggacgaagaaacttgagatagatagagtagagcagaaacaaaagacaaataaaaatcagagaaaagtgagattaaaattattggtaggtattgttgcataggttgtaatgtaatatatcaatctttattggtagacctagaccaggacctgatcttgatcctgatactgatattgatgaaaattactaccaaccaactgaatctagtttattggtaatattgatatctaatcaggaattggtctgggtaattgtgctataaggattgatatgattgaccgttgcagattttgttacttttaattatttggctcttaaattactgatcggattttataatttttcttttaaattctgcccgttagtgaaattaaatttgtttcgatctcttttctggacaaagatacggtgacagtgctgaaagaatggatgctgaagagtttgagcaaggaaaggaatggcttaaggacacattctatctcataaggtgagtgtgaagcttcaattcacctgtttcagctgcaaaccgtacggtaatcggtaataagttaatgtattgttcatgttagttatgctgtaaaacccatacttggtgcccactattctgttacgttcactttttctggattgtattaattgtttatgtttcttgaacctacgctaaaatttagatgttatggtagcacactattatataaagtaagtttggaggtcataacgttagaatggatgcaggtcaatgttttaagaatgagttgattctgcaatgttatcttaattgaaaatttatgaaaagcctgtaatgattcgccttttctttcatatgcgaattaggtgtgaggacgattcccttccaaatattaagtgggttctggatcttgcgaaagcagctgttctgagacatggggtgcgtggtctagtaattgacccttacaatgagcttgatcatcagcgtcccccaaaccagttgagttactgcatcttttttatgggtgtgtttgcatctggttgtatttctttatttatttttagtgtctcgaatatcatacattcgaatctgcactaatcataaaagaccaacttcatttagtcctctattgccattatcaactctagacttctcgtagaaatgaactgcgtaaaaagcaagattgtaattgctgaaattgaaaaaaaaaaaaaaatacagaaagtggtagcccaggttcttcgagggagctggagacatcccaagagctcgaagctcccgacaatatagtcacacttctttttccctttttctaacctgctccatgtttatataatattctatcaccacttaaataccctgctaatttggctacaacctatccctaacaataaatttgcatgcctttgctatacaattcaacttcttttttccttcacttgtcacttatgaaatttgtaatttttattttttcacttataacagaacagaaacagagtatgtaagtcagatgcttaccaaggttaagagatttgctcaacatcactcttgccatgtctggtttgtagcacaccctcgacaggttcgtttcctctactgcactattttactttctcccaaaataataaatataatctaatgaaaaaaaagaacaaaattgaaactaagcacttaaaactagtgtttcccgaatgaggagggattgaggaaagcagagaatctagagacttaaattgttttctgcaaataggccacatcaaaacttttttccttttgagatatgtttatttctttccaatcaaatgatccttgatgtttctatcaccatacaattccacataactgatgccaccataggcttgcaaaaaccaagtcttgcaagtcattaacatctcacatttttccttaaacacccaagcatactctgcttcactcaacaatttatttgacagtagttctctgtcacactacaatgaagaaacacataattcaacgctactttgcagttgcaaaattggggagggaatgctccgaatctctacgatattagtggaagtgcacactttataaacaagtgtgacaatggtattgtagtacatcgtaatcgggatccagaagctggtcctatcgatcaagtacaggtgcctatcgcactgaaattccatctgaaagagttcataaattttcacatttatcagttttttttttgttataatgaaacatcaaagtcattagctccttgagaaaagcatctgttgaatctatatatgtattctatgacttgcagattttggtgagaaaggtacgaaataaggttgcaggaaccataggtgaagccagcttgtcgtatgacaggtatgttatagcctagcattatggtcatatgattatttgtgttcagagtatctgtaaacattttctctttaactgctcgtcagtcctgttctcaaggggaaaagggaaaaaaaaaagaataaaaggattatgatttgaaagtgatgaaaatttgttgttgggctttgcagggtaactggtctatatatggatgtcaacgactcatcacaggatttataggcaaatacatgaaacttagagccttgtacagtggcgtcttccaaccattgatgatacttagcgagttttgtagttattcccatgatcggtctggtccgacttagaacatatatatatatatatatggtcacgaatggatcgaaaggtatgatttcgtgctaggaggtgagggaggttaaaattttgtttctatatttcatttttggatcttgttattcttgatgatttttgtcatattgtcttgtactcatcaacatgatgaattgagtttgaagatattcatattatgctctagttattttctcctgtctcttgttaattataatggcacattctatgcatacaccgttcgagtcgtgctagcgacaaactcattagacacacaattgttccgtcataaccgttatttagggtttcctttcactcctctcacattcgttctttcatttatttggaaagggtttgaaagcttttcaagatgtccccattcatgtcattatgatttaccaccttctctcctcttggatgttatatttgctagctttaagataaccattattagcaaacatcagacgatattgtttgtaactaagctccttttatgacatttttatgctgatagttttatttctttttcatgcattattcttcgtgcaaccaaaaaattatatggactcgtcgaaattttgattaagacattcgtttttattcaaaatttactctattaaaagggaagcattagcaataggttgtaaggttcatgtgtatatttagtatttttatggggtcgtttttatctgaataatatagggggtccgtttactttgtatttttttttttctcatatttaaatccacacaaataatatgttgtctgagcagttctacgtttaatttattggattttttcatttacatttttataattaattttttatttatttataaaaataaaaaaatatatatatataacttccaaataaaaacagtatattttataaaatggaaataacataatttcaaaatggaaacaatataacctcaaatggaaataacttttatagaataaaaaataaataaaaaaaaacataaaaatgaaagtaaaaataaaaaatacagtataaatgacagtttttttaatttttatattgaaaattttgttaaattttacaaaaataaaaaaagtgaagtgtgtgatatatataagagaaatttgtttatatctttatatattaaaannnnntatctaacggcatttcttggtttaacattcttggtttaaatttaacgattaagtttgatctcccgttaaaaaata

SEQ ID NO: 42554 - DNA, 10627 bp, Cannabis sativa
  modified_base (9380)..(9381): a, c, t, g, unknown or other
  modified_base (9662)..(9681): a, c, t, g, unknown or other
aacatatcttgggctaacatctttgtgtgaggtttgttctcttgtggaggaaacgatgtagtaggagggactgccaaaatagaagaattgagggttgagagaatgcctttccctaactaagacttgagatgaatttcatctggtaacaagtcactgactactgaatcaatcgaaggagcaaagaacaatgtaatatagaaccacaaagtccctcaaaatcactatgaagagccattaaatattaaaccaatcattattcctctctacaagcaatatacgatgcaaaagcacatagttctctactgattcggtaagttccaattgatctcaaagatgtgtcattacaaaataaaactcttgaatgctcatatatttcgattcaataactttaatatcagtttccaactgaaactgttttgcaaaattagaatgtatacaatctcgcaagatggtcacatacttcttttgttgtctcatactttgctaactaggtaccaatagattattcaacagagttatttatccatgtgagaattttgaattgtctacttcctattttctaatagatttgcattatcatctgctggtttcctctttgttccagaaatataacctcgcgtcctttttttctttgaaaaaaattttcataacataattccaatacgaataattctttctatctaatctcacactgatcgcttgaagggaatcatcttcattggtagccattgtagaaataaaacaaattgcaaatatttgcaaatacaaaaatgataaaaattcaaaattgtgctgcgaaaatgaatacccacaactgttatgtgaatcatgaaaaaactcggaaaaatcaatacataaattagaatgtcgaattgtacggacgcctacaaaaactgcaaaagttgtgattacacttaagaaattcactatcataaacctagatgtgataccatgataattatttgagaagaataatcaataaagaataaaagagatacatagaaactaggatttcattcaattgcaaaatcaaaaataaaagaatacaactaataagaaagctttaggcaactaatataaaaaaactaaaataactctaaataattatttaacaaatacatatgatttattaatactttttacaaaaatttattatttaactttatgattcaaattaaaattttatgtgtgatactataaaagatatccttagcatatataataaggctactggccaaactataaatttagctaagtcctccattctcttctctcgtaatactaatcctatggataggagttctttcctccattctctcaatatggaagataaaccttttattgataaatacttagatatcccccccaatgtttctctccctctaagaaatcttcttttcttttcctcctccaaaaggctggtagtaaattatatgtctggagtcaaaaacttttttcaaaagctggtaaagagattttgcttaaggcagtgatccaagaaattccctcatatgctatgtcctgttataggatccctctttctatctgtaaacattttggaaaacttatgggccggtactacttttggtggggatctttgggtaataggcaacacaagattcactgaaaaaaatggacccaagtttgtaaatccaagttctatgggggtcttggttttcaagatattgttcatcacaatcaagctatgcctgctaaacaagcttggcgtatttataccagccttgactccgttgtggcttccctcttaaaagcaaaatactttaagaataatgatttccttcatgtgccaattggacattatccctccttgttagagaagtctcctttggggtagagatcttcttactaagggtttagtttggaaagtgggagatggtaaatctattcagatcactagccctaactggcttctagatactagcattgtctcttttgaaaacaattcacctccacttgagactacggtttcttattttattaaggaggatggtctatgggatattgataacctcaataattactttgataaggaccttgttaactctgtcctcaaagtgccaactgatcccatgagtaaggactgtctcatttggggacacaatccttctggcactttcacggtcaattctgcctatcaccttgcaaattccaattacccctatcctagttcctccaatcctaagactttcaagtcttgatggaagtctgtatggtcttctaatattcttcctaagataaaatattttatcttgaagacattctaccaccttcttccttctaaactaaatcttttttcaagaaaaatcctgataacccatactggcctttttatttaaaccaaattgactctaatactcattctcttttacaatgttccaggaaaggtaagtattagaagtttacacattttcccaattttttttacaataataaatcatgtgacattaaagaatttcttttaagaaggtttgaaatgtttcaaaaagatgagttgtcagtgttctttggtatattatggactatttggaatcatcgtaataagtttcttttgcaaataaaaagactgtatgtatggatgtagagccttttataatttcatatttgcaggattatgaggtagctcaagctaaagtcatctcatcaccaaataacactcttcatgatagtaactctgaccatttgggatcgatttctctgctgccttgtataaattgagtgtagatatcgcattaaagaaccaaaatgtcaagtccttgtctcaagaattataaagcagcagagagatcaatcaggcctgtctagactaatatggaaaatcatctcctctttgttctcttttcctagtgcaacaatcaaattcactcctagaagcactaatactctagcacataaccttatccaagctgcattaggaattggccaagggcatgtttagaataattgtgtttcagatatccttagatctttgtaacctattatttcttgttttttctttggttacagatcttgttatattataattatttattattaaaatatttttaaattttatttgtcttatttactatttaaaaaataaaataaaaattgtccatgcatgtcaaaggggccttttaagtaacatgcgtatctttatgatcattacttagctacaatgttcaaatacatattttgggtatgatactcgttcataataaattaataatgcaacgttgccaaagacagctcattgaaacgaaattaagaccaaaaatggggccgcagaaaattttcaattttccagatttatggttgacatgtacactataataccattggtataaagtggaattttcaatgcaattacattaaggcagcaaaggtgaataacatctataaaactaactcctcaatcacctgtcacgatgtacaaaagcctcaggtagacttttaagcatagcttatcagcttaaacttctaagcaattggtattttatatcatcaactcagcaagtctcccgaaatactcctaagtttttgtattcataagctcgaacatatagacacatgccgctgaaacccggtgatactctctagaatagatggaattatgaaattcgaaaaagagctaccagccaccaaattcatggtcaatcatttcatgtggagtaaactcatatgaccacaaatggccaataggatcttttcacgcactccctccatttacaaacctaagactactgatggtcttgaacaaatgcttcattgaattcaaatctctttattgcattcagttggaggactagtcaaattttcaccattggaagacatcggagatcaaacattcatcatctcatgacaggagcggccatgaaacccaggtctgtaactgtgccctactcatttccacatcctcagaatacatgttcatattcagagttgtaaagccaggtctggctgctgggactcaacaagaacaccagaagactgtttcactggggaccctggggactggaaaccgatattcaagtctggaggaagggtttcctgtttctgccttgcaggggcatgaggactcagaccacgccactgggtctgcatctggaacctaggcaaatcagctgcagctaattgagaaaaaactaaaggccgattacgaaagtgcgcttcattccccatacgtaatggttgtgggaggaatcctggaacttgagtactatttctctcaggctggaattgcattgcaccagaaacaggataatcaccattagattgtgcaacttgggactgaaattccctagttgggttgtacagtgagcatggattctccattgattgtttaaacgctccagccccaatggacatccacgcacgagcagcagcagctgctgcattgtttgagtcctctcttcgaactgaaggagccaatggcataacttgttgagtaccaattcctgataaatctgaagatttctgttgcttctgtgtcttgtcttccattatattcattgagtgtactgaatccctaagacctggctcctgtccatgcagaaagtgggttgcccctttgactatttgatcggaaccattatcagagggattgtttcttcgagaatctagggaagcactcatgtcttttccatgaggtaagcctccagtaacaactacatcactatctggcatcttgaaaggtaatgattgtttaagattcacatgctttggtgctgtatctctcaatttagaagctgctgcttcaggatttctggaaaattgtttttcggcagttagctcagcattactttgattggctgtgggtaaggagttcaactccacttgtttgggaaaattgatctcaggcttacagaagtttttcaaatgtgcattttgttgctgaaaaatggcgttcacactgccactgggtttcattccattacagctgaatgaagatggtttggcttctgactgagtgccatgagagctgaatgcagattgtttgacttctgattgaaagccggtagaactgaatgcagatagtttggcttctgactgaggcccagtggggctgaatgtggacagtttggtttctgattgaggtcccttagcggtaacaaacttagattgtcttctctctgaaaaagacccgctaacagtttgctccttcataactggagtcttaaaggctttatcatccttcctcatttcaccagcagaagtatacatcgaaatcaaaccactttgcttttggttatggctctcaagcatcaatactggagtcggaagtggctcatattctccaacccaaccacggccaaatttacacccgccagggagtgcctgctcaatcctctgcgaagcaactttccaagcaacaggtccaagagttgcagcaaaacgagccaggcttctagcatatgcgtactctgcatgaagcccaacctgatcccaacatattttgaaatacacattaaaaataagtggaacatgtgcagtagacaagttcaaaggaagactaaaaaatttgtgaacataccgcaaccagctgcttgatttcacactcaaaggtcgtgagtactgattctgatcttacagctggttgattggaaatgttataggttgcacggcggttctcatcaaaaacaacagacttccttcccaatttagacaggagacccttcactgaaatggtagatcacatgagcaattagaagagagtaaattctccaacattcacacacacaaggacatcaagaaaaaggacaccacgaatacacagaaacaatgcagtgtaaatatataacgggaaacatgtaactagcaatttacactacaacaacagatgcctttagaaagtgcttggaatgctatgttgggaataacatgtagtccactcagagaatttagatacctgaaaatgtttcttctgccttctctagattggcatcattcaaagatgaattaccctcaatatgtccatcattagtgccaggtttctccgaaacaccaccttgtgttgggctcaaattattttgaatctctacagcagtggcaagggtggcacctgaagagaaatcagaaccgagagtttcctgtgatgtccggtacaaaggcttttttatctgcttcttcataatggaatttaatttaattttctgtactactttcagctctttctcggagttctcatacttgatccttaacttttcaaattttttctttgctagctcttgtatagtgcgtgcctttaaaattaatgagaacaaatatcaacatgtaaccaagaaaggcagaaaaacaaagtttgaataacaaaaaatgtaaggacatcatacctgtttgtggtatatagtttccggagaattgtattgcattgcatttgagcatatcaagaagatatcactctgcatcaaaaaagaccagattagctttcttcgcaagtgaaaccagagctcccttggagaaaatacatttacttaaaattcaatataacccaagagtgaacaacaacagcaagtgaatatatttatatatatgacagacaggaagaattagttatataaaatagtcggtgacatacgtgctccgcattcagaagatgcagcaaaaagcatgtcaactccattccagaaggctaacaatttcaataatttttctaatcaaacacaaacccattcacttgagctagactcaagtggcaagctgcctacaacaaattctttgtgagaaccatttaaatatccagtcgttcagattctagtgaaattaaaattctatgacaggtgtcctaacgaccaccattttcagctaagaaggaactgcaaatagcaagtcataaacgaatttaagagaagagaaatattaacttcagtggagcaaataattcgttcaaaatctgcataacgctcttaaacaaccaatcatttgcttatgagaaacaagacacgtgattaaggggaatgtcaggtagcagagtaatgcgtctcagccaaatttatgaaatcaaagaaccagaatctacaagaaagaaaaacatccgtacccacctcaaattgctcgaaagtagaatatgacccattcgctaagttcttccttactgtggcgaagtccattggatgatcaatcacatcaagatagtcaggcagctacaaagttaaacataagcggcttaatccttaatgcaacaaaaatactcttctagaaaacaatgcgaacaatttgtaagctttgagttacctcatcaagatcaactggttctgcatacacaccgtaagtgtctttcctgtcaagaaatttagatgtcgacgttagaaatatgaaaatttagtttatttaagagcagtgacgaaatgcataatgccataacacacaaaaattacttttgaagtttatcaagaatcaactccaatgttttcttctcgggaaatggaattccagactgaggatctgatggcgtccctgctcaaaaacaagcaaaattaatgaactgaacaaaacccgattcagaattaaaccaaattaacagagccctttaaccaaaaacgaaccgggaaccgaatcaagcctctttgagtccacttttcgactccttgcctgtcaaaatcaaaagtccccatgaagcgaaacagaaagatacacaccaatatagtacagaaaacataaatgcctcaagcaaatgctgcgttagtgagcatgagaaagtgacatagacagagacaaataaggtggacagacaatacgtatatatatatgtgtgtgtgtagagagagaaaataggaggatatagagagggggagagagcgagagaaagagagagaaaggtggggagctgatcaaagattctgtgggtattgttagtttttatttttatttttattatttgacagtttgactcgcgacacacacagagaacttagagagagagagagagagagagagagagagggatttggatagagagtaatagagaagttacaaagaattaggggaaggaaaaaataacaaaaaaacctgagtgatatcagctgagctgaatcaccccattattaaacctgtgaatcaaaatatcaccatttctactcaactcgctcttatttttagatccatcccagtggtgattacatacctcttcttcttcttcatcatcaccgcccccatcgtcatcgtcgttatcatcaaccaccacttcgtcttcgcggccactgctaatccgcctcttcttccgcttcctctcatcgtcctcgtcatcatcggaggcagtctcgtccagcgcgtgttgtcctccacgggaatcggagccttcgtctctgccttggttgagcttcacgaccagctttagcttcttctctctcctcctctcgttttcaccttcgccctcgtcctcatcgtcctccaactcctcgtcctcatccagataatcatcaaaatcgatgttatacctcacattccggcgccggtgactccgccggacgtcagcttccgtcgctgccgccggcgactcgccggacctcctagccgctagatctgccttcgatggacgccctttcttcttcctcctcacgatctgacccatcatcagtcagtcaccccctttctctctcctcaaaacccctctctttctctctatctatctcactccactttctcgctctagaatggtttcagtctctctctttctctctcttgatttgggttccattattttggatggttggcttgggttggcttttttcgaaagcgagggcagattcgtgaactctgaacctgacctttacacacaccgagcctcaggttcggttcgtcaaatgaataattgacataattttcaatggtttgttttcatttgtttggtttcaaaaaagaaaaacggcgaagaaatacagcgtttggtactgcccgttgcccaaatggggcttgcgtgtcgctttgcctgctgcccgctttttttggcttccatcactttaccccttttcttttctatttggtggagtacgtctttcaatgttcttctatcaaaatggcgcgtgttttcaccttataatagatttttaactgtgaaactcgttaattttatttttatgtgtggtgtagttattgttaattttttattacgattgcagttaagtaaaatagatttttaaaaaaatataatttctgcactgcactatagttagagcactagcacgtgaggcatatttattttctttaaagatacatattacttgttataacaactaaaataatatttaaaaaaaataattagacatatttacacttaactacatacacatttcaataaataagagtctatatttgctttatatataagtataattattatatgatatttggtttggtggaatgtaatagtaatagtaatagtaatnntaatagtaatagtaatagtaatgggaattgattaagatgtttggtttattattggaataaatgataaattgacaaaattatctcctattttaatttttatatgagttatttgcgggataacctctttaagtggtcaggtttttacaactaactcctaattctaaaattttagtggtaaaactccctaaactcgtgttctgttagcagtttaacacttccatccatttttagttgttaacttccatggtggaatgtctacgtgacacaattttattggtccnnnnnnnnnnnnnnnnnnnnaaataaaaaaaaattaataattttaaaaagaaaaaaataaaaaaaaatatttttctttaaaaataaaaaaaaacaatttaaaaaaaattataaaaaaaacccttaattctttttctttttcttttccccctccaattggcatcagacagaagcaatctctccctataatatcaatgtaaaagaaaagttcacaattgaaaaaatttataataatccatgtcattattcactaaaatactttctgggtgattaccatatatcatcatcatcatgttacaaatactacagtaggtaaagagaaaacatatatatgggtttcaaaattccacaataaataggcaatgttaagcacgcatgtgaatgaggaacaatgaattacagacgtgacaaaatagcttaaatggcgtctaattgcttgcctttaaaattcgcatacccgaaatgccagtgcaagagcttcaccagagcttctttgctgtaaatatggttgtcgttcctccgactcgatgagctctacaatggcaacggagacttcttcatcatctttcaacgacagcttcgaagattctctcgtctcttctagtcactctgctaattcgcccccctttttcaagccttctccgttaccactcccgcttaattggactcaacagcctaaccccatctcaaatccactagattcaagcacaaatccagttccaaaaccaccaacaaccacaatcccatatgggttttcagcctagccaccatgtcctcagctttttgggaccgaaacctatcccgatgaagcaagtgggttctccaccgaaacccacaaagctttacaaaggggttaggcaacgacattgggggaaatgggtcgctaagatccgtgtccctaagaattggactaggctttggcttggcaccttcgatacaacgaaggaagccgccttggcctatgacc

SEQ ID NO: 42555 - DNA, 4188 bp, Cannabis sativa
ctctctctctctctctcttcaatactctctcttcaagctagtgcattaattcctttcattgtttacaatcaccgtaatcaaaacgttacctttcttgctccttatatttgctgagttttcttgggagtacacaacatgcaactcggcccgagaccttcaacgaaatgaagctaaacacaagctttcttcttcttcgttgatttttaacggaccctttcttcattttgatcttcttcctgggttttttcttcgatttttatattagctacgctatctgagttttctttgctcgccaaaaaaggaaaaaaacgatgaggaatgtagaacaaagccggtctctatttgggatttccctctccgacagacccagatggcaacaatttctcttgtgctcttccggattcttctttggttatctcgtcaatggtatctgcgaggtattgctgttttttcctttttcccttttcattttttcagtgtgtgtcttcattttcttgtacaatttacggttggcttttctgtttgtttcctgggaatattgaattcttgaaagggaatagcgttgggattttctttcatttctttctgcttggttgttaataaatactttaatgagttgacttcattctttgatcgttttttttaatcaagaacagctcataattcgatttcgcttatgcattctagcaactaataaaaaagattatgctgtctgtattctttgtttggttacaaagaaaacgtattcaaaaaaaataaaaaaagatcgaaagttaattctcctcttgcctctggggccaccactgaaattttcaattatgatttatttatttctttctctagtttactttttgaagttccaagctagtttttttttttttttttttttttctcaaaagcactatatatattttttttattctgaagaaattgtgatttatactttatacgaatatctctatttcgatgaatgaagttaacatttgttttggtatatcccaacaactaattaattatttttgtataaatttcaggaatatgtgtacaataggcttcaatttaggtaagtatatatggtacgagtattaatttggttatatgttgttacttaaatatatatgtgtgttaatcttaatggtgcatctttttcaaaaaagaataaaaaaaatcttaatggttcatactgttattgttgtttttttttcagctatggttggtatttcacatttgttcaagggtttgtgtatatttttctcatttacctacaaggcttcagtaccaagcaaatggtgaatccatggaagacttatgtaaagctgtctgccgttctaatgggttcccatggcctcactaaaggttccttggcttttctcaactatcctgcccagctcatgttcaaatcaactaaggtatgccacacctatactcttattgggatagtagtttcattttattatactgaattttggaagatggtagagagttttctgtttcaaagttaagtacacctactaaactaacttgacagtaatgcagcattacctgtattaattagccaattcaatattacgagtttgaattttagaacaatgagatctgttaatttcagttgctgggaggtagttagtgaaaagccaaagaccccatttccccccctcctttttcctaatgtttactgtgatgattttggtgttctaggttctacctgtgatgattatgggggctttcataccgggtttgagaaggaaatatccacttcatgaatatctttctgctgttcttttagttgtgggtttgattcttttcaccctagccgatgctcaaacatctcccaacttcagcatgattggtgttttaatggtatctggtgctctagtcatggattcttttctgggaaatttgcaagaagcaatcttcaccatgaatcccgaaacaacacaggtgaccttcatggaatagttgtgttataatttaaaaacaagctgtcttttttcattaacaaagacatagaaaagtgcacacattaacatttgacttcacatgtttcttgttttgttatccatttggacagacggagatgctcttttgttccaccgtggtgggtttgccattcttgatccctcccatgcttttaacaggggaactattcagagcttggaattcttgttaccaggtacataaaaacattctcatgtcacacatatcacaagcttcactgcagaccttttggattttaataacaaaataagtttttggtgcagcatccttatgtgtatggcgtgttggtctttgaagccatggccacgtttgtaggccaggtctctgttctctccctaattgctctttttggagctgcaaccacagccatggtatgacacataatctaatttcttttcttgcataaaccacatttaattttatacacacaagtatatagataagatcactggtttaactttataaatttttcatcaatgtgagtggtgactaccaaaagataccccattcatatatcatatcatgttgaaaagacacagtatactttatgttttttactttttcatttgaatgtcatagtacaagttcataataatctatcattttgaaaagacacttagcacagtaagtgtgacacaaaaaacgtgccttattttagggtaaaaaacaatgtggtggtaccaaagaatcatttgttgaacttgtcgtttcttaacacatattgtggccacaagtgagtgatcacgagctttatgtttctcaacacatattagagtttcgtcacactgttgtgtgtagatagaggtgagcctatagtagcaccacttgttgaaaaatgatcacgagtttcatgcttggttcccaaatattagaactcgccactatttggcttggatcagatatttcacagctccaactggagcccactaggtaatttctagggtggtgcttatagtggggtcggatatcataggattcatatatagctgcacgagtagcacctctgagcatttgtagcaaaatcacatgtttcaagcacttgtactttaagcattattaatataacgttgtggtgattttaatgttggaataatggtactaataatgtgcgtttgacagattacaacggcaagaaaagcggtaacattattgctttcatacatgatattcacaaaaccattaactgagcagcacgggactggacttcttctgattgggatgggaatcacaatgaagctcttgcctgaaaacaaaccaccgcagaggcttcctaaaccagctccctccactcaaatgaccacaaatgggaaacaggaagaagatggtgatgaagagaagaggccattggtctgatctgaggagacaacacctttattactcttttttttttttttggttcatttatattgttcaactgttataaggcaagaataggaaacagtggtaagtatgcttgtagatttaggcttcttttatttattttcaattctttgtattggtgaagtgggataagaattactgaccacatgttttcttctaaaaaagtcatagagagagagagagagagagaagagagagagagagagaatagtctgcttctgtagtggggggctgcctttgattgttacatattttgggctttggaagttggagttcaattatcctaacaccccaaaacgaaaaagcttattaatttgatattttttttattttatttttctgtagttctttctcaattcaactctaattttgagattattttaatattggaagcgacgggtatgttactaatggcttaggggtatgtattggatatccaattgtgattggattggattggatgttatttttaaatatttaattggatcaaatgttggatagggtgtccaaaaattcaatacatccaatcgaagtaattagtattttcatttagtttggatgagtaattaaattttatattgttatacgtgaaatatatatgtatatataaaaattaacattaattttttttttcttggattttatagatccaatacatactggatttaaaatattagatagatccgatctgatccaaactgtactaggtctaaaatattgaataaatctaaattaaaccaataaatatatatgaaatacattcaacggatagaaccgatccaatcgaacatccaatagatgttggatcga

SEQ ID NO: 42556 - DNA, 1761 bp, Cannabis sativa
aaaaaaaaaaaaaaatcctaattactcttctctctttccctctccccttacaatgctcttttgtttaattctctagaacaactaacgttaattatttcaccaatgggatcttcatcataaccttaattgtcatttttcttccccatgggaggttgcgtgtccgtgtccgcaagaacaggtctctacaagaggcggagggacatcaagacagtgacgacgacgacagagatcaaccccggcacaccccacaagctaaccctccgcctctcagccactctcaggccgactgcggtccttgatgaccccgtcggccatgacatcttctcaaactacaggtttggcaaggaattagggaggggagagttcggagtcacctaccaatgcttcaagctcgacacaggtgacaccttcgcttgtaagatgatatcgaaaagcaagctcaagacagaaattgacattgaggatgtgcgaagggaagtccggataatgagacatttgccggatcatcccaacattgtcacgttcaaggaggcttttgaagacaaagaggctgtttatcttgtgatggagctctgccaaggtggtgagctttttgatcaaattgttagtaaaggccattacacggagcgtgctgctgctaacattactaagacaatgctcgaagtttgcaaggttctttccttttcatccaccagatatatgaaatctcttgtttgttttcatgctaatttcaaattatagtttctactaatactatctaccaattttacttggatgaggaaacagatttgccatcaacatggagtgatacatagggacttgaaaccagagaatttcttgtttaaagatagcagtgaaacttctcaacttaaggcaattgattttggactctctgtattctttgattccggtaattatactttagaaattgaacaaatatccaatttggcttcttacttccaatttagtatcatttaattaatctatgtttgatgttataatttactacactgcctaattggtaggtcagagattcaatgaaattgttggaagtccatattacatggctcctgaagtattgagacgaaactatggaccagaagtggatgtttggagtactggggttatcctctatatcctgctttgcggagttcctcctttctgggcaggtaattggtttcaaagctaggtttgctttcattaacttatcttttatatttaagggtcttggcttaattaggagaaattatatatatagaactatcttctgaccatgagaatttataactagcacagaaactgaggaaggaattgcacaggcaattattcgaggtagcatcgatttcgaaagggacccttggccaaaggtctctgcaaacgcaaaagatctcttgaagtgcatgcttgatcccaatccttacagcaggctcactgttgaagaagttctcggtgtgtctctataatatctttttttttttttcagccattttatcttgaaaatttataattttgatataagaatgtcttttttcatcattttagtaggaggactattagaagaaaaggtgacaaaaattttaataattttttcatcaatttttttatataatttaaatttaattcaattacatttttatttctagacaaaggaatagttgaacattgaacttttttagtttgccctcggtttgtagtatagtagtttgttttttcattattgtttcttgaaaataacaaaaaggaattggttgacaaagtaaa

SEQ ID NO: 42557 - DNA, 9893 bp, Cannabis sativa
ttatagtttgctttgtcttgcaatttcattctaaaaatttggctggtatgtgcacaatatcttccttataggtgagactgaacctgtgaagatgttcgaaagaactgctaatctggcaaataatcagataataaactatcgttgtgaccctactgaaaagtggttggttttgattggaattgcccctggtgcccctgaggtatgttcttagatatagtaacattatatagtaaattaatactcatatgcattttatgtgtcaattgatcatagggaatcctcattcaacccaatatgtatgatgttcttggcatttatatgttaaatttgtaatgatctaatccatgcagttggaatagaaaggagctcttctcctataactagttagtgttaaggagccttcgttcaaatggtccttttgaactttcccgtgacatgctttaatactttattggttgccttgcagtctctgagtctatggtttcatgccttcggatatgcaatttagttgtcctatttcttgtacttgatttatttccctgctctgtttgcagaggcaaaatttggtcaaggggaatatgcaactcttttctgtggagcaacagagaagtcaagctctggaagctcatgctgctgcttttgcacaatttaaagtgcgttatttaagttcttcatctctctgtattttcttgctttttttcacccatggtatgcatatcataagtgcatattttttgattaattatcaaatttatttttttcaaacaggttccagggaatgagaatccttctactctcatttcctttgcgacaaagacttttaatgctgggcaaattacatcaaagttgcatgttatagagcttggtgcccaaccaggttagcttagtattatcttattcacaccttctattcaaaaagataaatatttttaaaaggtctagaatattgatcaccaatttatttctatcttgttttctattttaacattgcaaaattatttgcagggaaaccttcttttacaaagaaacaagcagatcttttctttcctccagattttgcagatgatttccctgttgcaatgcaggtaatgagattcttatatttgcggtcttccctagtattcaggaccatgaatattaattgttagtgctcaattttccagatatcacacaagtatagtttgatctacgtcatcaccaagcttgggcttctattcgtttatgatttggagacggctactgcagtttacagaaatagaatcagtccagatccaatcttcttaacatcagaggcttcggcactaggtggattttacgcaattaacaggcggggtcaggtgttattggccactgttaatgaacaaacaattgtgccttttgttagtgggcaggtttgtatcacaaattggcttatctttatggtattagattatgattgatatttgggatttaagttttatatcatgacttcttgcagttgaacaatttggagcttgctgtcaatctggcaaaaagaggaaatcttcccggtgctgagaatctggtgtgtttttctttctatttaatctttaacttgactgatgatttctttctatcaaatcaagttgatggaggggaaataaatccattcacatagtatgaagtgatcaataaagaacatatgactagatcttaccttgttcatacatgacatgattgagtctttctcttccaataaatacatgaagtctcatcatagctgtaggaacaaaggaaaatcatgattagtctgcatccttttgttagttcatcacaaattaatatttgtgaatgatttcaggttgtccagcgattccaagaactgtttgcacaaacgaagtataaagaagctgctgaacttgctgctgaatctcctcagggaatccttcgtactcctgatacagttgccaaatttcaggtttctccattttgcttttattgtcacattggcgtcaaagtattccataacttgctattctgtatatccaaagagattgttaattaggttgtgtagaatagataaactctgtcaaagatacagaatacgacattccttattgtggccagtactatccaattacttgaaaacaaattattggcaatgccttgaatagaaggaattggatattattaaacaacagattaagtttacacatccatgctatgctgaacctttatgattggtaattaactcttagtctcattattgcagagtgttcctgtacaaagtgggcaaacaccaccccttttgcagtattttggtactctattgaccaggggaaagcttaatgcttttgagtcattggagctatcacgtcttgttgtgaaccagaacaagaagaatttgttggaaaattggttagcagaagacaagttagaatgcagtgaggagctaggagatcttgtgaaggttagcatttggaaattacactttcctgtgttttcttcccttggcaataatttagttgcttaattcgactaatgcctacctcatgttttttatgtttatgtctgatgctctaattacgtttcactgtagactgtggacaatgaccttgcactgaaaatttatatcaaagccagagcaactccaaaagttgttgcagcctttgctgagcgaagagagtttgataagattctaatttattcaaagcaggtaatgcttatgtttcttattcaatgattctaagaatatattgaccttataattctagctgaaggatacataactagatctgtgctaattttgtctcttttctctgcaggttgggtacacgccagactatctgtttcttttgcaaaccattcttcggacagatcctcaggtaggcatacattattgcaagtatgtttcaatacttgcagcagggtttgaaagcatattcaacctatattaaaagaaagaaacaaaagtttgacatggagttaaatgccatcatctatgtcgtcttttgcttctctctcgtgtttgggattgttctccctgccactaacattgccacttttcattttttcaatactttttgttggacaagttaattcattctagtgtatctgataaatatgcttctattattgtatgtatctaaataagttataatttctttgggatccagggtgctgttaattttgcattaatgatgtctcaaatggaaggaggttgccctgttgattacaacaccataacagatttatttcttcaggtttgttggcattcactgttgtcaccttgtactatatataaattcggttccatgaccaaaattttcctttccttttttgtgtcaactctgtattatgtccagggtgtatgctgtttatttattttagttgatatcttcaaggagattcaatagtgagcattgctttctaaatctactttgttattgtagacattcttggaaactttcattgaaacaaaataatcagatttacagtacctcaaaataaccaaatattaacctattgatgttaaaaaatacagtcatcttagaacactaaatatacttatgctcagacagatagatgtaactatctatccctgatttggatagctaatagacttttgaaaggcttaagagaagacatcagggaatatttagcataggataatttcaatttccatggctgtataaccaatcatatggtcttattattgtgagcactacaagattgtgaaggagatgacgtcttaccttttgttttttttttcattgtacaccagaggaatttaattcgtgaggctacagcttttctattggatgttttgaagacaaatttaccagaacatggtttcctgcaaactaaggttactgttgctctttgagaccacaaattatttaagtgtgctgctttgtttattaagctaatgacattttttttattacacaggttcttgaaatcaatttggttactttcccaaatgtagctgatgcaattttggccaatggaatgtttagccactacgatcgtcctcgaattgctcaactttgtgaaaagggtggtctttatgttcgagctctacaagtaatatatcttttgataacccttttctatttatgatcgttatcttgtttagttaattaaaattggcttttgctggaacaatttacctttaatgcagcattacacagagttgccagatattaaaagagtcattgtgaatacacatgctattgagccacaggtaattatagtcttatgctcacttctcttgctacaggaatttgtgactgtttttactaactaatcggttattgcagtctctcgtagaattttttggtactctttcacgagaatgggcattggagtgtatgaaggaccttttattggttaatttaagaggaaatcttcagataattgttcaggtatttgattgtggttagttttggttttgtgtcttgttaaaacagatatatttgttgcataaactgaatttcgtttctttgaatggcaggttgctaaggaatattgtgagcagttgggtgttgatgcttgtattaagctttttgagcagttcaaatcttatgaagggctgtactttttcttagggtcatatttgagctctaggtaacatttttcttaagagagcttatgtgcttattttgacatcttatgttttctatattagctaaatacaagttttgttttcatcttttctaaaacgggacagtgaggatcctgatatccacttcaagtacatagaagcagctgctagaactggacaaatcaaagaagtagaacgcgttacaagagagtcgaatttctatgaccctgaaaaaacaaagaatttcttaatggaagccaagctcccagatgcacgcccactgattaatgtttgtgatcgttttggatttgtccctgatctcacccactatttgtacacaagtaacatgctacggtacattgaaggatatgttcaaaaggtattttttttagccaaagattaacatttccaaataccataaattagataaatgtattagtcataagatttttcttttttgccttctcataggtgaaccctgggaatgcaccattggttgtgggtcaattgctagatgatgaatgtccagaagattttatcaaaggtttgattctttctgtacggtcattgcttccagtagagccccttgtggaggaatgcgagaaaaggtgttgttcctaccctggcattcttgtttattacttgtaaccatacaatggtatctcatgttttattgtcttatgctaggaatcgacttcgtttgcttactcaattcttggagcatcttgtgagtgagggaagccaagatgtgcatgtccacaatgctcttggtaaaatcattattgaaagcaacaacaacccagagcacttccttaccaccaacccatactatgattctcgtgttgtgggtaaatattgtgagaaacgtgatcctaccttagctgttgttgcttatcggcgaggacagtgtgatgacgagctcattaatgtcacaaataaaaattctttgtttaaattgcaagcaaggtttgtgatattattacattctcatttcttgtagcaatcttgtaccaccactcagttctttaagataatacatttttgctccttgcttacagatatgtggttgaaaggatggatggtgatctttgggagaaagttcttaaccctgaaaatggcttcagaagacaacttattgatcaagttgtctctacagctttgcctgaaagcaagagcccagagcaggtttctgcagctgttaaggctttcatgactgctgatctaccccatgagttgattgaacttctcgagaagattgtgcttcaaaactctgctttcagtgggaactttaatcttcaaaacttacttattttgacagccattaaggcagatccatctagagttatggattacatcaataggctggataatttcgatggacctgctgtgggagaagtggctgtggaagcacaactctttgaagaagcatttgcaattttcaagaagtttaacttgaatgttcaagctgtcaatgtcttactggataacattcgaagcattgaacgagctgttgagtttgcattccgagttgaagaagatgctgtttggagtcaggttgcaaaggctcaactcagggaaggactagtgagtgatgcaattgagtcatttattcgtgctgatgatgcgactcaattcctggatgttattcgtgctgctgaggatgtaaatgtctatgatgacatggtgaggtaccttctgatggtgaggcaaaaggtgaaagagccaaaggtggacggtgaacttatatatgcatacgcaaagattgacaggctggctgatattgaagaatttattctcatgccaaatgtagctaatctccagagtgttggtgaccgcttgtatgatgaagctctatacgaggcagcaaaaataatatatgcttttatatctaactgggctaagttagctgtcacacttgttaagttaaaacagttccaaggtgctgttgatgctgcaaggaaagccaatagtgcaaaaacatggaaggaggtctgctttgcctgtgtggatgcagaggagttccgattggctcaaatttgtgggcttaacattattattcaggtatttgtttttttctgttacctctatacggtgacttgtgagtctactgacatcgagtttgctttggtcttgtgcgttttttgaatatttgatatggtaacaattattataatatatgctatatttaatttctatttttcaaacctcagttttttgtttgaatgatatgcttgggcattttttcttcacacctaaaatcaagatccaaacacaatcttttatgctgtgatcacctaactagttagcatgcaatgttcttgcatttgtttgtacatttccatattaagtgttcattgatttctgcaggttgatgacttggaggaggtgagtgaattttaccagaacagaggatgcttcaatgaactgatatctctcatggagagtggcttaggattagaacgtgcacatatgggcatctttacagagttgggggttctgtatgccagatatcgtccagagaagctcatggagcatatcaaattgttctcaactcggctcaatattcccaaacttatccgagcttgtgatgaacaacaacattggaaagaacttacttatttgtatatccaatatgatgaatttgataatgctgcaacaactatcatgaaccattctcccgaagcgtgggaccacatgcagtttaaagatgtggcagtcaaggttgcaaatgttgagctatattacaaggctgtgcacttctacttgcaagaacacccagatcttattaatgatcttctcaatgtgcttgcacttcgagtggaccatacacgtgttgttgacattatgcgaaaggtattaatattttttgtggctgtatcaatatccgtctttttttattgtagaatattacctctctcttccacgcctgtgcttccttcagactaactccttgttctcttctttgtctcatttttttgatatcaaaattaggctggtcatttgcgcctggtgaagccttacatgattgcagtccagagcaacaatgtgtcagctgtaaatgaggctttgaacgagatttatgtcgaggaggaagactatgatagattgcgtgaatccattgatctgcatgatagctttgaccaaataggcctggcccaaaaggttagatacagcattttactcaatgattctctgccattgaattaaattacgttaggctcatagttttgcttatttatgtacagattgagaaacacgagcttcttgaaatgagacgagttgctgcctatatatacaaaaaggctggtcgatggaagcagtctattgcattgtcaaagaaggacaatctttacaaagatgccatggagacagcctctcaatctggtgaccgtgaacttgctgaggaattgcttgtttatttcattgagcaggtgcatttttcagtataagatgttgttagtgtaatactaaatacattttctattttggattgagaaactcatctatcttctttggtatacagggcaagaaggaatgctttgcatcatgtctctttgtttgttacgatttgattcgggcagatgtcatccttgagcttgcatggatgaacaatatgcttgactttgctttcccttacctgttgcaggtaaattgtctgaatttgttatttgtttgtttgttttggggtggtgtggtgaggactgggatgatgtcgatgagtctatttttgtccttgctgtggctgtttttgtcagtttgtacatttactaattcaaaaatattttctgtaagcgctgaaagtaactgtgtattgtctttgttttgttcacatttcgtggttttggtgtttccatacttcatcttacctaaaccttccttgtttcactttgtagtttatccgtgaatacactggcaaggttgatgaactcgtgaaggacaaaattgaagctcttaacgaaaacaaggctaaagaaaaggaagagaaggacgttattgcacagcaggtaattacttgcagaaaaatacagtactgatgttattaaagaatggtgatttctgattgctcttatgttcttttgccaataatttgatctactgttgcagaacatgtatgctcagttgctgcctcttgctttgcctgccccacctatgccgggaatgggaggaccaggaatgggaggctatgcaccacctcctatggggggaatgggaatgcctccaatgccaccctatggcatgccacccatggggagcagctattgagatgtatgaggactacgagttgtgaactccacttcaaaattgcatgttctagttggtaggggcaacaacctagggagatacttttgaattaaatgtaatttgagggggccttatttgccccttttttcttggtatttctttgatttcatgggttgaaaattgtagtttataataattcttttttgttcgccataggggtgtggatatgttatttgctattgtaatattcttttggtaggagaggcattttttggctgtgctgctgatgagggctagctttgaattttctccactctactttttttccggacctttcctgattataatttgaaacacaacatatgctgatatcacgttgttgtgcttttgattcatcatttcgtataatatatacgctgcttggttgcttttttgttttgttttcttttgcttgtctaatttttcttcactaagattgtttatgcttacatttgcttcagcttacacgctctacctgttgttattttacagttctgtattttaggctaattatggtgaaacatgtcaaattaactattttttttttttttaaaaaaatagtcaaactaattatctaaagtactagattttacaaaatgattttatttaatttactttattagactatcataattttggtggtttctgtgactatacaaggtgattttgttaattaaattttttacaaaattattttgctaataaaaattaattttataaaatactctttctagtctttttctgatattgttacaaacaattgagatttctttaaatgttgctttgcaatacagcctagagcactgtccatcccatgcttgaattttctcaccctaatccataagaaagagagggatggggaatggggagaggagaataataaaatttcaaagaaacacgtctacggtctaccactaaagaagggacatttaaaagacatgatctcgtgtgagaataatttggaaaacggtcagttttttattaagaagacaacgtaatagtaaaagatcaccacgtagggagaaggttttttggttatttaatttta

SEQ ID NO: 42558 - DNA, 6083 bp, Cannabis sativa
atttgatgtgatttctcttctttcttatgaaacaagtatgctttttttgtttttgtttttgcttgcagactgataccttacagtactctggtgcttatgcatctgttggttatgataatagtactcggttagataatttctgcgacaattttaaagttaaggttattcgattgacagaggaagatatggagtttgatatgattggtatcgatccagcacttgcaaatgcgtttcggcgaatccttatagctgaggttcaatagttttacacaatatttagatagagatgtttttgaatgcttttggaattgtaaacattctgatccttacactgatttatattggtttaggttccaacaatggctattgagaaagttctcattgcaaataacacatcgattgttcaagatgaagtgctttcccacaggttgggtctcattccaatcaaggttgatccgagatggtttgaatatgcaggtttgactctcaatttcaatagtaatagtttcattctcatgctctttaatcgaatgactaactgattttctcttttatgatgttagagaataatacaccgaatgagaagaacacaattgtttttaaactccacgttcgttgtgcaaaagacacaccccgtacttcaggtttagcttctctctttcttctgcaaaactcataacgaaatctctttgttcggtctcttattgtgtattgtttgcttttgttatcttgtaatgttgtactgcagtaaagtcaaatgaattgaagtggttaccccatggaagtgagtttcctttgatcacagaagattcaaagtctggttcatcatcaaaaccaagaacatacacatcattctcttgcagccaggattcttttccagagttttccaacaaaccaatcaccactatggaaaatattattttatccaagttgggccctggtcaggtaatcttgtgcatgtttgatttatactgtatagatctttacaacttaattacatgtctccaaacactaaactaagaaatgtagctctttatagcttacacaaactttagtctcagtagtttcacgatagcagcttagtcggtagatgtttcaggtaaaaaaactacaagacgtaggtttaacctgttgctaggattcgtgctagaattggagatcggggaatcaagtacattattttcttgacgagatagtttgatggagaaaatgcgtttatagccccgggctttgttgtagtggcaagagttgcttgagttgcgtctgacttaggcagagctctcatgttcgactcccaactagcacattaagacactgttgtctcgtgggacatgacagtagggcctgcagggtatctgattaataccctttagtttcgaaaaaaaagaaggaacttgacattatttgatgaagctctaaggtgttattgtggggcactattgtttttttgcttctattcgattttttgttgaatgttaattgaggaacccgctaagacgtttttcatgagtattttatgaagtaaaaagccattagtggaagggtactctttgattttggaatgatgatccattttaacttgtatgattctctcttattttgaagtaacatattgatctgtcttcatataggaaattgaattagaagcacacgctgttaaaggcgtcggtaaaactcatgctaagtggtcccctgttgctactgcttggtataggatgcttcctgaggtatatgatatgtttgttaagtagtaacttttcaattcttgattctaactagaagtttcagaaacacttgtgtgatctttctgttataatttctattctagattgtattattgcaaaatgttgaagacgaggtagccgtggaactaaaaaaaaagtgccctgtaaatgtctttgatatcgaagatattggcaacggtaagttgatgctctttctcgatatgatttaaaactttctttctttctgtcttggctatttcttttcgttctttcttgattgtcgattcgaacattgaacaggtaagaaacgagctacggtagcacgcccacgagattgcactcattgtagggagtgcattggaggtggcaaagaatgggaggaccgtgtatcattacgccgagttaaaaatcatttcatatgtaagtctacaaataccatgatctcaatttagaatgtttttattttcataatatgattgattcatctaattggaatggtttttactttcactagttactattgaatcaaccggagccttacctcccgaaacgttattcacggaagcggtaaagatattggaagacaaatgcgaacgagtgatcgcagagctttcgtaattctgttttttgttcacttgatagagaaacattttgttttagaatctatttatgtaaaagctacagctaaagaaaagaagccattcattcaagccattgttgtcctatttcaagtcttggaattataattgttaattcgggttttgattttcgggggccaaatttaatgagattgttgcaagggcgctgctagagggagcttagaacgcattcaagaactactcacttgtaagatatcgatgttgttcgggttgttggtagttttgagattagggggcctaattcagcagttgctgcagctatggagttcgattcatatttggtgttttgacttgcgaaaacattgaattaggcgttaaaccgagctggtgtttggtagcagctattaagatggcgccactgttcgagccaagaacaaagttttttctgtagttcaaagggtcagataaagttcaagattttaggcacctaattagtaatggcttgctatagtttcatgggagctaaaagatactccttccaagatgagatttgcaagagtttctacattaaatttttttgaatttcattattgaatatatgttacacattgcattgcataagacccttttcaattagtttgattgaacaaattgacattaaaactctccaaactagaaatcaaatctgaagtctcttacacatcactataagtatacacacaatgaataagactatacacacaaggaacattcttttttttattcgagttatgacatgtaccaaattgtattttaacttttcagggcgttaaacattctttcttaaatttttcgtgtgattgtctatatgtaaaattatgcttcctgaactttgatacctaacaaatcgtgctcttaaaattcatatcaaacacacgttagtgaaattaaaaagaaatccgtgaatctaataatctcaataatttggaagaaatttttaaaaactttaaaaatttaggagaagaaagatgacaaatcctagttaaccttaataaaaaaaaaccataaattagacaaaaagcaagaaacaagttaaaccaaagaggataataacacctcgatgaatgcaccaccatgaacaccactatcacaaaaatgtttggaatataacttaagtgcaaaagtctacagtagatcaagtttgggtctggctccgagtctatagtccaagattaaatttgggtttggttcccggctgcattcgggtcaaggatccaggatctaaagtggggattgagtttgagttgggttggaatcgagtcgaggtgaggagtactaatataaaatagattttaaaaaattatgtttggttctctttttaacggtaataataattgtgttatatttttaaaaactttgtagacatttagctatgtcaagttaatatctaaatgttatttttttattggtatatttaaataaatttttaaataaaaaataaaaaattaataagctaaactaattgtcatgtggtaattaattttacacccagaaatataaattaagtaatttattcttaaattagaaattaaacttagtatttatctaagcttttatttacttatttgttttcaaataatcattttaatcattttcggtcaatctgaattttgtttgctctggccttcttcctcgatcgccactcactcttccgccggccataaccgaaccagtgcttcatgttgctgcccttctgagaaaaggtttttttttctttcaaaggttgataaagatcattactttttacaattgttatgaaatttcagtttcatcgagtttgaattttaattttgcgggttaaagttaggttttttataattttcccttattgcactttctgctaatttcattgtccctttgtatgattcttagttaagctatttcaattctcttactttttcctcttcttgagctgcccttattttgttcttatgccttttctaactttaagttcaaatagaattgttggttggttcttctctcatttgcaacttgttttaacacattggtttaagtctttttatatgggttttgtatgttttttgctacaattcattttcttgttacttttaatgcttaattaggcttcatgttttatgcttctagtattaaagtatatcctagtgttgtgttgtgttcagctcaattgttggtttgattcagttgtgttttgcttcttgaaacagttattgtaggtttgaaagtaaaagaatttactggtttattataggctaactaggatttttctccaaacttatgtcaaatcttgccccaaatttcgtacacctttaaaaatttctacccaattattgagattgttagattcaaggaattctgtataattttactaacgtgggcatgttttggtatacggaacagtttggggtaaatttttaacagcttgaaaagttagacacgatttgatacgtgttaaaattctagtgaaaaaattataattagctttattatatctacacataggtagatatatatatatatatatatattgtgttgaaaaaacaattatcaatatgaaagaaacaattttcatacactcttcaagccaaatagtgtttagtgttttaagatccacaccaaaattcaaagtcttataaggtttttcaattcaccccttttaaaagtatagttttttagttagaaacaaaccatgcccatggatttgtttatatgtatatatatatatatatatttatatatatctccagaatcaaatatttttccaagtataagcctttaacccaactctccctgtgtttgagctttttgatcacaaacacccaatcctcatattcaagatcaatccaatcgacccatctttctggttagaagattctctagtatcaaattttatacttttcccagatttttttgttactgaataaaagagttaagcaatcaaggaccaggagattgatatttgaacatggagggggattgctttctgttgtctatctctttgtttcgaaaagtagcatgttcaagtaactattttggccgctcgggtgttcataatctggagtttgaaggattagggttcttattattagggtccttaataaaaaaaaaaacatatatttatgatgatttattgctattgattagttttttttagttaaaatcaaatggaattttatgaagtaatattcaatttctttagtttgatttctattttgatagattttgactcaatcgttgctttcaatttcagttgggagtccacacaatggacaatatagtcgattctttgagcaatgcataccaagagtttgttgctgcagctgcaaatatccttgaagctaaagaaagctgtagtgcccagaaaacattagccaccgatgcagctctcgagaatttcaaacagaagtgggaattattcagagtggcatgtgatcaagctgaggagtttgtggagtctgtcaagcaaaggataggatcagagtgccttgtggatgaagctacaggctcggtggttggaaagtctggtgttgggattggaattggccctgctgccactactggtcttccagcaattagcgctgttcgtttggaacagatgagcaaaaccgttaggtggcttgtccttgaacttcaacatggctcttcaggttcttctgctggttcagccgctcattcccatacaccgggagctcctttcgatgctagattttctgaggattcagctcaataactctccatttgt

SEQ ID NO: 42559 - DNA, 4972 bp, Cannabis sativa
  modified_base (29)..(44): a, c, t, g, unknown or other
  modified_base (4079)..(4079): a, c, t, g, unknown or other
  modified_base (4282)..(4285): a, c, t, g, unknown or other
gttgtattaaaaaaaattatcaaaaattnnnnnnnnnnnnnnnnttttactattttagaaaatacataatctattttgtcatttaacaaaatacaggtccaatctgttcgtatttacacttattattatcaccatgataattatgtttttttattagtaggaaattattttattaaatttaattgttcaagtacatatataaatggttttcccctgttaaaaaaaagtacataaatggttgtgaagttgtgattaatgtttttgcagtaaatatatcatcaaatgtaataatttaatcaattattattattttttaaaaaaaaataatagtattattaatttataccattaaaaaggacaaataataataactattaacaattaaataagctcatgaagacactttgtgatttcgtgaaacttacgtaagtagacaattcttaaagatgtaaatacaaaatttaattattatcttattcactttgtttgaggtgagaatatttatatatatcattaattatttataaaaacgttaggaaatcaccatcaatgaaatttaatacaaaatttgtctccatcaattttgaactgaaacataatatttgatctctcctttttgcctattacacataaaagtaatataatattataaaatttgagtttattaattaacaattattcttttcaaaaaaaaattaacaattattttttagtaatataaggatgaaataaattaaaaaattattaaaacatactattagtgtctaatatttttttcgatcttatattgttattggtgtaattaagtatttcgtctcatataatttaagaaaataacgtttacgaatacttaattgtctgatatgatattttaaagggtgttaaccacaattgatatattttaacctttctcataaaataattataatttattatattgagcttaactaatttattattacaaaagcatcttttgttattataccattaaacatttcatgggcaaacatgatcattattcaacatttagttctaaattaaataatcacaaattatacccctctatgtttctttggtcaatcttttataggttatctataattaattaaaagaaggaaaagaaaaatacatttataacaataataactctactatagataattgagagtgatgtatctaataactaatttaaattattttaaactactaccaaacatgccattaatgaactttgatatttttctataacattatttctttcgatatattaataatgattttaatagttattttatgtgtttttttttataattaattatttcattacaccattgtgtgaaatgttaatgagtgaaatttacaactcaacagaaaaaatattttgacgattgcacatgtaaatttgatttgttttccaaagttgacataatacattctcaagttttcatattttgataaattatatcctaaatttttaatatgatgttgtatattgtagtaatagatattttgttcgtttttgaaaactacaaaatactttacagtgtctaaaataaagttcaaaataatttattacacgtgtgtaaaataaaatgggtacacgatcttatttttaatactgtaaattatttataatttttcggaaacagacagaatatttaatataactataatgtacatctatatataaaaaaaattcaagcaataatttattttttatatcgaaaataaataatgtctctacaataaaaaatagaagtaatatcaagatgctcaaactaacaggactttgagcgaaagtcaaccttctttagtaaaggggttgagtggtagtcatgcttctaattacaactttctttgattgtcttcgtttgatctatgttgacattggtaaggaagtgtcataataagttttgcattgttctcaatgatatctcttaagttcggtattgtaatagatcgttaaatactattggttattctcttgctaagagacgtttaatttagatgagttcaatatttaatagtcgagagacttctttaaatttctctatctactctttgagctcctctttgtatttgaaatttctcatgctcaattttttttctataaatatatataaacataaatatttacatgtaccatcaccaactcggaaaataaagaataccaatacaaatgtatacaaatattcctttagaaaattttgatctttgactttgaacttaaaactcatgaagtccttcatttccccaaagaaaaaaaaaacaaaaactcaaccccaaatatgcccttctaagagtagtgggcaataactattttacctacatatatttattcaaattctaatataagaaatttgggtttacacccaattttgatcaaaaaaaaaaaatctagtataaatggatatttatgatattattccattttataagttaggcatttggccatttttatttctttctctatttggtaaagtagaactctagtcgctacatttaatttgctatgttatattccaccaaaaattcacttctaatactatactatatttattatttattcattttgtaaaatattattgtatatacatttgtgtctagcataaatgcatattataatcattccaaatttatataaaattcacttttaaaaaataaatgcagtagatgatcacttagcatttttatttttcaaaaaaaaaaaagtgctttaaacattttgaaaaaagaaaaaaaaagttttttttattttctcttgaaaatggagataagtagatatattgtgaattaggcttgaaagaacaaaaagagagaacaaagctttgatcgtactatttccaagttcaaagtaaaccactaactctaataagtaagtttaaattctcattattgtgatatattattaggtgaacaacttatttaatgatttgtacagattctaatattaatgttttccaccatttaattaattattattgttgatttgtacctattttaaaatggaaaatgtatatcgatcatcaagtgatccataacataagttattattttgtcaactgatcttaaaaaattataaaactatagcaattagcacatattatatgattttcaaaagtaaattggtttaataaagaaatagaatcccacatagaattttttttatagtggttcgcctcctttaatacggtaataatgggttagtccacttattattttattgatcaatgttatattctcaataatgtgtttgagtgattacaatggggagctctttagcataaatctctttagtgtgtctctataagtgatttcagaagactcgtcaaacaaactctattctagtgaaaccaaacttgtttaatttttcataaagaaaactaaataaattattttcggaacgaaaataaaattattttttaaagaaaatttcgtaattcacattcaattatcaagtaagcacataaaccaatataaacacatccaaattaaccaaacatcgtattaaattcatattttatgaaaataaatcattatcatgactctgaggccaattgttggatcatgttttaccaagatctaaatttactaacatgtatttcctaaatatgaatttcctaaaaccataaaataaactttgatgtctttctgtagcagggtattatcaagatctgaacatgaatcttctctctttcaatttggttggacacagtctttctcactaggctaagtattgctttgatatgagtggacatactctcaattgaggatttctaatagataaaagagtctccttttctatgagtcagacaaaagaaactagagtcatctaatgaattaagaaaacaagagctatcttattctatttataggattctttctaggtctaagggctaggtttagaatttaaatggaattaaaaaagataaaataaaggcttaaattgtggtcggccacatcgtggaccccactagttttaattttgccattttatttaacaatttatcttttctttcacaaacaccatattttaattctaactctataaatatcaattctatctatttaataattanaattaattatcaaataaaattattatttaacttatttattaattataccgtacaaagtctatttaattaataaataaaccttaaataagtcattacttagaattctaattgattaattaaaatcaattaattgagattataaaataatattatcccacttagtgtggggaccatgactctatgtaatcaagcttccaataagnnnntctaaaatttaccaagtaaattttttagcttattaatttctcctaactccactataaatttggagttgaactcttaattacatagaacgctctattactaaaaaaaaaatatgcaaattgaattaccaattgtttcaatctaaatagtcaaaaatcctctatagatgatctacatcaagtagggacaaatttaccattctacgcttcaatgtattttatccttaaaacacttagctttttgtaaatgatatttcagtaaactaatataattactgaaatgaggcctcaatcaattatcgtgttaagctaagcttaaaaaaaatattgtttcacttctagaagttatagaagctattgattctatatttatgattagcactcccactcaattgtactaccatgttcccaatatgtaagcattgagtcaatccaattgatcggctttaatgaacatgtcaaagaatacaaataatacatttaagtcaaaacctaaccatctcatgattaagatctattgacctaagatcaactaagtgatattgacttagagagatatgacggtaagtttataatatcatatatccaatatcaacatcggtccagtctgatgtatactccatacatccaatactagcgtactttttcaatgccatggaaaggacatatcacttatctaaggtgtaagta

SEQ ID NO: 42560 - DNA, 2203 bp, Cannabis sativa
  modified_base (28)..(66): a, c, t, g, unknown or other
aaaagaggtatgtttcaattaaatatannnnnnnnnnnnnnnnnnnnnnnnnnnnnnnnnnnnnnngtatttttcaacttaccccaaatcaaaagtaaatatgctcagtgtatattaaaagtaaattttttttaaaagtatactaattttgacaaattatcagtttagattttatgttcttagtagttttattttgaactctttattttataaaaagattacaattaggagcttaagatcataatatttttcaatattgaccaaaatgtataccttagttaactatagtaaaaattatacaattttaaatcttatattttagtataattaatgacccctaaattttttagaaatcatgttttaaaataactttttagtaattgaaattaaaattgcaggcccagcttgctttagcctagaaccagccctgaatgaatattattaagccaataaataaaatttaaaagagtttttacaccacatactgaaatgttcaactttttttactgtgggtggagcagaatttttttttttttcaaaaatactgtacaagtaaaactgtgtactgtgttaagttttcactcttgtttcatgattgtcttttagttgttcaaatgttgttttaataattctgttttgttgttttatggttgttttataaaaaagacagtatttttgttaaaaaaattctatgtaacagtaaaattgttaatttttagtcaaaatctaatatttttgaaaaatcccctcaaaaagctagcatatattggcttaccatatgtattttgcattagatatagttgccaaaaaaagcatggggtaggtgaacataacctaggcaaatccaactatctatctaatttactactaaattaataataagaattattatatcccttattacacgttatgggcttgaaaatgatttaactataaatataattataataataataataacatgaacaaaactccaattttcttaattcactttctgctctagtgctccacagctatatatgtatgctccccaccactgagaaagattccccacacaactctactacttaattacttatgaccactttcataataatcacactatataaatactacccacccacaaccccataaattaacaacattaataataacatatcatcatcttcttcttcttctcaataccaaaattacactctttcaaaaatgttattatttgtcttgattattactattattagttcttcattgaatactaatattaatgtagttggtgctagtaacaacttttatgaagatgtagacattacttggggtgatgggcgtgcaaagatactaaaccgaggcaaagttgttactctatcacttgaccaaatttcaggctcaggtcttcaatccaagaatcaattcctttatggcaaattcgatatgaagctcaagcttgttcctggtaactctgcaggtgtcgtcactgcttattatgtacgtaataattaatcttacgagcaatactttgcatttcacttgaattcacattccgagccatttgacaacacatgatttaatcaagatatgaagtataatttaaaaatttgaaactaaatataattccttatatttgtgttttatatatagttaaggtcagaagggtcaacatgggatgaattggactttgagttcttggggaatctaagtggtgagccttacatagtacacactaatgtttatagtcaaggaaaaggtgatagagagatgcaattctatctatggtttgatcccacagctaagttccatacatattccattctttggaacccatctcatgttgtgtaagtcgtttagtgccacgtgactttaaagactcaaataatattatttactcttaggaaaaattacatggtatactaatttttgctatttttttacaaaaatattgtcagacggtttttctttttacttttttactgtatttttttataagtttcatattgcagtatactgtgttaagttttcactgctgttctactggtatttttaattgttctactgttgttttgagttgttctgttttgtgttttactagtgttttatataatatacagtatttttaaaaaaatttccgtatgagagtatttttataaaagttaatccaaattctaatatttttttaggtttcctcctcttatcaattgatgttatttat

SEQ ID NO: 42561 - DNA, 5190 bp, Cannabis sativa
aaaacctgcttagctgaattcttctcttctcctttttatcctgtgcctgccagggtaacagctgagcttgttcatgaaacatagcattacttgaggaagataaatagcatgtacatctaaatgaatggtgccaggtttctttagcttgaagatttgtgtccaagtatatatgttgcgatgagattaccaaaagtccttgcaagagcatgatccaaacttaaaatgatgaaatagcttattgtcacgaacaactatttctctatttgtaataccagagacaagcttcataacattgtggcagtcaccacagatgcgtagatttttaaaaattcttattgcttttataggcggactgtatatcagtgcaaatgcaagagccaatctttcactatgatgttgaagatgtttccttttctctttctctgtcattttatgaagcacatattctgtttgtggtatgtaacctaccaactccatctttttgtccagttcctctagttcaaaatggatttctttgattttaggatgggaactatcttgagaggtaaacacgtgaacttgtccatcaacctcaacccagctactaccaggtttcttctttacctgctgactgcccattaactttctgacatttctgacatcatcccacagacctttggctgcaaaaatgttagatagcaaaatataagttgaatccatttccggtatgagctcgaaaagcttttctgcagctctttttccatactccacgtttccatgaaacttacaagccccaagaacagtctcccaaattatggcttgtggagctattttcatgttctcaataaggctttcaacctctgtgaattttccagcccgaccaaggataccaatcatacaagcatagtgctcaattgtaggattaatgtcaaaatctttgatcatggaattgaagtgctcttgcccttctttaaccaaacccaagtggctgcaggcagaaaacacacctataaaggtggtctcatctggcatggtaccttcatctaacattttcctaaaagcttcaagacctctccctccttggccatgttgggagtatccacatatcatggtgttccatgagacagtatcccgtgaaaccaagccttcgaagacagtctcagaatcttctatgcatccacattttgcgtacatatcaactagtgcactagtaacaaaacaatcatctgtgtgcccatccttaaatgccaaagagtggagctgcaatccatgttccagggtggctatacgtgcgcaagaatttaaacagctagcaagagtgaatccatttggccttacaccttctcttctcatctgattcaataaactaacagcattttctgcctgaccagtttgtgcatagccagtaataatggttgtccaagttaagaggtctctattaggcagtctactaaaagctaaatttgcatctttcaagcacctggttttagcatacatatcaatgagagctgttccaatgaaaacattgtcatgaagactgtttttgatggaatgggcatggatttgtttccctagacctacatccaggaggctggaacaagaccttaaaatgcttataaatgtgtacatgttgggcttgaaaccttcaacaagcatctggcgaaacattcttggtcctagattgcaattttcataatcatggaatccggataaaagagcattccatgaaactaagtcacaatcttttatagcttcaaatacccgaatggcatcttgcacgcatccaattttagcatacattgtgatcagagcattactgactgttagatcgtattgaaatgcagatttccaaacacaagcatggatgctttcaccatactgcaggtctcccatatcagtggcagagctaagaatactcgagaaactaaaatgatttcccagaatgcctatacatctcattagacgaaatagatgagcagcttcttgccactgcttttgctgaccaaagcaagtaatcattgcactacaggctactatgtcaggatttttgatcctcacaaacacttttaaggcatctgttgctagcccacattttgaatacatataaacaagattacaacccagaaattcatcaaattcacacccaacttttaaggccagagaatgcaagacctgcccttgtcttaagtttcccccatttgtacacccccttaaaacggcagacaaaatataattgtttaacacattttttaattgcctcattctgcagaataatttcaaaacctcttgtgaatctcctttctcagcatatccactaagcagtgcattccacgatacagcattctgctcgggcatgcaaaagaacacactatctgcaagttccattgcaccacattttgtataaaggtcaacaagtgaggatcctacaaacaaatccgagaaatatccagctttaagagattcagaatgcaattgtttcccgaaatctaattctaagcaaagagagcaagctttcaaaccagtggccaaagtgaactcatttggtcttatgccatccttcttcatctcggataacagaagaacaccatcaattccatacccttcagctacagacccctgtatcaaagcagtccaagacacaacatctcgctctggcatttcagcaaacacttgccgtgcatacaccctatccccacatttagcataaacattaaccaacgagatccatacatgagaatccgggtccatcccatatttgatcacctgcccatgaatcgccttgccatgattcaaagatccttttgaagcactcgtgcgtagcagcatagaaaaccttcttagtctctcatggctctcaaattttacagatctttttcttaccttcttctcacttctctctaaactatgccttgttccagttaaccttccaggttctctgcataacctttcttgaggctgacttggagagtttcgagcttcatttgtcaattcatttatggggttggattccaacaggctaagtgcagcactagcccaagactttaaccaaacaagggaaggtgaattcagagtcagaatgcgggtatggaagatgggcaacagcatcccttgaaaaccaggtgaaggcccaatcattttcggagcaaaaaactagaattccatgaacttgaacccagagcttcatctttgacagtttttgagcatcaaatgcatcaaatacagctacttccgttccctgtaacgtgtattatgggaaaagtttaaataaataaataccaagctagatattttgaaattgtggcaaccttccacagtttatatgcacacaaattatctcaaccttccacggtttatatgcacaaaacaaagtaaatacgtgtgtaaagcaacatcactacattaaaaacaagagaaacaaaatctaaagtagctaacaaatgacaaaacaataccagctattgattaagatttaaaaaaaaatgacgaaagaaatgagaagcaactaaacatgaatgatgcacattatatactataaaagaaaggtttataaatgggatagtggagtctctcacttagtataaatgggatggctgcttgaataataaaaggttgtattcattatggcattatgtagatctaaatatatgttatatgatggccagtaataagtccatacgtccaaaaagaaatcatggccgagatctcaatctcttcttcttctttcactctttttcatatagtatatacatcatcatcatgctctagatttatactatgttttgtgatatactttccagagacaaatctctgttctagttacctagttttattaaagaaatttgttttagccagtaatgataattccaacaaattgaaaactttatttgttttgacatattaaaagaacaagcagtaaattctagcatacaacaaagcattttctgaagtccattaaattcattgccgagaatcatcccattcgaaaacaagcttatatataaaaataaggcagccccatttacagtcttacagcatagaatcagcgaaggattttccaccgccatttgatgaacaattaacagattccatttcaggaagttttacatgaaaactaaaaccataatttctcaaaatatttttatatatataaatatacacattcaaatcagattttagagataccttatgttgtggctgatggcagaggagaggtaaatctggagttgggagtacgaccaggcgcacagctaggaggggactgaagagagatggagatgccctaacaaggaaacactcaaaattcaatacaagcacactactcattccatgaacacaatcagaattcaaataaaaagtatacttcttgaaacacatacataaaagcttagaaatcccaaaagccaacaaagatacccttctttaatataagtacaagaaaattgttttatacacatatgaactagaaataagtgcaggaagaattaactatcaattactcacagagtcattttatcaaacatcatatatgtcaaatagacagtatcataatcatattgcaaatattactaaaggttgaacctgaaacatgctttctcttattaagaaacatcaaatatgtaataaccctactcagaaagagagggggaataaaaggcacatgactcgatgaacgtgagaaaagaaaggaaagggattgtgagtgactgaagataaatgaaggcaagagtgagctgccagcgtgggtatgagagaagcaagatacctacaacgatgtcagcgtgtgtgtggtgggaacggagtacggcggcggatggaggtggtagaccggcaatgtcgcacgaggttcttactatcgtcgtcgtcggctgatggagggaaagaggagaaacgtgtttggaatgcaagaaagcgttggaaaatcgaatatcgttatcagttttgtaatttaaaactaggaaaccaatttggattgagttttgaaaaatgaagaacgttttttttaaggtgtcactgcactacatttgctttaaaattttaatatattttttttttttgaaagagaaattttaatttctagttaattgtttcaatttctaaaaaatgttagaaaattgtatgatacaccccttttgttttttataatttttaggtgtattttaaaatttttaattacaaaaataaaattaaaatttttatttttgaaaaacaaaa

SEQ ID NO: 42562 - DNA, 3700 bp, Cannabis sativa
  modified_base (3662)..(3670): a, c, t, g, unknown or other
agctactgctcattaactaattcattctccctctttccttttctattcactcatatatataatactaatgcctcattgcaattaccatttatacttttttatttagtatcctaaggcctatcaaatcaatagtcagcatgctattcatctttatgagaaaagtcattctgaatgtatgtttcctagaggtttttgtcttttttcactttgtaaatatttccacccacttcaatttccttttcttctatctcctcctagcttgtccttattcatggttataagtggacaaattatttgcgagggttgcaattgcataggacaaactgcacatcactaaatgtttatttactaatctcaagaattctagattgcatatagccccatctaaaatactcaagatttcgtctcactatctctatttgcatcactgtccattgagaatatcaggtcacatgtttcatgaagtgatccaaggaaaatatgatcaggtcatgttgcagctacataaaatatcttgaactatgatgtattcatatcatggagagccaattggagagtacatctttctagcacactaaaattcatttaccttcagtcttgtctgaccagctatgccttcaactactcctagaggaaagccagcccattctaacactggaccttgctcaatgtgaacctgcaacattgacagttagaacagtagaagtgaaacttcagaacacttgctaacttataataaataaactttttacaaagggaaaactacactacactacaaaaaaatgctacctttagtaagctaatcaatgggaaaactagctagtctaagagatcatacctcaacataaccccaaacagtctttgggtcgtacttgagctgcaacaagttttcctctgtaatatcaattgaattcttcttaagaacatcttgaaccgttaaaccactgagtgaaaaacaacattataaatttattgataataaacaatagaaacgactatagaatgatatattagtagtgtcaatgaaaccttttatcagatatctgcaacgttgaaactggcaaaactccggcaacagcagcactacctagaaatgtagattgaaaccttactccctcctcatcactgaatgcaatcacctgcaagattcaacaatagaaacaatgcatttgataggtagaatagttgcaaagctatttggagaatatatcaatcacggtatatctaggaggaattgataattctacagcatccccttggaaagaagaacaaacaaaataaatatataatagaaagaaatatacatttgttggatacttcatacatttcattaacaacacgattaggacaacagtcttttcacatattttgaggttggaaaacaattgaaagcaacatgcaaaatgaaaaattaccatgctttggcatattaagaaagttaagctacttagaacccataggttggaaaaaagtggggtttataattttaacatagagatctatgataaaaaaaaacagaataaaacatacccaccaaaattgactaaaagactaggatttattttgttcaacgagtagctttgaaaacaaaatgacaaataatatgtgtgtcctttatttgggattcaactttatcatgccaaaaacaaggacatagctaaataactttcaatacgactcatctaaaattctacatgaatacaatacatccactgacctcaactggccgcctaagcattcccaactttccacagatattcataactttcacagcagctattgcagagatgattcccaatggcccatcaaacatcccggcatcaataacagtatcctagttggaaaatgaagagacaaatgtcaccaccgattttttgtgctctatataccctttttcaatctcataaacaatgtgtttctttgtatgtgtgcacatacaagtacacttgtctctaaaatttaaccctgacagaagctgataagagaaaagttaaaaagtattacaaaatgagaaccaattaacagggcctcagcacttgcatttcttccctcaacccgaccatgcacattccccatgcaatcaatccacctgaaaatcattataaataaattagccaaaaggaattctgaaacaaaagttcaaaatgtaaatagatagaaagctaacgttctcaaaccagcatcctccatccattggcgaataagattccctgctgtcacagaagctgggcttaagaatgtcctctctaaatagccatcagaatcacttacctgttatctatggcagtcacataagtattccacatgtctaaaactttcataatcaaagcatgcatatatgtttaagaatatttatatatataataaataaatataaaaccaaaagaacaagttgcaaaattatttaaaatctgcaatttgaaataaagtttgatgtttgggcatcggatattgtattatttggataaaaatctaattgtagccaattttttgtaaaatatttagctgatgttattatgcaagaagtgaaaaaagaaaaagaagataagttcggacaattaataaaggagaggtttcttttttttgctaaacaatattcagttagtaatagagaaaactaagaattaagaatacctgaccaagctgttgaagccttaacacagcctcatccctgaggatttcttgatacaaatccttcaatctggtttctgaatcttcagctccctctcctataccattattcactcggttatacacacacacacacacacacatatatattctctcttttatacattcatatgtatctacacacatgcttacaaggaaagcttaatagatacatgatctacatataagcttcatgaatatatattcaagtgaaaaacaaaaagaaaaagtatgcaaatgagaaaatataaataataaatttgaaagaaaataaaaacctaatgatatgatatttgtagaggtggcggaaaggagaacagagaaaaaggaaatgaaaatgatgattgaaaaagccattgatgagattgatcagggacgaagagaagagaaagagcaagggtctgatgagggaaaagcaggagcagccagcggtaacttcgtcttcctcttcgtgatagctggcaactgctctctctctctctctctctctcgcttctatctctctctctctctctctcttatggaaaacgccaactctgtccatatatatgtggtggagatggtgatgaccgatgcattattattattattatttcctatagtaaaatacaaactttatttatttatttatttatttgaaaatataataataatgttggatggcaccctgactctgaatcccacgtgcaaaagagtatctccttttgtttcaaggaaattaagagccataatttgtggtgaagcaaacagatatattatgtccattttttttttaatggaagtggataaattttattagcaagcgaaattcacaattcaaaagatttaagagtatttgaaagagtacttttagaaaaattacgaacagactaattacaagagtcacgagccaagcttacggctcctttgcgtgcgctcgggatagaagttttatataaatgtatcgccatgctattaagtattttgatttaagttcttttcgttataagagnnnnnnnnnaataacccggttgaagtgtaatgatcatac

SEQ ID NO: 42563 - DNA, 5161 bp, Cannabis sativa
tgagggctggggttgatctagggataattagggttaaaaaatggtaacgtaccctgagacccattattacgtacactgagacacatctaaagactgttgtacatcacctaaaggcttaagtacatcacgaaatacattccgtaaaagtatactaacgggaaaaaaatcatatccctatatttgcccaatctatttatatattaattaatcatattgtcgggccgcgaactatataactcttctttttcttggtaagaccaaaataagcatgacaattattgtggtcaatatttcaatgttccataataacaatatgataagttgttcattttaatttttaagaaaaaaaattgtggaaagtggaaagtaaatttcccaatcgacataaccaggattgattatattagttgcacgatcttcattggtcaataatttaactggaggaggttctttgatgtgttgagtaatcgattttccttgatagcagcaaaaacttgttgcttcgaaaggagaaaattatggtcattcaagcgaaaagaaatggcatgttatgtgtatgtgtataataatatgatataattagaaggtgtgcacctattattaattaatatttagtttaactgaacaattcacttatttttcttttttattaacaaactctttgtacaataatatataaagctaattaagaattttgtcctgaactttgacatgtactaaatcatgactcctgaacttttaaggtcgttaaaaatatcttttgaactattaagattgttgaaattaaggattttttttccaattttagtaaaaaagtataacatagatgaaagttcaggggccataatttagtacatgttaaagttcgagaagcatgatttagtagatattaaagtctaaggagtatagtttagtacataaataattactaaaatggtaaaattgaataaaattagacaaaagtccttaaattcaataatctcaatagttcagacgaaatttttaacgatcttaaaagttcaagaaagtatgatttaatacatatcaaagttcagggataaatattttaattaatctatatataataattattaattaatattaggtatgtctttacctactaacgcatctccacaagtaagtataagtatattaatatataaaggatcgtcaagatccaccaactaaataattgaatttaaacagcacaaatatttgtgatttttttttttttttgggttgagaaaagagtaacacggaaattttgagataatttataacatttagcaatgtataattttattcaaaacagccgcccttcaccatactttatttgatttgaatgcaaactctggcaaactatttctttcatacatgaattatattaaagtatgaaacatgctgaacttttttttgtattttattttagagtaataaaaacctttaaaattttggtgcttagaaatgttaaagggcacttattttacttagtatctttatgaatattattattggtataatttaatatcgggtcctatttattttactttaataaatattaggccaattagtaatttttccctccgaactttgacatataccaaatcatgtcccataaacttttttgaccgttgaaaattccccctaaactattgagattgttagatttaaagaattttgtctaatttcattaaattttactgtttcagtgattatttatgtactaaaacatgctcccagactttaatatctatcaaatcatacccctcaaattttgatatgtactaaatcatgccctctgaactttcatccatattagaattttcttactaaaattaaataagtccttaaatctaacaatcttaatagttcagggtaatttttaacaaacaaaaaaattcagacggcataatttagtgcatgtcaaagttcgggagaaaaattacttattagcctattataaaaaatcgttaactaattataaaataacagttcatcctaaacatcaagagtgcctcattgttacaatgctcatcataatatggccagtgtcaaactttttgcaacagattatgtcccagtactccctttctattattgtcctttggaattttttggtgtgggtcggcatgtctttcggccgccaatacaaataattaatctttgtacacccaaactacccaatgccatctgccacacacagcctaatcaaaaagttgaccaccgaattcataccacgacatttagaaaaaatgccccatcactttgtcaactatgtatgtatagtcataatcataaaaaaaagaaaaaaaagaaagaaataaaatagaaaaaatatataagaaaataaagagaaatattaaatagcatatcttaatcccttacaaaaaacataatcttatatttcacacaaaaataaatttgcctcatttttaatataatattctacaatggtaaaacttatatacgtacaaaatttaatattaataaataatttttaataaaaatataaaaaataataattttattatataagacaataaaaataaatgtaaaaggtttataatttaatactataactaaatataataataaataaaaataataatttttcattatagaatatgtgttaccaaatttatataaatttttgacatattattaaagcacatatttttttctaggtgaattatattttagttttacacttattggcatctcaagtgaatatatgattatatatatcgaattaaattaaataataaatataattttgtctctaattaattatactaatctacgttatactatatattgtgagactttcgttagttttctcttttgtacaatagagtgctttatttggcacgatgtggatagtaataagtaggagtgttcgcggtgcgggtggtacggtttttgactatttttctaaattaatccgctcatacggtttttttaatttctcaaaccgcacccgcaccgcaaaactaaaaaatcgcaaaaaccgcaccgcaaaaaatagtgcggtgcggtttatgcagtttttacgattaggactatcactaaataattaaactatcacaaatacaataaagtttgagcaacacttgtcaaaaatgccataaaacttaaaaataaatatgaaaacaaaaaaagtttcaagtttcaacaatataataattagtgggcttaggttggggcttcacatattggacctaaataaatataaaattggtatttttataatatgcagtgcggtgcgatttgaactgcacattaacaatttaaaactgcaaaccgcaccgcacagcgcggtttaggaaaaattcaaatcgcgaccgcaccgcaaagaatttcaaaccacattttttttgcggtgtggtacagtgcggacagtttgagcggtttaataaacaccccttataataagttagtgtcaaatatataattcaattaaaatattaatttaatctgatttaaattatgtaatattaataatatattttgtaattaatcaaaaaaataaggaaatatataaattaatttgttgattaattttaataatatttaattttttatactaatatttttattattagacatattatgtataatttattttttttatctttcttgatgtatttttatattataaaattcttttttattaattatatatgtggcagtaatactaatatgacaatgtgttacatcatctcatgtagtcaaattagcaccacatttgctagataatacgaaaacaattcagaggcaagatctattgtgtaattatagagcaaaaattatatttattcaaaattaaatatcgggtccaatctatttaaattaaaatatataaaatcagtttcaaattcattaatagctatatactacgtgtttggatatcttggggttaatttttttttttttactttttctttttcgagaagggtatctcgtgattacatagtatttatagcaataataattttagtctctatatatgtatttaaataatgatatatataaatatatatatttatcttaatataattatccgtcacataaagtgtgtggtatataaatagagactaaaccgagcaccaatcaaggagaggcatagattaacatccatagagcaaggagatatttttgagaaaattatcagtgaaagagaaacacagagagagatgggagatatcggtggcactaacgagtctcttgtgaacatgcccaccatcaaatttaccaagctcttcattaatggacaatttgttgattcaatttcaggtaacctataataatatatttctatgtataaatatatatatatactctttcggaccctttttcaggttatttctttcacatcattctgtgtatctctataatctttctttcgtaccctttgcatagctatattaatcccttctttttatattcatatgctctactcaataattgatataaatgttatatgtaggcaattatatatatatatatataatctctcttgtatagttgtgtgtgtactttctatagtatgaaatatatctgtgctttcttttatgtgtgcagtgtgcagcaactcatgcataatagatatacagtctatatacatatattatatgtatatgaacaattaagtatgatgttgatctgaaataacaaatatataataattacttcaaaatcgatcatagagagagagagagtgtgaggaatgaaactgggtttggttgaaagaaaacttgagaatacacataattaaaaaaaaaaaaagttatgttatttttttaaaaaaaaaaaacaaaattgcaaggttttcgtgtgatactgtactgtgatattacttgtgtagaacctgaagcatctagtttgtgacttgtgtaagcatctgttaattaacgtttaacggcgttaaattctgtattttgaatcttttaatttgtttttttattattttttatgttcatttttcacacgtcccttttatcattttccatctagctcctttaatttatttatttttaaggaatctcctttaattaattaattatacacctaccattttatatatatataaaaaaaaaatattacaccaccaactaccactattatttacgaggtctagttatgcgcacggtctgacttttct

SEQ ID NO: 42564 - DNA, 4031 bp, Cannabis sativa
  modified_base (1924)..(1925): a, c, t, g, unknown or other
aaagcctgaaaaaacaattaccaaccatgttttatcgaaagaacaacaacaacaaaaagaagaacgaaaagaaggagaagaaaggcggtagatttacaagttagttcatcaagttcctttgtttattatttatttattctttttttgttggaaggtcatattctttttaattttgtatataagtactatgtacatatttttctaattattttttctcatcattatttgtagaagttgtttgtccatatctaccaaacgaaatagtagcagaaattctaatgagattgccccatgagtgtgtcataaaattcaaggttgtgtgtaagtcatggtacaatatcataaaagacaagtcatttgtaagtgaccactttcatcatcactccaaatttgatactaatacatctctccttttcgtacggcgccgcttcaagtattatttaactgatcgcgatcgaaatcatcttatgattccttctgatgaccaatctcgtccaacaatgaagctattcaatttcaaaaattttaatagataccatgtaagaggccttcattgtaatggcatcatcgccttccctacgtatactaaaattgcttttatcaatccaacactaaaacaatccaaatttttacccaccaaacttctacccaaatttaaatgtgtcgcaaatggatttggttacgatgaaagaacacatttttataagtatgtcaagatatttgcatcagtaacttctccaataaaattcagagctcaagtttgtacactgtttagtagtggttgtggggttagtagcctttggagagagataaatatgataaagctcaatccaaacgctttctttgaccgtgatgtagtttatttgaaatcagtttgttactgggtccatgagtcgagtaccgagcttcaaattgtttcattcgatatgagtgatgagaaatttggcattatacaagttcccttttatcagcccgacttttttttattgacatacaaactgaaagtatggaaagataaattggttttgttacttaaagattgcagataccaagaccaaaaatcaattgaaatttgggttatggtagtagaaagtgataatgcttatcattggacgaagcatctaataatcactaatcccattcctatacattgctgtacaactacatgtttggattttttgaatgacgaagaacttttgattagatgggatgagtttcttatttcctataatattcgaaccaaaaagatgaggagactgcaattttcttcccgtgcccgtaacgagttggagttttcgacattatactcaaaaactctagtttcgttactagacaattagttactgttatcttttttgattgttttgaatttaggttggatttagtttgttcctttattttcttttttagattttgaaatatatatatattttttattaatatttctatttttcatgtttgattttgcaattttataatttcactccttaattaaaacaactaaatgaatataaaagagaattcgaaattctttaaagaaaaatatcttgatgtttaaaagatcattgttttttttttttttattattaaagaaaaaaatgatgaaaaagtaaaaatatctgagtaatttaaataaacatttatttttaatataagtgatattttgggttttttaaaatgaaatatttgagaaatacctaaaataaataaaaaagttcatgtttctacgtaatattatttttttttccacttttttagaaacttctttagtaattcataaatatttatatatttgaggaattacttcatatgctatattttttaatttttttgttaaatttatggtttgagtttctaaagtggttgcagagctagttttctatgtaaaattttataaaaatacaaaaaaaaaattattttgaanngtaaaaataaaaaaattcctatatctttttattttttattgatacgaaaataaaagaaaattaaattgtgctcaagttacatataatttattaatttctaaattaattagagtcatttaataattatcaattaaaaattaatataactagtatcttgtaaaaaaaatattgcattatatttaattatattaatggtacttgtacaaattaaaggtgcgtgcatagaaatattaaagaaaaaaagtgtgtatatattaaataaaggttctattaaaattggacaattatttcatcaatgaataaattcaataaattaatgagaacttcaagtcgagattgaattgcagcttatatttccgtaataaggtgtggaacgttttcagtttattaacagttctcatatatatatgaagaatatatatacagatacattgtttattgtctttttttttatggttaacaaaactatgttgtcactactatttaatgcaaaattattatatattgtctttttcacccgaaacaaaaaccagccacatcgcctgactcttcagagtcgagatgggtccacagtgagagaccgaggagagtgtggtgggatatacaggccctacctacgctactgtttctcaacaaaacgacacccaatatgaattattgtccactttaattgtttgaatttgaacaaatgtaatgttttatattacaagtattcacgattactactcacttttctcttgatcttgtcgacaactctctaatttaagcttcgcaataatacattcctttaataacatagtcaccaccacaaatgcttcttagtcttacatacatatataagagtccatacgaatacaattatgttattataatacacaattgatccctttctcaaaaataataataaaaaaaaattgaacacaatatacaaattgaagaatatgaacacaattcccaatgctaaataattaattaataatgggtccatttttgagataacgtatgaagattatcacttattaagaaattaggataatgtccatatcaaattcaagactcaaactattaactactctcagatatgtataaactatgaacaaatcaatcaatctccgccagtgaacaattttgagacaacaacacaaatttcacaaagaccttttaactcacgattccttgcagtcaacggcgaattacgagttttctcgaagccagattggcaatcctcggctgagctggcggctacacgtgccatgtcagcaagctcaaagaaggtctccgagtttagatcattataagccatctcaagcgccgacaccgctttcttatagtcccggctacatctctggaggcgcgtgagaagcagcgattggttttgaccgcttccgccgccgccgccgcgctgggcgttcttggagaggctgacgatcagatcttgggtggagctggcattaaggtaggacatgccgaacacgacgaacgcgaggccgtagctgtcggcgcgtggcgttcgaggatcggcgtagagagactggacgcagaaggagtaattggaggtttggttgcagacaccggagaccaattcggtggggtgtagcacagtggtggtggtggtggagccacggccgttggaagcggaggagaatgagcgtgacttagtggttctacttgcaattgcagtggtggtcaataggagaaagaatactgctaacaaaaatgagagagaaaactgagttgtggtcatttttttctgttctattttttgttaggttggaaaagtttcggggtttattgatgagcttgtgaatgtggtgtggggttggacttcataaataggtgaatggcacgtgaactatatgtataggtgtatatatattaagtttagagtaatttgcggcaaaaccttcctaactattaatttaattgtaaaaaaccatcaaacctcatattttggtgggaaaatccttcaaagtactccgtttatatttttaaggtgccgtctgtcaagtctcgttaagttttaatttcgcctacgtggcaatgacaggtcactaaaaattatcctatgtggccatattttacaaaataaaaataaaaactttaaga

SEQ ID NO: 42565 - DNA, 5639 bp, Cannabis sativa
  modified_base (2156)..(2156): a, c, t, g, unknown or other
tatatatatatatttttttaattgaatcttgattgaatatatgaaccatatgagccattctcaatactattctatgtcatctagatgaactcatcaaaactgccaaatacattgctactccgggtaagggaatcctagctgcggacgagagcacgggcacaattggaaaacgtctttcaagcatcaatgtagagaacatagaatccaatcgccaagccctacgcgagctcctcttcacttgccccaacgccctcccattcctctcaggcgtcattcttttcgaagaaactctctaccaaaagacctcagatggcaaacccttcgttgaagtcctccaagaaaacggtgtcgttccaggcatcaaggtcgacaagggcactgttgagttggcaggcactaatggcgagaccaccactcaaggcttcgactcactgggtgcgcgttgcgctcagtactacaaggctggtgcacgatttgccaagtggcgggctgtgcttaaaattggcgtaactgagccatctgagctgtcgattcaacagaacgcgcaagggttggcacgttatgcgattatatgtcaggagaatggacttgtgccgattgtggagccagaaattttgactgatggggcccatagtgtggaaaagtgtgcagctgtgactgagactgttcttgcagcagtttataaggctttgaatgagcaacatgttcttcttgaggggactcttcttaaacccaacatggtcactcctggttctgacagcccaaaggtacaatgaataatttttgttagaagtgttaattacaatctcttagttaacttttacttttaaaattacatgtcagaatatatttttttgaattttgttcataacagtattcactatagttacaacattattcctgtaaatttttgaataggttacagtaccgaaaatagagttttcgatattccagtctatggcacgtgtttaaaaaacttcaaatttattttcggcatagtaaattattcaaaatttttaaaaaatttatagggaggatgttgtaactataacgaatattactatgaaacaaagttttaaaaaaattattctggtatatgttcaagtacaaagattgactaagagattgtaataggagattgactgtagtactctttatttttttcctcttcttctcatcattctaaattatttagtgaattaaaataaatataaaaaataaaatcaattatttaacacttctaaaatatactaatataaaacttagatattaactaatttattgttttttagtgatttttttttacaaatagaatattttcataaatagtttcaattaagaaatttatatttatttttaggtcttattttaagtttaagaaatttaaaatttgtgtttggttgttcttaatacttatgtgacatgttagattaatttaaattaaaatatatgagatctgatattaatattgtactaataataatacgaaaattcgtgaacatggatagataacaccagaagtgatagcagagcacactgtgacagccttacgccggacagtaccaccagcagtaccggggatcgtgttcctctcgggtggacaaagtgaggaagaagcaacccaaaatctcaacgccatgaacaagctccaagtgttgaagccatggactctctccttctccttcggccgagctctacaacaaagtacactcaagacttggggtggcaagaaggagaatatcggcaaagctcaagaggcgttcttgacgaggtgcaaggccaactccgacgccactcttggaaagtacactccttcttcagcctccggtggcctcgcctcggagagcttgttcgttaagggttacaagtactaaacaatttgaagaaagaagaagatatgagagaaaagcttactctacgtactcactatgcatggatcatataatgtgttttttttttcaagatttcaatttatgttaatatatcatactctttggtatatatattgtcaacttctttcttttttccctttctgattaattaatatttttttcttatacaaattgtgtatgtaattaacttaattttacttattttcaactatattttttgaatttttattaaggcaaattaagatttttgctccctgaactttnacatgtaccaaatcatgctccctgaacttttaaggtcgttaaaaatgtctcctgaactattgagtgttgaatttaagtacttttgtctaatttcattcaatttcactagctatttttgtaattgtttatgtacgaaaccatgctccccaaactttgatatctactaaatcatgtcgctctaactttgacatgtattaaatcatgctcctgaactttcatcaatatattagacttttttactaaaattggacaaaatccaacaatcttaatagctcagggggcatttttaacgaccttcaaagttcaagaggcataatttggtacatgtcaaagtttaagggacaaaaatcctaattagccttttattaatgttttagtcaatatgtattggataataataatcaaacatatatattatttcaagggcttagcaaaaaatcatatatttacattagttgattaacttctaaaaaggaaaagaaatgtaaaaaaaaaaaattattagaatttaatacccaacacatgtatattgttagaccaaagatatatacattactatctagaacactatcctatactgcaattttggggattttttttcatattcagcatggttagataaaaaattcatcaatgtccaacaaaatatgaaagtgttgagggacgtcatatgtaattaatttatatttttttaagaaaaaagtttagtaccatgttggtcgccgtttgccgctattaatccctatattttcggctattgactaatagcggtgggatctattgctataattagttggtcgctattaattagaattagcggtagactgagcatccaccactaataattattaatagcgacaagtattagcagcgggaccacaccactaattattagaagaattaataatgttatgagcattgagagtgcaaggtttgtagctccaaattccaagtactagttgtcatcattgagttgagaagcttgagttgaattggcctgttcttgaggttgatcagaagctagaagcactcttgtaaaattcttgtcaaacttatagaagtagtcaattacagtatggtcaagcttgtgaaaaagttggaattgaggatgatttggaggaggaggaggaaagcgacatcctcgactgtgattgctggtgctagctcctcgagtgaaatcaccacaaaaatttcccctagatccaaagaattgagagaaattagtggagttgaatgtgtttggagcatataccaacctcaagagtaaggaggttgtctgaagttgcaattagtttgagcaaagtatgcctccatggatagacttgggatcttttgtagccacattcacacttggatcaacaagttcatcaatctttttaatctgagactccgaagctagaagcaaagcttcgatttccccaatccgagtattggtagagattatgaacgtgtcatgttcactctaggcaagcctttgaatatggcagcaatgtgaatgagatttgagagaacctctccaacagatgcaagaaggtcaacatgctgcttgactttgacgagataatcgtttagagtcatcgttcctttcctgagtttttagagctttgttcaatatttaagaattttttatgagacttagagtattgaaatgttgttcaagagaattcgagatctgttgagttgagttacatccaaccattcttgtgagcaatccttcaaacattgaggaagccaagaaacaaggagttggtcttgaacttcccaagaaaggctgaattgtagttgcgcacagcttgatcaacatcattgaggaattgtgatggaggagttgtatcctgaatgaaattctgtaattgatttccatgaattactgttaagattttgttgggattaaactcacttaacctgtcgagtcagtatgtccatctatttgctcatcaaatgaatttgaagaaagctgctgcaagttataacagttggctttaataccaacttaaaggggacccaccgacaactatatataggggtttctctattctcaaatgaggtctgagttgagagttttgatctctaatctccaaagctcatacgttagatacaatttagaaagagagagtccaagatcatagtgagtgtgtgtggagggatgtaaaagggagtatcactcttgaagtgatttccctcgatgtgaggcatttctttgtaatttacttactgtgttgagttgtaatcttgtgctcattctattgcgtactactggctattcatatttaataaagatccaccattcattcattatcaagttaagttttctttgtcttatttcaattaagtttaagttttgattttgtgattggttttagttttgaattatgtttcttgaacattgttactgatgtaacaacttgttttgagggtgaggattcaccacagatttgttgcttccacaagagaaaattgtgatcattcagtttgatcggaacaacgtgattgaagtacacaagagcatcatcatattctctgtttcgatttcgagctggtggaagttgagagatatgagtcccaattggaaaagctgagttggtcggagttgttgaagtcatatgtgccattaatggagaaaatggttctaataccatattgcaggtctttaaaacctcttagccattaaaaaaccattacagaaagcagatggaagagagaaggaaagagaacagaaaggatagacaaagattagaagagagaaagaaatctctggcattgattaggcaatgaattatgattaggttaatttagatttttgcctcatgaattttgacatgtactaaattatgcactctgaatttttttggtcgttaaaaatttcctctgaactattgagattgatggatttaaagatttttgtccaatttcattcaattttactaatttagtgattgttcatgtactaaattatgctctcaaaattttaatatctaccaaatcacacccttttaactttaatatgtaccaaattataccctaaattttttatttatgttaaactttatttactaaaattgaacaaaaatcattaaatataataatcttaatagttaccatatttaatcgtaaataaaaatatgtatatcattatattttattgaattataagtatattttaggaaaatatattgtatagtacttaccatattttaaggatcgatatatagttataccattttaatgatcggtataaacattttagttccaatcaccattaatatgagattcgattacacacaataaggaagttacccaaaaactcctacctaggttttcaccttcacacacacacacacacacacatatatatatatatatacagattgcacaaagagaagaaggcttgaattcaaaggtaacgtcattttgaggttttagagtttcttctatatattcttcttgaatctaagatatgtaattaatatatgtttttttttt

SEQ ID NO: 42566 - DNA, 1606 bp, Cannabis sativa
  modified_base (1242)..(1243): a, c, t, g, unknown or other
tgttattatataatataaagtgaaaaaaaattagttatattttagttacaaattttatatgtataaaccactaaaattatcctaacacatatattaacctcaaataaaaggtaagattctaaagaattaaaagtcaaattcaataaactataaaacctttaagatattacaatggttacaaaaaataataataattaacttatgggagagtaagagtttatgaattaattgtcaaaatgatttcctttatatatattgattattatttatttatattttgcgactgttattatatttttaattattatttatttatttttatttttaaatatttttttttcaatttttgttgcttaattttagcaagtaagttaataatattaattattattattttattatattttataataactaaaataccgcaaaaaaatataatttgcttcaattattagtcttgaaaatttgtttaataatattacatgatatatttttcttaaattactcaatcaaaatatatttgtattgtagtataatattacattgttaaatggtcttttttagtaattttaaataacgcattaaaaactacaatattattcatcgtaattgggtaaaaaaaattatacgtgaaccaacctgtacccaaacagtgttcgctaatatatattggtatttttttgatttgttattgtagaattagtttcacttcttttgttcattacgcttattgagattgttgctacaatcaatttgtcaccgcatattatatttgcttcaaagtttctatcatctccaattatcaaaaattttagtatttgaagattaatttttaatttatttttagacaatcttttgaacatattacatttacattatcaattttttttaaacactaatatcttgcattcactatttacttttcattgtcaaaattataaattacattatttaaatatacataataataatcttactaaataactaataatattctttcttcaattattagttgtatcgcttttaaatagagtagaaaatacataacataaaatttcatatacgggcctcgcacgtaacgttttactagtatatagatatatattaacattgtagttgatgtacgagaattctaccacttacaccatgcttatattgtcaattgtattgattattttaagattaatataatttgaatatttggtacttttttagctataattattgttgagtagaaaatannttaatatataaattcaaaattaaaaaaataattaattaaaattaaaaaattataagataaataagtaataaaaattaggattatttacatcaagcagcgcaatttacattttaattgcaaaattgcttcctggtattttattgttcaaaataccgttatttttaaaaataataccgttggttttgaaacatgatggtatacattaatttaggaactaaaagacaaacaacaaaaatatatccacgcttacatcaaagagttctatgaagtcagcaaaagtcaaaagagattgaataaatgaaatacttgttttctattcttgacaattaatttttttttcttttattattttcctccattttt

SEQ ID NO: 42567 - DNA, 9161 bp, Cannabis sativa
atatatatatatatgcacaatttgagagaattagaatcactattcaaatgtcttctctagtatgtgaacagaggttgaattttcactgtgccagtgtgcctatctatgccacaaaagattaagctgttcatcatgttggtcagaatctttactcattaatcaaagcatacaaattacaaatatctcagcaaacttggctctccagtatgcaatggtattactactaatgaaccacgagagggaaatgtaaaccaactttcttttaaactacaaaagtggcaaccgcaaaaaagaatcaaaattttctatcgaaagagattaagaaaaatgttgtgagcattctgcatagtctctataggggtgtactgaactcgtccagcagaacaaaatttttacagagctgtgtgcacgacaagacccatctatacaagccaaacaagcagcttaataatttttctgacataggggaccccttttttatcttcaaaacattgtacacctactacttattagaccatctatctccaatacattttacactctacgcatcagaagatctaagtcagctaaaaaacaaaagaaagagagaagccccatttagctctacatgcccccactatttctgcaagacattcagacttcatctccctattcccaggatttacttctctgattgattcacctcctttatcactggcaaactcctccagcaacaaatttgcagaaccgaaaatacataaaaccgccccgattaatctacacatccatatgtgaccaacataacccaaattagtaaaaacaatatacaactctgggcaatccgactactcacgttgatccagtgcttgttaccccactaccatccctcaacccttgaaggcacacatttaaagctctttgcacgttgtctgcgactcctcttaaccttccttgagtagtatctgctggtgaatggatttccactgttcgagcaaccctctgtttacacttttcccaatcatcaacacgaaaccagcatgctcgaccaccatggcttccatccatgccaagaaagaagacgttaggattttcaccaaacgaatatcttaatctcacagatacacaataaggcaaccaagcagcaccaccagcagcattaatgtgaggtatgtgggcaggatcaagaacaacagttagtgcaaagtcaacagagttatgaggtcgatcataatggatattgcttttggctacagatgaatctgagctctcatccatattcaagcctgcatgattttcaagacacaattcaattcgtggtttctgtgcgggggctatatctccaccttgtgcctgagctaaaccttttttccatgcaattaattttaagaattctctcaacactgatataggtaaagtaagaagagtaatgaatgatgcaacacgggatgcatcgtagggctctgatgcgacacggcgactgaagtaatcacatatctcccctatttcagattgagttaattcctcttgagcagtggttgagttttgttgctgctgttgctgctgctgatgatggaatcgtttcacgctaagcacttgaagaagaagttgaaccctgtggacacttactgcaaatacatatcccctgtaaacaagaagagatataaagccatcacgtaagacggaaagaacacaacattttgtgatgtcaacaatggtcatagaacatgcaaaagaattcgatactcatgagattcgagatttttttaaaaaaataaaaaataaaaaataaacccttaccctacaaagaaacgcaaggcaggctgttcctgatccagatttaaaagagaaccttcattttccttcaagatggaccctaagatctctttcaaaagttctggtagctgagcaaatagccacaagactccaagatacttgagaatacctcttaatacttttttaagagcaacaagaggaacccaaccacctccgtagccaccatcatctccaagcccaataattgcagtattcaattctcctctcacgtgtgcaggaacacctgtaccaggtggtctacgtaaaggaacacctgagtttataacagccaaatttgaggatcctgggggaacattagccaaacggtgtaaagcagctactgggttgcctggccttgccattgcagcagaagcaggaaggttgatcctacttccattagctgatgagagttgcacaccagaaccttggttttgattagctgccagaccacctccctgttgactaccagcaaaattaggctctaaaacattcaattcttgggcaacatgctccataataaatggccgaaactgtggacaaggcaatgaccctccaactgaggggcccccttttggtggtgtagctggttgcaaccaaacctgatccccagcaaagcatcgcatgtctacggcaaagtttttgcgatatataattcgtatccaataggggccccgcagcacaactgagacatcaataggtaataatgagctgggaacaattccagggccacctcggctcgcggcagctaacattgcagctccatgaaggctatgatttgcaagaggactgggagtggaagctactacaggattccctacagtcccagagggaccctgactaacatttgtagtcgaactactcggtagaagaccttgggatgttaagtacccagcttgttttgggagagaagagtgtgctgctgctgctgctgcagggaccactggaataggaccagcccgtgcaggacgagtagcagctgtaagagcatgcaagggccccgcagtgagacgaatgcagtccaacagtgatgctacttcagctccattaataaaatcttccaaaaactgtgagtggcagaaatatgtcaaatgactgcaagtctttatcgttaacaaaatattatgcccgtaaaagaacttttttacaaaatgaaaggaaagagttaatccattatataaactaaccaaacactgcctcacattatctagaagaaaataagacatgctaatcaacatggccacaggggttgatttgagaggggaaataagtatagaagttatatagttcaaataaaccttcctgctaacataaataatgatgagcagtatggcattagttcttttttcttttttcctttttcctttttaaaaaaaatcttaagctggaaaggcactcttcctaagcctaatcatactgtttcctgagtaaaggatctggcaaaataaactgaaagacaatccgaaggacaatggagatgacaactgtctaataataagaaacggcagaaaaggaaaatcccaaattattggaataatatatataccttagtatgaggccacagctgatccggagaaacatgcattgtgcatccctctttactagattcccactccacaacaaaacgggccacaacacccgatccaaaactaaaccacaaactcattagtccaaccgcctcaatcctaaatgcccttctcatctgttctgataaccgatcaacgacctcaagagaagctttaactccaactggtgttttaacatcagagcttggactactttcttcggccttctcatcagccctaactccaagcagtctcctcatcccaagggcaaacattcttgcattagatagcctttgaatatctgccactaatttctttatactatcagtctcaacagattgatagctgagaacaacaccttccggatcatatcggatgtgagcatctatatcagatgtattggcaatgcgaacacctgaaccccatggtgtgcaattgcttcctttttgaagctcccacaaatcccggaaatgctgatcatttatcttgacatcccaatacatgcttccaggtctaccaagccgcagacaaatgtgttgccatgtatcacctctcgcaaatggtaatcgaaaccatatgcttgaggaagcacttcttaaacctacttcttcaacatatggaatatccagtgcctccatttggctagtcaacctggcatgcttgatacaaagagaacaatgtctgactacatgaagaagagctgacacataaatggttgaaggtgcatttcctttattagcttcagctataagatttccgtaactgtatccatcagactttgaaaccatttccattgacataagtaactgaggtgatgagttatgagcaccaaccgcttctgatattttccttctcttacagaatcctgaattggcttctacatctttaagtgatggaatcaaattcaacatttgtgaaactgtacgcttccgaggatttttatcatgttttgaaacatcataactagggctgtgacaaattgccgaatccaatacctgtgctgaaaacagtataatcactagtcataatgctgccaattaactatggtaaataggaaaattaacaaatctctctaaataccgatacacaaaggagatatcttacatacgagagttgaacatgagtttgatccagcaaccttgaaagatccaattagaggatgagaaggtgaaattctgggtccattggctttcacacttgaaccagagactcgagggccagtgggtcgaggtggcgataagagttgagatgaccttccatatatatcctttgaagtatcattctgggatctcaaatgatcttcatccatggaattacaagaaccaaactcagctgactgtggtgacctaagagaagccaaatcctgctcagattttgaagcagatagttttttaccagcagaaatcctacccgaaacagatgatatatgaccaaaagaattggaatgtgttgagcccttaaaattgcttgaagaatgcaaggacccagagtaaggggtggttacacttgaaatttttgcaatttgtgatgtttgcaaacttccctcccatttaggagagggtgtaccagcttttatggagtgaagatttacaggtatagatccaaaacgagatatgggagatgcattgaatggcgaggagacattatgaatagaagatcctttttcaagttcaaagacttcatcaacaagtgatgagaaacttgatggaggacctccagctgtctgcatagaaccgtcaaggctaagatctgatagaagaccactttcagaagtctgatttgcagctccagcacttggcataaaagaatgtgattttccccactctagcaagctcaaagtcatttcatcttcaagtatttgcatctggccaatatcaattttcttaatgcgtattacttgattattgtcattaacatgagtttttccaggtaggtttgactcagtctctatcaatttaaataaaggtttgaaatccttatcaagttgcatcagcagaaaatgagaacttccacaatctggaaaccccatcagtaatgaagctgaaccattcagaatgtttttgggcactttaactgcaggaagtccatgttcatagacctgcaaaaataaaattttgcaatgtattcagggatagatgcatgcataaatctagccctagaaacaaaagatcagcacttcgtaactatttgtgtttagcatgcttaaaaagacacttacctcaaggcctaaaaatctgccaattgatgaaaataagtgcaaaatacttttgcttctcaagcttatgaaagcttcagcggcactcatatttccctgattcaatgcctcttcacattctgacaatgctgatgactcaataatattctgtgatgatcggagaagatagcgaccagtcctagaagtaaatttttaagtggaacaacagaaaagtaaggacccgccatttaaatacaccttaaattgtttctttttattttaattatgttcttcatataaacaattaaaatatatgggaaacaaaacacagccttttaatagggaagaaaaacttaagaacaaatcagatatgataacaaggtcacaaagcgacttttaataggaggtcaccaccaccggttcaaataccactttccaacctctttaaactatgaattagactagattacatctttacaaatcagaaaccttgaaaagtctaagaaatttctcccattaacaaactacaagcaatttcagcagcaagaatagttttttattaataaatcataacaggaaaactgcaatgtatgtaatacctaatatttattcccaatgtgaaaaatgatgatccatatgcacgcacacgtagtatttcctgtccttcacattctctggcatttgccttgtagtctttctacaaaatcaaagtaaaaaatgtcatcaggcaacatcattaataacataaaagtatgtttgataacagaaaattctcaaagcaacaacaaatggtagcaaaaatatggaccttgttagagtcgatatcagattcttcagtaaaagactggagaacaatatcacctgcagatctacttatctgaccatttctgttaagatctttctggatttcaaggaggcgagtgtatctattacagcatatggttcttagaagcaacttctcaacatcaatgcagctttgatcaagcgaaaactctgcctccctcccagttaaaggatctatgacaaatgcactgtgaagacacttaatctgcgaatctggtcctggttcaattttaataaatgggcatgatcctgagtcaggcatactggtgttcttatcaaaatctaaccagtacataatttttaatcctggtgttcgaagactagatgaatcagcttctccatcttgatttaattgtgatgagccacttccgtcagaaatgagctcaaatcgaattgcatctctccatcttccttgtcgaagaatttgtacttgcctaatgacggtatccataacaagtgcaacacaaagctcatgaagaaccgagtataatattacaaacgggttatctgcagtagacattctgcgttccagatcatctccaagaatatgacgccgtgattcctccagcttaattaatccagttctctcaccaacgagcaactccaagtgcaatatcctccacattgatagatgcccgcggtagccaagagtaactaacaccttaaattccccatttacacgaaccaatgcagtaccatcagaaattttcacttcagaaatttctttaggaagtgaaacttctaataatttagatcttacaagagtatctaactttttcaaagccggcttttgctgatcctcatttaatgtactttgcatgccaacatcttctatgcatttgggcaaacgttgatagcttcctgtcaggagcacttcaactgcagaaggaacatcataaactggagcacgggcttgttgtagcgcttcatgcataaaaaacaatgaatctgcagcttgggtgaaacaagtatcatgactcgacagagtggaagcaagttcctgacaatactgtatcagcggaacctgcaaattggaaagtaagtattgtcaaaatttcccattgctttcagttgacctagattttactttacgaaatatagaacaaatgctgattagttgaacattatggattgcaaacctctccaaatactttagactaagttaggatttacaaattcaccccctttcagcaaaaataatagttttaactaaaccttcttacactacaaagtattaaccgccaaatcaagtgactcccattcgtcctaaccaaccaaaaaataagtctaatatcaaacctagtccatatcttcccttctcttggcaatcaatcaaacgaacggtaaaagttaacggccgaattcaatttactctttcaactaaagttaaggctaacgtgacaaataacatatccacgaatctgataaaaataaagatcccaaaacctccaaattttatcccatttcttgaactagctatcccatcccaaaccaacacctagtcattataaaataatataataataaaaacggcgaattgacaaccttcacagcactgatagtcacaatagctcaaacatctttgaacgggaaaacaaggagcagccctctaaaaataaaaacaatactctcacaaagcaatcaaactacatagtgaatcttgttgtcctaagttccactgaccagtgcccacatatacattcttatgaacaaacaacctaaattcacattcccaacccacaaaacccctaaatttacattgaataaacccgaaaatccaaaccagcctattaaagacgcaattttcaatcccaattggttacaaacgccaaaacccagacaccaaccaaagtccatcagacaaaaaaaacgaaactatcaaaacagaaaagacggacgaacctgttggcaccatttggcgaggacattgagtcggagcatacgttgctgggtcttgacaacgtacttgagaatgttaatcttcttctcagtatcggattggtcagaagccctggatttttcgacgagctccttcaaggaaaggaaggattcctcagcggcacgactgaccagggtggagaagtccaccgtctgttgccctaagtcggcagccattgatttgagagcgaatacagagctctagggatctataacaataataaaatcccaaacattgaagctagggtttgggtcaatttgaaggtttggggcagagccggagacggagaagaggagtagctcgctcctctttcagcttctctctctaaaattataacaaacttcgtaaatatgattctttttttttttttccgcgtggattctctgaattttagagagaagaaaatagtgaatgttagaaagaagaaactaaatgtaggccgtggaccctacttattaatatttaatttcgacatggcaaatggtttttttttttttttgacgaaagagtaactacagaaagagaagctacagaattggaaccaaatcattggagcataattcttcatctagccctagtgccttcgagccaagctatgtgcattacagttatactttctattaacatgtcgaaagctaacatcagagaaataagacaaagaacttctactatcattcataacattcgaaaggactgagagatcacgcttctgaccacaaactctatcgacaagcagcttcgaatcagtttccaccactaccagtggaattttaatatgatagcaccagttcaacccaactcttaatgttagggtttataaaacacttaagaa

SEQ ID NO: 42568 - DNA, 3914 bp, Cannabis sativa
tacaatacaatacaatacgacttagtatggcgttccaaacgagccctaaatactcataattttgtttttgttttgaaggataaagaaataaataataaaagcaaaattatttggtgatgttaccgtcgtctcacggttgaattgagtttgattgcttttctacaattttcttaagcaaccaaatcctctttcttcagcatcctcaggtgaagctcaatcccatacttgctgcgtttttctctcttcttcactttcccttttacaatctcaaaccgatctacatcttcttaacttcaaaccaattcaccctacacacattcatgtaaatctcaattcgatttcgcatttccaacaataatctcaattctcatctgggttagacccttttcccaattttagatccgaatccttgacgatcgtggtttttttttgggtctcagggttttcctctttcgggagatgcccactagcgtggatggattgtgaaaagatcgtggcttggatccccataagggtttgagaattgggttttttgattggattggtttggtgggatattattgttgattttagggaatttgaattaggttattgcagaaatgttctatggtactgttgtatgggacccttggctgattgttgcacaaatattttgccttcaatgcgtatattatctcacacttgggttattcttgtccattcttgttggatttcgggtttcccggatgagtttggtctatttctttgactatgctactctaactgcttcgactgtaactgggtggtgtgtcattgcttcgtttctgctaagtgcaattgcaaggttagaattctcttctacttggtcaatcaaattgtttgttttgtttatcaattacttcatataatagcttcttgttttatgatttagagttacaaggcatagtgtttgtacttggcattatacaaacatgactatttagcactcttgagggttataggttgagtggttgatttagttggctataaacggtttatttctcaaggattctgcttgtattttgattataacaagaaatgattatttggcattggaattttgtgatgattagcttctaaccaagctctatatattgtagatgaatatgcaattttaacatgtaatatcttagttatgtatgtttggccacttgaagttgattataaactcccttggctgcttgctcttgttaacactggtgtcctgtttgtttgtacagtgctggatatcttgtttttgtggttgagagagcaaagaaatgcttggatttttcggttactgtcttcattatccatctctttatctgtattgtgtatgggggatggccttcctcagtaacatggtggatagtaaatggtactggaattgcaattatggctctactaggagaatatctctgcattaaacgtgaaatgcgggagattcctataacacgattacgttcaagtatgtccctttccttttttaattggctatactaagctaggttgatgttgcttatattttgatatggtgtctagataaattttgagtaatttctgaaatattttgtttggaaagccttttcattgatactgtatagtttatgttcagtaattctaaggctgattgaaaggctgctgatttgcatttaaacttcagctgattaaaacaggagaatgtatctcttgcactgacatgaatatattaattttattcagtagcttaataatgttggaacactaggagttagtaattggaatattaattaattgaagattttatgctccatttactacctttccaatccatgggttttaggaaagtcaatccatgggttatgtcctccattttctcaggctgactgtaagtagttggaaagttaattaattgaagatttgcagtatattcactgagatatacgctgggttatctcaggggtttgattaatcttaacctcattctcagttgctgtaattttattttggtatacttggacatcaatttttctgcatttattcagagtagcagtttgaaactttgaatgtcatcatagtcgccgccattccaaagagtccaagctgctttcctgttcatttaagtaaactagttcatgtttttctattgtagcaggctagtagcgatttctggttttttagatattgaactttatcaagagggtagtacatccttacaatccataacccatcttctttgtgaatccttttcctgctttaaaaataaaaaataataataatgaaaaaataggctcacagcttagcttgaaggacttgtatatgctcatatgcaaagaaagaaagacttttttagatatcttcatttcagtttagaattcttattaaaagatccactgacagtgactaggttgacattacttacttaatggatttgtttaacaactaggttgaccttagttgctgtttttttttttcaaatgaccttagttgctgttaactctatttataatgtcttccaaaaccattttaccccgtttaacattatttacaatgatctgtaacccctttactcaatgcaggtgtttgacttgggcaggcttgaaccaatttcttgtgagtttttttgttgctttttcttcattaattcgaaagagcttcttgaaagggctggttatagtagattttaatctgtgaagtggaagagacagggtccctattccatttatctcactggtacaataacaaaggaccacaattataaaagtttcaggctttcacattagttagatatgcattttgttaggatactcgtattgtacaattatagcttactttttcttttagtgaaacaatgctttgtcatactttttcttttcaccttgttaatgtctttccattttgactattaattttcttctcattcattggggccatttgtaattacttcatataaatactcttgttgcttttgtcattttccggattattatgcattgacttgggattattgagagccatattgataaaaacttgttaacggtttctcataggaacaaaaatggtaatttggtgattaaacttgtaatttcttagcaattaagtcctttgtatctactagttttttttcttccaaaaatcacctgttatggaatttgttttaataatttaatgatgaggctcgaacccgtagcttccgtctcgacagggtaatattctgaccaattgaactacaatcctgaagaataatataataaaatataccgtctacaatatatatttttatgattttttttttctttacattttacattttcagattttgatagaaatttaaattattagtaagattataagatcaaaacttgttgaaaactagagtaaataaatagcaataacggtaatgattaaatatgttaagatagaaaaagttacatactattattggtgcaattttagagcagatcatcttgttacaataatacatgtgagcatgctacttggaccaattgtgtgagttatgaatatcttaaatgtcacttaatatctaaaaattaactggtgtaacaaaatcattacggaaagattattatcgtcatttttttctttcttttaattagggttttgcgacagtttatccaaatttggtaaaatagaaaaaaataaatgggtgattaaagttttaattttctacccaagaagaaaaaaaaaagaaaaaattccttttgataatttttattggtattgagcatttttgcaaaagaacaaatgatttatcattttatggcagatcatcttcttacaataatacatgcgagcatgccacttgaaccaattgtatgagtttgtgatatcttacatgtcacttaatgtttaaaaattagcgggtgcaatagcattgttatggaaatattattgctgccactttttttttttttttt

SEQ ID NO: 42569 - DNA, 3347 bp, Cannabis sativa
tcatagaccgacaaatcttatagatcctaagaaacaagttaatcatatatacggctgagctgacccttttgtttttttaactcacattttcttttttcctttttaatattcatgtgaaactcaaagccccaattataatatgtagtgcttttgtaaaaagattatttctaattacaaccttgctacaaagatgattttataagtgtgacaaacactttataatagaaggtttacggtagcactaatttattttaccagttttaactaattgattttaagtaatgtttcgttggttttaaaacctctcttaaatagtaaaacttaattcacaataaaatgaagcagaaactgttcatgcacatttcatatatcttctcaagtgtacaaaaaagattaaagtatacaaagcctttttcttttctgtatttctggaaatgaaattatacaagtgttgtaatgacacattacaaggtttacgaaacctgaattgaaattatccttgttgatctcttctctcaaacaaaaccaaaatgactgtacaacaaaacaactcaccaagaaaaaagaaagaaaaaaaaaaacagaccaactttaacaaaaatggaagaaggttaccttgttaatattataatgtcacaattcattgatttaattgcaacaaatgggacaacgtattaggccattttcattacaatcaggacaacgttggaaaccataatcttcttcttcttcatgttcatgttcttcttctccttcctctgtttcttcttcttctttctctgcttcataatatattttacaactccctgaacatgtctcacatggcacaaatcttacatccccacaagcctcacaagctccaccaccatctccacaatcatcatcaaccttttcgcaacattcgagtaacttctcaagctgaccatcttcatttaatcttctgatttcatcagctccaccaatgtatttgttccccataaacactcttggcaaaccaccaccatgaaagccatcttttaatagctctttaagctcgtctttgaaccccgaatgcatcgaaacatcgcgctcgtctacttttacacacaggctctttaagatcaccctcacattgcagcaatcctcgtacgttttcctaactcctcggagactagtgaagtatagaattagcttctctttgggtttgtcctcgagtgattttctgaaacttgagatgatttccgggtcgaattcagtaaccccggaatctgaattcaagtcttctttgtctgataaatgaagccacatgggcttaggggaagaagaatcgttattattctcttgaaatcttgatttgggacgatcaaaaggagaagtgggaattggaattggatctctaacaatatcaaaggagaagcttctaacatgaatgggtgatctgaaaggactaatatcttcaagaccttccattaattcccaagcattaatcgtttcaggctcaccgggaggtgttctgattggggtcttgggtaaaacttttgggattttttcattgatcatattagaccaagtctttgcctcaacaagtccaactgaaaaatctttgctttttagataatcagtttcatcatcatcatggttgtgaacggtgtcgttttgaaatggggtttcgagtttgatcgagcccaaggttgaggaagtaagagcaaccaaatggtaactgtcgccgttcttctccggtgggtggtggacgtgcattgagtaacttctcggcaccggcgaatatggcccttgacagttccggcatcgcttttgcttagagcttgcacaacccattaaccccccccaaaatgaatacaccaacaaaaccaagaaaaataataaagatttgggttttggaaagctgtgattaaattattcaaaaacctgatttaacagtagaacattcctcgattagatgagctggataaagaaacttttggcgcaacttccatgaaaattgagaaataaaataaagaagaaaaaaatgtggaaaaagagatgatacaactgcgaagcttcctttccaggtggcccagaacgtgtttcggtacctaaaaactcaatcttgaaatccttcttgttcattccctaatccaatgagagagaaagaaacagaaccagagattgatctaaaggtgaatactttcattaatttggcacacaataaacaaagaagaactcgaaattatcgaaacccagttccggatttgggtttaataaattatatatgtaatcgttaggaagcaagaaaacgacaaggacgatgatattgaagattgaaaaaggtaagagaaagaaaaagaagtcaaataacgatggctgcgtgtgtagagtattttcacaggtgcccaccaccaccaccacctccgaagattaagagagaaagttggtaaatgagatgcaaagaatttgagtggtgatcaaagactcaaaattcttgttgagaatgtttattatatataatatgggattaattagtaaaataaataattaattgtttggaagtataaaaaagaaaaaagaaaaagagagatgtgaaagtgtagaaatatttagagagaatgtttatgtatgatggaacgggaaacgcgggattcattgcttgaatcactcagtaccaaatgcaaacaacaacaccaatagcaaatactaccaaagcctccattccattccattcccaccatggtcatatgctccatcaatgaataataataataataataataataatattacccctgttttccttcactatatttttctacacaccccaaatatctcctcttctccactcgcttcattttgcgcgtgttatcacgcaaatcacgtcttcttcactacgtttttttggttttttttgtcacacaacacaagctggactggagtcggtgctataaatatgtatctattaataattgattttaggttgacaaaataaatgtatcttatttatttttctccaatgtggatttttgaatttttgtcaagaactaaagcatagttttcgaatttttgatttaaatttttttatctaatttcgttcaattttactaatacagtaaatgctcatgtattaaatcgtgtacttaaatattgatatctaccaaatcataattttaaatttttacatataacaaatcgtatcacttaaatttttattaacatcatacttttattagtaaaattagataaaaaaaatttatgatctgaaaaattcaaaaagtatgatttggtacatgtcaaaatttgagaataaaatttataattaatctttattttttgaagtatttttgttagatgtagctcaatatttttaagcccaaaat

SEQ ID NO: 42570 - DNA, 6293 bp, Cannabis sativa
aaagttgttaagggttgaggcatggcctttgaatgtcgcgactagcccctttacagaaacattgtttttggagtcaggacacgggccacgacaaggctttgttgagtcgtgacatgagaaaaatagttcctaaaaaaatttatagtgggtcacaacatgggtttctaaagttcgcgtcccgcctcccatcaacaagataattttaggtttttaagcctagttatgatttttaagaggtggacttggagggtgcggatttagaggctaggagtacaccgtggagcatctcaattcacttttccaaagtttttcttcctatttctttagagttttgtgtttattttgattattattatttatgtttaaaatgaggattatgagctaattctctgtttagggttttcaattaaatgtcttgaatcgttattatgaactaatgtaaagttcgatcttcttcttattttttaaatcaaattaatatatgcttgttatttgatatttgatgggtcatctttcatcattatctatatgtttttgaattaaaattttgaaatgtgagattcaattatcttttgattatttaggacaaaaattcagtttagaatgaaaatatttaggttgtttgtgtagcttatttgagttgttgagattaaaatagccttctttgtaatgaatttaccatagaaatattgaaaattatcatttagattgagtttataatgattataaacatttcttttgtcaacttactatttgaattagaagaagaatattaatttttgtattagggattaatagggaggatagttgaggatattgaatgccctattaatttttttattgctttgtttcaaatacatccattattaattgttttattagcgctttgtttattgtttatgtaatttttttcattgaattaaaaattcaatttttctttaactaaatagaaattaaaaaattaattgattaatattggcgaattggattaaggctgatacttggttttattaattttattactgaaagcaatacgtgcacttgtatagcataaacttttgcaacaataatcatttttctactggtagttctgattctgtgtgaggaagtaaccaacttgttactgtaaattatttaataattcttattgtaaaaataaattattttttgcaaaacatcgaccatcacacttgttgaaaccactagttgtgtggtgttagaacttggtgagaatatgatcatctttagatactaggttgagcatatgagacttgtatattcttaaaagcatttttagagtttctctaaggctatgtttggaagttaaattttagtgaagaaagaaaaatgtaggaaaaatgtaagaaaaaaagtgtttagaacaaaaaaataaataaattaattttccaagtttgaaatggaaaatattgtcaaattgagtgtttttctatacaatttttactttccataccaaatatgataattttttttttactttttttctttacattttccctactttttcttggccaaaatctaacttacaaacatagcctaagtatccatgaggaaggaaatgacttttgggacaaatgtatttaatctaatgacgaataataaaagagaaatatgaatttttaaacttaatttagctacttaattaaagaaatatataaaaaaaatctctttttacactatatcaaaaatatgtttatttacaaaatatttatgtcaaactcgacttttttttactgaaaaaaaaaaagatttttttagccaatgaaataattattatcaatataacataaaaataaaaaaaaaattctaattagataaaaaaaactaaatataaaaattcaaattttttcaatattattcattataggtaatatctattaagagtgaattcttatatatattgtgtatttgattgtaagaaaatttccaagaatatacattatatgattggctttgatgcatggattgtcgatttcgaaaactatggtttataaaagaatatttaaatattttaagttaattatttgatcagatttttgtttttaacaaattatttgataagatttggttgatgtaatcaaattatagaaagtggggaatttgataaaacgatgtaattaatctgtaattattgaattatgaaaagttgcaactttgattgttgcatcactgatggatggattaagtttagaattgggatatatcttgcattgactgtataaatataattctacgtatatagttttctttatataattattaccacgtagaaatgaagatgatataattcaaagaaaaaaaaaaccatgtccaagctcaccattcctattcctaggcataccaaataccaatgtacgaccatttaaatttcaatgctcatctgaaatcttttgactttggtatttaaataatggtattgttggtggctaatcaatcatcatttcttttcagtcatattttttcctctttccataatttcatacatggtttctcatagaatcatttcaatccttatctttctacttttggaatcatttcaatgtacttgtcaataattttctaatcaaccaaaccagttttgatacattcatttatttatttattatagtataaatttggccagctgtaagcatagagagtcagtcactcatttcgtcggctaaaattattgaaaatcaatagaaagaaagaaactaagttacttttttagtagttattttcaaaggattggaagttcatagccatataataatgattgaattattaggtttttgggattgtaattcagagcatcacatcgtctaaaatctcggagttgagcgtgattttagcacttttgaatcaaacccatttcatctctgaatgaatgaatgactgaagatgtgatagttttacagcaacaaaagaaggaaaaacttaacccaaactcttttccatcttatcttccatttcttttcaacttaattttcaagattatccaaatcttccaagatggttctccttttattacaaaacaaatcatttcatactgagagtgagagtggttaagttaagatttactatttctgtaaagagtaggtagatgtatctttactaaaagttatttccaaaaatattactaagtaatgagttatgacaacctttgttatcgttcatcaagaagaagcatttttttttttataaaaccaaatttcaaaagccaaaagcatataacaagttatggaagacaaaaagaaagaatcatatcacaagtaatgctgtgtgcactaacttattcattcatttaataaattaatttatttataataatgggtttaactttgcttcgtttttcaaagtgagaatgtagtgaagtgctataatgttctatatttcagactaaaacaagagagaaaagcaaaaaagtattatcccttttcaaccaattaaatgatcttccgtacattattacatgtacatgatgtatatatatataaaatatattttccccaaattatctcttacaaatgattgccttaatgaaccagagctcaccacttttaaaaagattaagtggccaagatatgatctatgcccaaatccaaggccaagaaagtctgttattttcttctttatgtattaatttttttcaaaaccacttgcctaaagagaatcggatatttgtttcgatttcatgcacagttgactccaattgtcgtaacaataggatgtcgttttaagaatcttaattagtatagtgtatgaaagaacaatatttataattgaccaaaagaaacctactattttggattattatatggatgatattatgttgtataatcctatttaacttaggataagtgtgaactataataatacgcgcgtgcacattcatataagttttttttttttcaaactatgtgttcattcaactggtgcaataacttgtgaagagatgacttgatcagaacattaacagatttgaaagaagaaagcccaaataaataaaaggtcatattctaatgcaaattgttgagtactctcttcatccaataatacgaaaaccactaaggacattattattttggcccatccctttcccttccatgttctgaaattcttttagtgctaaatatgaaatagaattccaaaacacaagaaacaaaacaaaaaaatcaaacttttttctacagagaataactatatactctctcttcactaaaagaatagcactgtggccacttttttttttcagtttgaaaagaaagctccacttgacacatttggcgtatataatatacagcccttataaatacttggtctcaccttgctatttgagttaagaagtagactgaactttatattaaatatattttgtttgcttgcatttattaccctttttctatactagaatttaacaataaaggcaacaagagtacgtgttacctgtttgcagaccatctcaaaactcattcaggttgccgcgtccaacatttattgcactcctaaggtgaggctgccattgccaacttaattatattatcttctcatatcaagtttgccaccctttcttcaactttgactccactctgatatattgacctgaattaaaagcaaaacccggaatttactttctactcattcatactaaatttcttttcttttctttttttggtaattcaacagatatagtctccaaaaccaaaaatgatgcctgtatgcaaacaattgcaaccagcagtgcatatcccaccatgtggactgaaattgaatacctttactcaaaggcgtccaaaggacaaggtggtgatcgtgatgggggcaacagggactggaaaatcgaggctatccattgacttggcgacccttttccctgcagaaataataaactcagataaaatgcaaatatatgaaggccttgacatagccacaaacaagatcactgaagaagaacaacgtggggtaccccaccatttgcttggggtagtaaagcccaatgcagatttcacagctcaagacttctgtgacatgacctcactcgccatggaagatatcttgagccaccgtaagcttccaatcatcgttgggggttcaaactctttcatcgaacacttggtggacgataactacaggtccagatacgattgttgcttcatctgggtcgacgtcttcatgcccattctccactcctatgtctccaaacgcgtcgaccaaatggtccgtaatggattaatcgaagaggtgagacaaatgttcgacccaaatgccgattacagcaaagggatccgcagggcaatcggggttccagaattcgataactacttccgaaacgaaacccatttggactctaaaactaaatctaaattactagaagaagccattaatgaaatcaagaaaaatacttgtaaactggctagtagacaattggacaacattaatcgacttagatatattaaggattggaaacttcatcgccttgacgccaccgaagtgtaccaaaagcgaggcaaggaggccgatcaggcttggaataagctcgtgtctaggcgcagcgctgccatcgttggccaattcctccgtacagaaaccccattagcctcctctgccactcatctttccagccttagagatcgacttccagctatggccgctgcaatatctcactgaagtaaattttgaagaatgacttgacacgtgtgttataatcagtaacacacgtgtctttttaccatttttcgtaattttttttttatatataataacctcatttacgtactaatagaagcactactattactactactacttaaattactcccaaatcaataaaattactttttcttgttttttatttttaggggaaaaaataaagtactattactactatttgttattttagctttcattgtaggctaaattttgtaaaattttaccctcatattaacttttggtatctgaatttattaagtatattttacttgtttggttctcgtgtattttactttctagtttaacaatcatttaagagaccatgaaccatgaatcacgaattaaacttgtgattagaaagaagcagatttatatgtgcattaatattaagtattagtgtgcttactactaccataatcaaatgagcattattacgggatactagtagtgtccaacactttatataggtagcgctccacgattagttagtaatattcttaaaaaattattttcttaaattatatgggacctaatacttaattacatcaataacagtatgatatcgaggaaggtatcaggcaccaata

SEQ ID NO: 42571 - DNA, 1673 bp, Cannabis sativa
aagcactaaagagatcaaagatgtttatatatatatatatatatatttatatatactactttcttccaaaaaaaaaaaacatatattctactttagtaatttatcctgattaggttgtttcacgttttgaaatatatattatactatcatttaatacaaacctattacacttattttgaaagatcctaatcaaatctattatagtatggagtaggtaaaactactctgatgatgttttataaaagaaatgtacattttttctttctttaattaaattaggaaatagttgtaactttattattttaattcatattttctttaattgaaatgtaataagggggtaatttgtggttgtctttaatgcaagtacaatattctctctataagagtatatgaattacaataaattttatgctcaaataaaaaaaatgataagattaaattattgagaaaaataattgaagaatacaaataacaattatttaagaaaatgttgtatatgtatgttatatacaaatgagaaaatgatgaggaatacaaaaaattacttgtgactaaaatatagcatttagacacaagttgtcactaattttagttttagtcacaataagtattgtgactgtataaacacatttagtcacgacaaattgtaattttgtgattaataattttagccacagactttttagttacaaagtagaaatgataatttatgattagtcacaacttttttacttttagttgcaaattctgtcgtgactaaaagtaaaattttttgtagtgtaaaatctgaagccaccaattaagaaatacaataaatctatttttgaccatgtatagtcatattattcgaatatatatttctgaattcattctctttatgtaattgccattaaatattcaaaataaattaaataatattttgaaaccaaaattgaaaaaaaaaaaaatactttaattacaatatacaattatcataaaaaattcactacattgattttatatataactaattttgaaatttatattataaagtacacacattttactaactacctatttattttgtttagacccacgtgaatcacctacataatttaaaaaataaagcactaaaccctaactaataatgaagctatttgctataaaaacgttgtgcatacctcttaaattcttgcaccaaaactaattaagcactaattaagatcatggcttcactctccctaacacacccgctggtaataaccagtacttcaatatgtgcaccaactattcgaaccggcccatttcccaccaacaatattaatcaagctagctttgtacgtagaattatttcatgcaaagccagtactactccatccgagggcagtagtagcaaatttgataggagagacatgctgataggtcttggaggactgtacggggtagctggccttgcctcaaatccattggcctctccgcatgccccagttgtagcacctgacttatcaaaatgtcacaacctgaaagatccgcccctacatccacccttggatccagctgacgtcaagtgttgcgccccattctccgataagattattgacttcagaccatctcggcctagtagaaaattacgtattcgccccgcggctcagtggctggaccatgaagagatagccaagtacaagaaagcc

SEQ ID NO: 42572 - DNA, 3321 bp, Cannabis sativa
agatagttagggtgttacagacatagatctaagttctccagctccgtgaccttctcattaaaaggcatttccaaatcactaccataaaccggctttgaactctcatacagttgactgaaattctccaccagatacgcaccaattccatcccgatccctaatccacacatcgtcatgagtattgatggcccgaatcctatttctcctcctccgaaccattgtagaagtgtgaaaaaatttggaattacagtccccctgagcaacccacaattcccgagattttcgcttccatatacgttccattttgatttccaactccgcaatatcagcctgaatttcgaattcctccctttgtcccccagtataggaagtctgcagaagagatagctcattgtgcagtcttttcagcttggcatcacaaaacccgaagtggtttttattccactcattcaacgcccatttagtctttgttagcttctgcataactcgaaagctccagaatctgttgcaaggccaattccaggactgctcaataacctgaccgcaattaggatccgaagtccacacttcaaaaaagcgaaaaggatatcttagcccctgttcattaagatcaatgtcaagagttaaaggagcatgatcggacgccacaattgggtgattcttgacacacgcacggggatattgcgtacaccagcaaggagaagcaatagccctatccaaccgttttctcaccccgtgaggatggtctcgcgcattcttccaggtgaggcaagggcccgtaaaacccaagtccactcctcccgagtccatcaagaagttttgaagaattccaccttcaaaagaacggaaagcacgacctccaactttctcctcagccttcaaaatcacatttaaatctccaataatcacccacggagttgtacatccaagaatcacactccttaaccactgccagaaactgtctttctccctcgcatacggtgtgccatagacacaaaaaagattccaaggtcgcaatccatcacaaggtgtatacaaacattcaaacaccgaactataaacatttatgatctgtagattaataccttgtcgccatttttaacacaaaatctccctccaattccaacagcaggtatacaacagacattagagaatcccagacgagcatttatctatgtcatagcttcttcatcaactttagtttcagcaagaaataaaacatccaccttctcagatcgagagaggcccttaatagacctctctgccgcgggtctacgaagtccgcggcaattccaagctaagcacctcatggcgaaggtgggggcatgcttctggccgcctcctcgccatttcaaaaattttgaacgtacgaaatagggacttcaacacattgggcaagtatttgattaatgtcaccttatagttgctcgtcttcatcttgcaatagttttttgctcctcctagtcttgactccagagttcctccgcggccattgtcgagacctgttaatccttgaccttctcttattcttagtcgtgccttttgtgtccccatcactacccagtttcaaagtttcactccccaagccgcaagcagatgaatccttcgaaggagagatttgggtggacgaacttgcctcttcattgttatcaaatagagattctttgtaagcatctggtattgggttataccatgtatgaaatttcctctttcttgagcccaataaatgaatgatcatttgagacaaatcaggagggttagatataagtgagggctgggctttatataggtctgtgtagtccggtccaataaggtcacaatagagcttttggagctcaggattattagtaggccatttgaagtttataggctcaggaaattggtgtggattttgggatttacaagtccaaatgtggggtatctccaggctttgcataagtgaaggcccaatatctgggatgaggtccacttcagcatcaattggtccaatgggttgggcaaagtctggtaatggtctttctgttaaaatggcacatgcaggtatattcaaaccttgggtatcacatgggatattgttgttaacgtccacctcacctacttcgggcccacctctgacattcgtactcccactaccacgcacactcctttgcatggtgttgtccgcgccatgcatcgtactaggacgagaaataccttcaccattcaaatttgccacctgtaccacctctttgtctttccccggcggtggatttgcctccttcttccgatgatcgtccgagaatcggcgtcagtgccctttgtttctcaagctcccacccttcaagttaacaccatccgagcttggtatgagttcacgacggaaggaagccatcgtaaaacaattcccaactggtccttcaaccttgagccaaggcccatacatctttacagccggcccttttgccgaagtcacccaagccgtaggagataaacactctctactcgagtgagctagatgaccgcagttaaaacacaaatacggaagcttttcgtatttgtattgaacccaggagtccggggtagcatccgccttcagaaaaaaaccagctggaaacgggtggctgatccagatatcaatccagcacctgagaaaaacctgtcggaccacctcctctctgctcttgcaatctgatttcaccaattgaccaactttttttgctaggatagggatgttattttccgaaagacatctcgtgggtaatccatggaactccagccaaaaccgagcaacttcgaactccgacgtacggacctccccttccacaggccatggtcgcaggttgagcaaaaccccattaactaaccatggtcgacgattcataacctttgtgcagtcatcctctgagtcaaagaaaaaacccaacaccccttcttcaaacgttttcatcttccagttcatttctaaattccaaacacccaaaagaatctttctcaccaccgaggctggcatagatttacaccccatcactttacccacgcacaccctattaaccacaatatcttccagggtaagatcttcaaaaagctccatcatctctatctcaagatcacagtccctttccaacagtttggaggccccagaatcgagttcggccacctccaccgtaactacagcacactcctccactatcgccatagcaaggaaatgataaatccaaagaaaaacgaagcctgagaggctgaaaacccaaataccaagtctacaaagagactgagaaataaataacgcgaagagaaaataccaactctaaactcaaatcaccaagtctactgagagactaga

SEQ ID NO: 42573 - DNA, 4202 bp, Cannabis sativa
ttttttttttttttgaataaatcacgttccgtttaaattataaaaacactcaaaaattaattaacaaaattatttctagataataccttataccttatttacttgtaataattatttaattgattcatgtacttcaataatctttttgtaattaaaaaaaaaaacaaaaataccgtaataattataaaatatataaaaaatcacttaatatattttttttatattagtaaggtatcataattattcaatgatgcatattctagttttttggtatgtcgatggcttcttttaatgttatttttggacaagctcattgaaacgttatcacttatgatctaaaagtaacaaatcttaaatgttattcatgttcataagcttcaaagctatgtcaatagttttatgaagttcttctttgatgataatgcttaatttggtaagattaattttgtattacttagttagaatcaaatttcaatttcaatttcaatttacttgattatcttctaaagatctatgaattcatgacaaaattggtgaacttctcaacttgaattatcaaaaaaaaaaaattgtccaattggagaagacaaatctttttattgtggttattattaatcaattgagtttatctgaaaacacccatgaacaaaaatagggtgactattaacaaagtctaggctttgggtttggattagtagaataaatagccatatttcaatttataacattgcataatttgatgatatgctaatttttttctttaaataaaatgtctaaaatacattctaaaaaaatgagtaaattggtccttgtaatttttacgttctactttgaagaacaaataaattgacaaatgttttattcaagaattcttagaaaaaaaatcttatatgtaatattgtaaaactgtcaccatgaaaacatttccttaccattgtcatcataaatttcccttgaattaacctgagaaaagggagtggagagaagtaaagaaatacttgtttggttagaaggaaaagtagggagaagagaaaaatggatagaaaattttgagatgggaccacttaaaattttctcctccaatttggcaagaaaaatagagagaaaacttttacaaaacaaaatcaatgtaaaattactaaattttttttgtaaatataattttgttaataaatttaagggtaatataataattttataacaacttaattttctttcctttagactcaccaaacaactaagaagaaaatagattttctattatttccttctaattttctatctctcctctattttctttcctgtaaaattttcaagagactaaaaactaaaagcaaagattctatacacaaatgctgcaacacattgtggacaaacaaaatacttaagtaagagtagccccaaaaagaattgattaactgtaatattcaaagttcaaacccaataacatgcttaattaatttttttttatcaagcaaattaaatttaagttcatctatacaaagaaggaaacaaatgtagttacaggagaggcttcaaatatcagaaatcctcatacttaatagctttgaacactttacaaatatcatcatactttatttattcaacatataggtcaatgactatccttacaatccctcatacccaagattttgacctcatcaatggttgcttcacataaccaataacagtatttgttcttctatttcttatttttcctccctaatcaattcttcccgagtcaatttcgccttgtgccggaagatcaaaatgaaaaccaatatctttctgcattctcatttgatacttttttttctttttgttagtaacaatctgagacaaaaccaatctttgaacccactctcctactgtttttttgttagcaactactagatcattcaatctacttactcatctgtttatctcagcatctcttcctccaacccaccctctcgttcttcaacctaataaaccgactatcggtgatcatttccaccttggatttcccaatccaatctaactacaaacttgttgaatatgagaaatgtaactcattacaattgcagcaattctttagaaatattgtttataagatgtgttgtttataaaaaggaaaaatcaatatttatttataaattattgttgaactgacactcacaaattaaaatactgcaaaacagatcaatgcacaagtcatacaacaagagggtcaaaatctcaagaatcaacaatttaagtttgtaaaaacgatggaagatatgcatacgtgtaggtttcattttgtattggattgatttggtttcgtttcggtaatagcttccacgggaggaagtgtctgcaagcaaagagaagaagaaaaataaacttagaacagtgccaactctaaagaagtgcattgataatttgatttcattaagaaaattaaagggacccaatgtccagaatttgataacttggagtagttgaaataatggtaggaagagaaaaatgtctctgacattttatcaaacagtttctatgcaataattaaatttgagttagttagagaggaacaacttacaagatcaggcttgtagatgttgtggacaacagaggccccagcaagaagagaaacaacaacgaccacagacgacattgccagcgaaggagttcccgttggtcgctttcctcccccaaatttgtgattcatttctgctaacaactcctgtggaccaaccaaacaatgcttataaatttagttcaattatataaaatagcaaaagataattgttcaaattgaaaactcctttacttttcagttcagcaacctgaggctatctgtctctaaaagcttatatggctgaagatgttgacctaaaatcaaaaagttcatgccacttacataaataaaagatttgtttattgttttaaccacttcttatgtttcatttcaaatttaacatttgttagatcttatgaatttggaaagaaacaaataaaattattaatataatacctttatcagctattatttaaaacaagaatatctcaacacttgtattatctattgacaaaaaacaatcaccaatgtaatagcacatattgattttaagttcaagtatcaaacatgtgaagaaaatttaataccaaaatactcaagctccttacctactttatctgctgcccaaaaaaaaatggtggaaacctgccaaaaagatgataagagcataacatgattgggatggataattcataattaagtacatcacttatatacttgaactcgatcaaaaaaatggggtcacttcttatggactcgttaacaatgattctgaaacaaaattgaggttcatgtcctacatatcatttgctttaatttcaggttcctcacattaatgggattagatgagaaacctagaataaaaaggaagaaaaatacttctaaaacacaagtgaacttttttctatatctaattttctggaaatgtctgaatttcgaaatggaaactcgagtgagaaactacagtctgactgaacttgctaactttgtaacaataataaactcaaacatgtttgatattacaaggcacacatcatgaaaatgcaagcaaaccatggcctacctctcaaattctcagtggtaaacaagaacatcactaatttatatgcaaaaaagaaaggcaaaatgaatcaaaatatatggaaaattaaggagacccttggagtgcgaaatatagctagcctattaagttgccaagaaccactgttagaaaggtgatgcttgcttctgtatttataccatgtttggctgcagctctcaaggtaaactaagaccaatatatatcacttattttggacaccacccactccaatccttcatatcccaaaaccataaaacgtttgtttaagcacatctaattactaaaggtacagagtcacaaaaaataatacggccaaacatataaacactaatgagagctgagaatcttcatcttcaataaagtgcaagtgcaaatcacaaaaattgcttcagtcagaacacaaaatataccaaaatattcaaataagtgatcacacaaaaccccagaatttgaataaagtatagttacttgaatatgccaaaacaataaacaaattggaaatataagtattaaccatttatgggtttccttgaattcaagaactgcagagaaaataactatagctaaacggctaaagaaatc

SEQ ID NO: 42574 - DNA, 4855 bp, Cannabis sativa
aaaaaaaaaaaaaaaaacacaaggcagaggcatacaccacaatttaccaactcgtcagtcactgaaacctaagaagaacaatattggcggttagtgtaggagcagcgtaacagagcagagtcttcgcgtaccataatattcttcactctccttcagtttcagcgaggagagctagctattgcgcctactgggttctccttttttcttcttctcacagatgcttaaaccatcccccgtttctccctctaacccataattaaaccctaatttgtatcaataaaccactaacaatggcggaagtagaggcaggatcacgtacggcgggctcatcaatcgctggtggtggaatggtggagacgtctctgaaagataagggaaatgagcatttcaaagctggaaattatctcaaagccgctgctctctacacccaggccatcaaacaagaccctaataactctgccctttacaggttttctctttttttcttttcatttcatacaaaaattaaatataagcaaattggcttaagggtttgtttatcgatttatgcataatcatatggagagctatttcgtgtaatatatacgtaatactctgggagttctagagctgtgtggtgctttagttgtcataaaaagttgatggattttgataacttttcaatttaattttgttatggttgatcgtgaagccatgtttacatgcttattattggacaactaatgaaaatgtttatattcaaacaaagattgatctcgcattgttaagtttctatcaactttgctttttctaaatgggcagaagtaatccttacaatttggattcagttgaagatttaggtatatgcattctcaggatgaagccctgattgctgggttttttagctgtcgtttataaaacactgaagttaagtgtccatatacttttctatttctgttttgaacatgagtaagttcccaagaaccaaaacgaattttggttggtgtttctatttgagggtaaatatgacattgaaataccaagttttgagttcatttggttggcagtgttttcccaacttgtaggtttaactttatctctattttaagctgtgaacatggtttattctttctcacttgctttctaattgttacttatcaaattgtttcaaattcttaatatgtgctgatgcacattaatgtttcgttattgaccagcaaccgtgctgcagcatttctgcaattggttaagcttagtaaagcacttgctgatgctgagacagcaattgctttgagcccagagtgggaaaaggtggttcattttattcttcctttttcatcattttcaatgaatttatttgtgagaggatattggttattttcttgggaggagagcacattgatcttttgtatctcttcctaaaatatgcattgtgatgcacctccagggatatttcagaaaaggatgcatattagaggccatggagcgttatgatgatgtatgaccagaagctctgtaaaatctttcttactcaagtattgtatagagcctattgtaggaagagctcataaattttgttttctatcactgataattaacgtgttcagtgttcatttcttgtaggctttagctgctttccatactgctctgcaattcaatccaaaaagtgcagaagtatcaagaaaaattaaaagaataacccagttggtgaaagataaaaagcgagctcaagaagtagagaacttgaaatccaatatcaatatggcaaagcacttggaaaaactaaagactgaaatggtaactattcgttgctgtaaatcatgataaattatctgtagtcatctattatatttttctttttccagacaatctttcttgccattttcttttgcttcacatgtgacatgtataagtttcatactctcgggaactatgtactgtaacttaagtttaatacttgcttaatgatccttttgacacccttccttgatggggtttgtcttatcatttatctttctgtcatatttattagttgtgttgcttaagctttctccattgattttcaatgcttttagtggacgacttgtgctaagattgttccaagcaatttctacaggaaaggaattaacagtctttctctttgcagtctgataagtatgggtccgaggaaggttgggaagaaatgttctcttttcttgttgagacaatggaaacagctgtaaaatgctggcatgaaagctcgaaggttgatcctagagtatactttcttcttgataaggagaagacagagactgataaatatgctccaatggtcaacatcgataaggtatcgcactttctgttaattagtgacataaagtactgttctgcttttgttaggtgcgagcctctttttgctgacaacctgaattagtaaatgcaactttagcttttaacatttgtcatcttgcattaataaatgctattttagtttgtaaaatttattttctagcatggagccatcatgtttggctctattttctacaattctaacaaaacagaagattcttaccttaaaattttcttcattgcaccaggcctttgaatcaccccatacacacagcaactgctttttgtatctcaggcagtatgctgaggattctttctccagagcggcatgcttggtcacccccaaaagtataatatcatatccacaggtaattgtttgcaatttgatatgttgtaaactttttttcttccccatacattcaacatgcttgcttggcctgttgctaatttcgtcatctagaagaactatttggaaaataatcaaacctgaaatatgtgttgatagcgtgttaccatggtaagggtattaacaatactccaaatacattgaaatcctttaaaacaagatatactgaggcaaaaacctatctatttttcagccaaacctcagtgaatgtaacataagaatataagatctacatgggcctcatctggaactaaattttactctcttgtaatacaaactagaaatatcaaggacatggaatatcctaaacaattacgataatatccattcaacatactcatatcacattatacaacctcccactgaggaagcctaattactgtattatctatcacatattagagggtgtttcgtttgtttagatgaagtgattgatgaaggtgccttgtgtttcaggtttggaaaggtcaaggaccacggaagtggagacatgggcagcaagatggtttctttgttcaatttgagacagcttttctgcgaaagctttggtttgtccctagttccaatgaacagggccagatgctgtgcaggtctcttcttcatacattaaattattaacgtttgcaagtaatgagggtttattgttctagcaaatataaaattttgtaaacagattataatgggtacgaacgcattattaactcaagttcttgctttttaaagggacccagagatccttgatatcggtgctcatgaagtgcttccacgcctatacaaggaaaagcggtccagctcttagatgttttcacttgttgacatttcgttggggaactgctggagaatatttatccacatagaatagacagcatagagtgcttgtattttcctttacttcatatgctaagttctttggtgatggttactattgagaacttgcttttcagtcattctgatgtatgcactcaattttgaaggtttactttttgggaaggaaaaatggatttctgaggcttttttgagtgatttcattttcaggacaattcttttttgtacgactacttttgtgtattgtggtcacgaggacagctttgcccccaggttaaagaagggacacattttgtgatatgcttgcaaatgaaaatagaaaacattgaacttggtttgcatagaactagcttcgtttgtaattgcgaaaaagaacgtctgctttaacagaaatttttatttctagttggacatattactgcatagaaggtaagtgggaactcatttagattcccagcaaaccagcttccttgaatttaactcttgtgtaactacataatttataggattcccacgtctcagaagaggtaagaaaccctttgttgactctattagtgtgttagaatggggcttcttctaaatagttgattaggttgcttgcctctagtaaaagaaatatgatcttttttcttgcataatgggtctagacattatcatcagtttgtctttttgattcctctgctcctacatttggcttgcaggtatgcagcatgaagttacatgctgccacagcctctcccacagtgagatagatccattcctgaccaacggcctcgatgaattttgacttgtcaagctttttgatcacttcacttcgcgggtttgctaacacaagctaaattgaaagaatgaaaaaattctagtcagatacaaaatctttccatgcaaaaggaaggtaagtgaagtgaaagatttaagataggataggagtataaattcttaccttatgaccctttctctcagtatttctcttgacctcttcaagcatgctaatcccacttgtatcgatgctaccgacagctgtgatatgaattattatgatcaattaaggttaagagttacataataggaggagcggattgacagtagtactacttgtacttacagctgaggtctagtataacataatgcaaacttgtttccccagagcattttagtttgtcttcctcttcatatatccacctagagattctacaatgaagaatatcatcgaccaagattagtacttagttatctattatcaagtggggaagtgttttactttaattaagtttacttctatttttgaatatctctacctttctcttaagtagtttg

SEQ ID NO: 42575 - DNA, 7003 bp, Cannabis sativa
aaaaaaaaaggccagagctaccaaaccaacaaaccctaaccaataacaattgggaactactaaaatattaaatacatttattgataatatctgaatacaatgcttacacgttattatataaataatattgcagaaaaaaaaaattaaagtttcatgccaatatcgtggtttacttatacattatatgaatcattatttatttatttattttctgacaaagaatgagcaagtatctatagattttttgtctttcatttaaatgaaataataatctttttcaaatttgttgaaaaataaaaaataaagaattaacccccaattatgattttgtaaaatttgggggagttaaactttaccctttttttttaagagaagttctcttgaataatagaaataattacagatgtgcctcagttgcattttgattatttttgaaatattttacttatataatagtctaatgataaattaatatacttagttttgattagcttaataacagcttataaatatatttcattttccattttgttgaagaacaaaaaaaaatgttagccagaactatagattagtccatttaagaaaaagaaaaagaaagaagaattataggctagtcttggtacttggtactactacttgtatccattcttcctagttgtcaaaataaaagtttgctttatttaaaagaataaatatcggtataattacttgaaattttaagtttataagtagtataaactcaatatttatttttactgatataaatacctaatatttgtaaaactataatttttctccagtttcgtgagtacaaactctattttgagtttattaaaaaaacacttaaaagtaactgatactacatgtttctatctaaacccaataatttaaaatctgacttttatttgtgctctgtttacgataataacagagtctgtactgttaaaattagagaaaaattacagttttagaaacattgagtacttatactgctaaaattaaatattgaatttatattacttacaaactttaagtaacaatctatatttttataaatttaatcagaataatgctatattttaagaaaaaaatatcactatattagaattttttcataaaatttgtataattttatggttgactagtatactattggcaagtcatagtcttgaataaaatctgactatttattattatagaggtgtttttatacatgaaaataatttgtgaaatattatgttttccatgactagaaatagaaaaagaaaacaacattgtcacttaaaattaatgtgaaaccaaacactctaaatttcaatttccctataagaagggaattgttccatcaagccacatgaaaaataattagatgtcatttcacaaagaaaactggtcagaaaatcaatgaagactattacttggaacaatatacattaatgggatagttggaaggcaaaacaaatttctatagtagacatataaatattattaggtaaaggagttgaaaaaactgatgagatttctttatcttcaaaagtcacctcaaacaaaagtaggagagatcataacaatgctcattatagaaatctaataaattgttataaaaagttgtaataaatccatgtcatacctttttaaaaggatttaagattaccccataagagattaatcttatttccatggtaataatattcctatccttaaaaacaaacataagaatgtataagattactattcctattaaaatattacctcataccgaagtatcataccctctaagataatagctatcctagatcatcaaggattaaaagggaaaaagagaagaagaaaaaaacagacataacagaagagtagacattgaaaaactgtggcagagattaaatatgtttaagtttaactaattaaaagcttattaatctttagacttgttatgactatcttcaacttctacaaacaagcaagcattgcccaagttacatcataaccagataaaacaagtagtatctcaactaaacatattcatatttcagtagcttgaagcttgagtagtcacattcccaattacaaagattaaaaaacctgaaaaactttttgccttttagtgttaggaacttaggatgagacatgtcataataaatagaattcacctcaaattgttaagatgtagatgtgtctcatctcatcgtcagatctatcattatcaggttggccactccatttatggtttacagcataaacgactattctacaatctacatacaaacactgcatatataccttatctatttattactctcacattcttttccaactccttacttaatctaatagctataattagcctaagctagcaaggaatgatattttataattaaccaaattttctttctcatactttgttccaaacttagtataagtaacaagatttgtaaagctatgtcttttgctttttttagctctattatacttaaataatatcaagagaatattgtattcctccaaatttttttatgcctccgaacatacatgatcatcctcatcaagaaaccaaaccaacattataactgtgcaagtgagacattgattacatggacatagacgtggacacactactaagcataatatctaacagaaatgatattcgagtatgagaaataaagttgttactgaaactgaactataaactagaactgaaagttttttctacttttgcaagattagaaatggcaaatgggttgggcccaccccgacccgcaccattagcgctcttgaaccggattgagtcacacccgatccaaatgtttggcctttttttttaccacttaaattcaaaacccatctcttcatttccaaatataaacagaacaaaaaagtgaaattaacaaaatgggccaaaacccatgtgaaactattgtaaaaacacacacaacacactcatcaagaaatttttggtaatttcttttcccaaccagagaaagatgaggtaaaaattgaaagaatagtgtttgctgtaataatcagaggctcttttaaaggatcgaccgaactgacgaacacatccaccggtgctaaatgattcggctcgccttctcgctcgaactgaatcgaagattgagaaggttgtcatcatcaacctcttgatcattgttagcatcatcattattgagaaggatccctcttctttcttgcttaaccttccatttttctactctgtctttccactcatcattactgtaaacttctttctctacttgatcaaattccttgatgagatcgccatactccgatttgggagctacagtaaaatcccgaggaaagccaaagtgagagagagaaagaaagaattagggatttagggatttgaattttcaatttcaggcatttttttagttaatgtataaccgggatgggttagccctgacccaaaataaaactaaccggggcaaggcagagcgaagacctaggtagcaacccccgggtagcaattcggttgtcctagagcggggctgacccatcaggtcggccccaacctgacccgcgaaaaagccccattttgtcattcctacttgtactctaggcttagttgagtgtcatattggttagttgaatttgccagctaggcagattcatattagagttagttaatgacagtttttgaaaattagttaatgacagttagtgtcattgatgcctataaatagagctggtgctcgggcgggaggtcaggacgccaaaaagctccatttgccattcctacttgtactctagccttgaggtgtcatattggttagttgaatctgccagctaggcagattcatcttagagttagttaatgacagttagtgtcattgatgcctataaatagagcttgtgctctcatttgtttgtaacctctatctcagattgtaataagcttgtacagattcaatttatgaattatagttgcttctgtggttgttttcggattgtgcattgagttgttcttcctgtgtgagatcgaggacaattcccaacaagttcatttcacacataaaatgacacacaagttcttacattctctcgtgaatatctctcttgatctaacccatttcctatctttccctgtttctatttattcacttggaattataattctgtttcctaagtaaatctctgccctgttaattatatcatatcaatactcaacttgatttttcataattctaccatctcattactgaaacctgaaactcctaatactcgtattttttatttccattgtttaaagcctcatgtttttacttatttagaattcaaaaactaacaattaaagatgattttacaaatgttcagtcactctaaactgaaccatcttttatttttcagttgaatccatttattctaaactatttccatgtatcccacttagctttccagcaatttaattcactaaaacttatattttctgcaatctagtggtaaacttagtcctatttacttattctctaaagttaaatttcaaaccccatagtttttttttaaccctatagtttactttaggatttccaaatttcttaagtatttactttctacttccatttcaaaataatcacacctctaattaatactaattgctacattatcaataaaaagaaggtataattgaatatttaccaccaacattaatgattattacactgaacaagacggaaaaagcttcaaatctagttttcctagtaaaatgaacataaaccagagaaggtcagcaaccgagtctcccaggagaaaccttacaaaacagcatcacaaaaactagaaactcagtacttcttcagcaataaaacattgaacaatggcatacatgttattccattggataattaactaaagaaaggaaagaaaagaagagctttcccagctcaagtttcaaatatataagacattttctttgtctaaacattcagaaacataaaataatgtaaaatttactacacttaaacccaacattgttgtcattgttcctatttcctaagcaactataacaataataaaggattcaatcagtgaattgagaaaagtgaaagcacaataaacacccttttaccactcatgtttggtcaaaagatttaagagaaaaaccaaacaaaattgtatgtagacaaaactgattattatcattatcattattattgttacccgaagaagaataagtctcaactcaagaagaagttataagcttttgatccttatcctggccactgcacacacaaaaagtttcaaaatttgttaaaattttcagttgggcaaaacatcaaacaggtaaagtaccaaaccaataccaattcatacaagccaaatcttctaatccataataatgtcaaagaaattgaatcaaaatgctgtatttctagaactaaaacagattagaattctcaattctatatatatcgtacctctgaagaagaaaggtcttagtaatgagattacagaagagataaacaaactgaatggagtcattggctggaacgggataggtgatcttcgagtagtaatccaacggcatagcagagtcgacgagcgatacgattggaatccgaagacgatgagcttcaaggataacagaagatttacgctcagaatcgaaaacgacgaggcaatctggagcctgtgtaggaccaaagcagagcttcttgttacgagacctgaacttcttaggactgtaactattagtaagaaacccaccggttcgccatagagagttcatcgaaggagaataacacccgatcttcttcgtcatctgctcaataatctcgtcaaagagtggatttgtgttcacgaacatgaactttcccttctgctgtgccagggaggccataaattcggcggcgttgcggagacagattagggttttatctgagtccataacggctaagtcatttcgtttgccgtaagtgaataccttcatatggtcagccaccacacgcctccctaactgtgcgttcgtgctcagaagtttctggatgacgatcgagtgcagcggccgccacgccattgacgccgagttccgagctccgaacgccgattttgcaattgaagaagaaaaagcacaaaacacagttcgttttcgttacacaaacaaaccccaatccagtattgctgctgacgatcaaaacgacagtgttaaagtacaaaacgacacttaaatatgaaaaacgacaccaaaatatatacaactgttgaaagtctataaaaggttgggcttttataattcccaaatgtcagttaggggttttcggcccatgttctattgcatagttggacttaataatgtaacttgtgatgaaaaaaaaaatacacaaatttggcaaaattttaatatttttatggttacaattttacaattgtttataaaacaaaaaaaaaaaacataaaaaatataaataataagaaaataaaaaaaataagactacaacacaaaaaatatgtaaaaacatcaataatttgcattttttataaatataaatttataaattgtaaatatatttttaaaatttagtacgactgtattttggttttttttaatattgttaggtctttatgaaaatatcccccaaaaatatattttgtaaatgtttgccataaaaattataaaatgaaaatttctctttacttatatggaaattacatattttaagagttattatacaatgtgtgtgcaaaattatttatgatttttttttctttttcaaaattattctgttaaaaaatttaaaaatatgagaaaattttttagagtaactagttaccctatgtagttatcttcttatgagacatttagttatgaggctaaactaggtggaaatagaaactattgaaactcatcttatatttagtaaattaaattttaataaaaagatatttgtgtttttaagtgtgtctcacattttaaattggcaaatagaatttttgacatgtactaagtcatgttcctgaaacttttttttgccattaaaatttttca

SEQ ID NO: 42576 - DNA, 7195 bp, Cannabis sativa
  modified_base (66)..(69): a, c, t, g, unknown or other
  modified_base (324)..(343): a, c, t, g, unknown or other
gattaaaatgattgttagtgcttggaaactactttttctctcaatgtgtccaatagaaaagtgatnnnnaacggtcttggcttcgtccctatgaaattttacgatttttcaagatgtgtagtctgagattttaacagaacactaacgagtgtaagagtaaggaaaaaacttgtcaaaatttaacctgaaaagaagaatactttgaatttttaaattagggggccattttaataaaatattatgcaaaaccaatctttataatagtatgaatttattgtgactagtgtcgaaaaatattctaagatgggtccgggccacatttcnnnnnnnnnnnnnnnnnnnngaaatgtgaaattttcactatttcgaattaaataattgttagtgtttgaaaattactttatctctcaacatgtccaatagaaaagtgatgcacaacggtattaaagtaatctaagtggacccgatattgaattgcaccaatagcgatatcacacctcacaataatactaagcaccataggtgccgtttagtatttctcttaatatttacttcctaatctcaaatcataaattcaatcctcttctagtagtgtatgcaaaccttttgataaacttaacatgtctaagactaaagggagtttttatgttatatttacagggaaatgaagtgactaaaattaaaagacctggtagctacaagattcaaaagtgtgtaaaatagtgtcctaagagtcatttgtttaaagtgttgtaatttacctactcaacaaatagtaagtaaaatgagagatacttacacaagataattgggttcctaatttatcatctttagaaatcagtttagcattccatgaattcagcttttccatgagagtagaaagcccttgctcaggaacactcaaccttaatttcattggagatcttttaattggaaagcatttttgaagttcatgaataacttcttgtgcctgaaattaagatacttaacttatggttgtgtgtcatgacagtagagatagagaaagtagtagtagtagtagtggggtacccgcttcttggaggcactactaggatcaatggcaaaatgaatgtcatgcataaggcgctcaatcatggttatggtgtaagggcgttgagtttcaggattatatgctttctgcataacaatggtagcaatatccctgaacttactggataactgagactctcgctccttcccagcaacttgaagctcacctttctccaaaatctacaaacatattttcgactgatcgtcagtcccaaatgcagcaatcaagtctttggatttggtcaaaactcctttggagacattggagtagacggtttgcgactgcagcaccttgtccaaatccttctttctattttaatgaaatgaattctattcacaggtaagtaggttacttacactcgtgatcgccatgagaggaccttgttcttgtaacaggcaacttcaaatcgattaccatgcttcttgagacgaacaacgacgacattagtgagcctcttttgacctacgggttgaacaagaatttcagacatgcttctcttctgtgctcagctttttgacctaaccaaaactagcctgtattttggtagactcttcttctttcttctctaattaagatctaaatctaagttttaactataatttagatgtctttcagcatttctgcaaatttaattgggttattacaaagcaatacgcaattattattattattattaacaacatcaacttgctgttgttttgtttgtttgttctagtggttgtttactttagagctttgttcttttactaaagagatagattaatatttgattcaatggattggatattgtatcttctgctgctgctgctgcacagagtcactgcgacgaatattactaactagcatatatatatatatataaaggtcaaaggtgttacagcacaaagtcaaactaatgtcctttcaccaaaatcaaaatcaaaaaaattcactccactccaccaccaattgactatatgaaaagaaaaaaagacagacagatagatagattagatatattgctaactaaagaaattcccaaaagtggccaagcaaatatggattggatggaggcatttcgtcagtcttctactgctctttcctttttatatatttacacctttacacccacccaactccaaccccttctttcttgtttgtatatataaaagtagagcaacaacattcatcatttaaaacacctcaactactactactccaaatactactactataattatgaattatccaaaaccagcaagcagtcttgtttcttgcctgcccgcctcttctttctttctctatacttcttttctttgtccttcaccaattaacaccgataccacctcaactcgctcgctgcatccatgcattcttttaattacaccaaacccccgcatctgaactctgaatcaattcagattggattggattctcctgtcctctccatttgagattaacatatgttcaaactcacttgtttacaactcctcatcatctgactaccaaaattaataaaacaggtaagtaacttacgcggtactctctatatttggaagctcttaaaaggagaaaaacttaccaagtcaaaaacactaagaacccaaactagacttctgaacccatacttgtttctgcaatttcattgaccacagagattccattgattagtacaaagagaaaatgtacagacataataacatttgtatttttgacagtaatctaattatgcacctcctgcgaaccataaccagaggaaccaactctctttgaatcgtcctttacactatttgttgatccacgacggccaacatgtttgtgaaagcctacataattaattcacaactgctaagctaattacatctccacatgtcatcaactacatacagacaaccataggcaaaacacacaaaacttaagaatcagaaactgagacccaaaaactttaccattatctaaagccgaatggctgccacttccactccgaaggattttgatgtctttgctccttacattggttgtttccactttcatattcccatgacctcctaaaaaacaatgaaaagcgaattccttagaccaagctatctataatcttatgaaaatctgtttaacttgttaccaagctatctatggcactctccggtctacacaactattgcaaaatgatatgcttcgtttcataactgttggtgaatacatttaaattcatgataaaacatactatcttcttaatcactagatagaccaaagtgggtcataaaatctggtatgcaaatgaaaccagataatttaataataccttctatagaatctaaggcccgtggaggttgtgctgatgacaaggactgagcatttagagaagctccttcagaattattacgaggagcccatacaccacgatcaggtctatccttattccttgttcgtttctcatgtttttcaccacaaaagccttgcacgtcactcccaacaaacttacagtctgaagcaccattagcatccttcaaaaccaattgaccttgttgaggtcgagaatggcgtctgtcctccacatttagagcctgcatttgcagctcacagtgagctccagaagaacgatttggaagggcattcttgttttgaagtatgcttttgataacccttcctccattgctttcatgacgctggttctgcatgagaaatgcacaatcaataatgatttagttgaagctaaattcaagttattttaacaatttaataggtgtgtaggttcaatattgcagaattaggaacacagggcgctaagaagctatctctttgacatggccaccaaaaagtgagaaccaactaactagggaacaagtaatctgcattgtacaggaaattgatgacaatcctccttcaccaccaaaaagtactaagaataaaagtaattctataatactatttacataaatcacaggcagatgtgcagaaggcagctaattaacttaagaatgagacgataaggtgcaacaaaaagaaattacatgagatatccccctttcttttccattcacaagaagaactttctttttccctgcaacattaactccagaaattaatcaaacaaaagagaaaaaagaacactaagaaaaaataaagaatgcatactatagatcatttaaattattgtacaaatcatctaatcgccacattatttataacataacagaaagtcgtctatatcaagactcatcataaatcatacgtatcttacagtaaatgtccaccgactttatttctagaaacgaagctaaacacagcaatggttaaccataaaaagataatacaaaatgtcatctaggacgtaccactttcctccgacacttcagctccaacagtagaagacaaagtggacttgtcagagagcagctgattctcccgcttagccgcaagaacatattttgacttgtctttcatagttgtatttttcgcagaatctctcaaaacatactgtcctctcaaaataaaatatataagaaagcaaagttttaacaaagtccaatgcagatagtaatacaaaagaatcgttcatgcattaaaagtagaagcgccaatacactctgaaagattatgaaaactgaaaagaataacaatgtataacccacattacacgactattttacacacatcatcgtgatcgtcattaactagtgtttaactatatgattcaatgattgtattataaaaaaaaggcacacataccatagtagttgcattccttcttctatcagatcctcgctttgataatgctgaattagaacttctggctgatgatccggtattttttcggcttaattttccattaggcagtggcctctgtcatgacacataagagtacttcaacttgcattattaacataagaccattcaataatctaatatcaatacgcacactgtgtgataaatagattcaaatttcaaaacacaggcatgtgtaatacagaaagaaattaaatctctcgtcatttatcttcatttttatcaataataaaatacccgagatccaccctttgcagctcttttttgacgaacaaagtccatcagcggcgttattataggaatgtcttttccaacacctaaaactggtaaaggaaaaaaatatatacaaacatttaatagatttgctatgaattcaatcctgatccaaaaatcaataagcatattagcatgtctcgattcaatattagatatcttaataactaaccagctctttccgcttctcttctctccaactgtatttccgcactgggaagattctcggaaggctttgcaagaagttcaagaaagtccagatattcaggatctagatggtcataaagaaaatacaacttacaaatagaaaacgatcacatatataaatatataagttcacaagctgaagttgacttaaaagaaccaataaaatgaagaagaaaaaaatcaataccttcgtttatagttccttcacgtccatcctttctcgaccatagtttgggaacacgttgtgaaggtgcatactcaacaatagttttaaactgtaatcctgaagaagaacaaggaaaattacttatggcggcttgactgatccctcattcttaatataaaactaaaagtaataccatgaaaaagaactcaatctcttcacagaaactatgcatggagaacaaaaacaaaggctatcagataagcaaatacccttctcattaacaaacacatgtccctcaaaaaattcggcaaattcaataacatcttctggccttttgaagtcaatgtacgctctagaaaatgaatgcttctggctgcaaaagtcaaatcaatcaataaataaatagtgttgagaaattgagtacaatacagcatatcaataataatgatacagcatttcagaagaaatcattgtctaaagattccctttttatggattaattttcttcaaaaatatccgataaaaaaaatgatgagatcaacgatacgagcgtagagaaaaagaataataattaagctgtcaaaaagaaaccctaaaatgtatatggaaatggaagcaataaggacatttggaagatgaatatggagattgacctgttgttggaaggacggaaagagagccaattgtagcgaccagcaaagacagagtcgacttggtcgaggagagcggtcttggaaattgaaggaggcaagtggcgaaggaccactttggttcgatccaacagtcccttcatcttcatgatattgtgttgaaatgaaaccctagaaagcaaaacaaagcaagatcgttccttgagattacatcttggtttggtggtgaatggtgatggtgtctgtgattattgattagcaggaaatctgaaaacggaactctcgatttcaattttgaaaaccctaatccaatccaatctaatctaaagctaatcagcagtttcgccccaaaatcatggccatgcaccaaacccaaaaccagagactcactcctttttccttgcttctttcctaattatatttacctctattcatacgccgtcgttttactcttctttcttttctttttcttttttttttaattatattttttttatcataataaccaatttttttttaattatatttaattacaataataataattgaaaatttaagtaattgagtatatgataaaggtgcttacgtttacatttactatatgttataataataattgaaattattacatcaatacattagttttttttgaaaaaataatacattagagttttatatgatttgaaaataaaaagatacgattagagaggcagtaataacttttcaattttgattgtctttctttttttcttttttttttttttgtgtattattataactactataaaatattagtagcatgtttactaaacaatactgaaaattaaaataaattaattgaaaaaataatagaataaataaaatttatttaaaattaatatttatagtaggttgtttactaaaattatttagaaatagaataatgatctatcttgtttactttattaaaaaaaaataatctaaattaattaaattgccttttgagttaaactaaagtatctgataattattttgtaaacgcataacaaaattatcataatacatttaatattaaaaaatgaa

SEQ ID NO: 42577 - DNA, 5830 bp, Cannabis sativa
ttttttctaatttcttaatttgttttctgttctgggaataaaaacacaaaagcgctaaaactttaatttatttctggcacttagtattattgattgcttgtcattagaaattttcaaactgacctatcattcagaaaaaataggaaagttcttctgctgcatatctgtgtaatgctgggagttgctcatttaaggctacaatgtctgagactgctgtagaaaatctaacaattctcttgtgtacagtgttggatacggcagcaggggtttggtgtgatacgaaatctgttgttacaagccccaggactggcagatacagtgctgacgctgctggtggagatgctgcagtagagttgacaaggcgatgcaggcatgcagctgcggcagttggcgatttaatctttatctatggtggtttacgtggtggtaagacatgaatctattcttttgaaaataggatttgttatcattctctatcttagaacaggaatccttcaaccagatactatttataatttgaactgaactaaatgataattctgattatttgatcagcaaacttatgaatgttttacatttggtaaacctatttatagatgcctgttactaattttcttgggaaactaattttaagagtctcagtcatttggagttaagatggattattcaatggaaatagttatataggtatgggaaaacagatattatttctttctataagagctgtttattggcatgcacacttttcaaaacattgttgttggattttgatgtgagttcgttttagctttgtgtcatttagattgcccaagttaaatcagatctggtgatgaattaaatgcctactatattgaaagcatttcttttttctcttggtaatacactttataggcatgaaacctgattgaaaaatcccacttatttaggaatataaaactcttattactgcctaccaagaattcaaattgtcattttagctggcaagctgattgtgttacatagtaatgtggtttatttgtgcaataggtgtgctgcttgatgatctacttgttgctgaagatcttgctgctgctgaaactacaagtgcagcttcacatgcggctgctgcagctgcgacatcaaatttacaagcaggtcgtttgcctagcaggtattttgttgatgaaagaacaaggtcgttgcctgaagcagctccagatggaacagttatagtgggaaatccagttgcaccccctgtaaatggagacatgtatactgatataagcactgagaatgccttgctacagggaacccggtaagttgtcttggtgaagtggtcgtggaagttgtgtcttctcataaaagagctactaattttttatttattttcaataatatgtaggagaacaagtaaaggtgttgagtatttagttgaagcggcagcagccgaagcagaggcaattagtgccacgttggctgctgctaaagcacgtcaagtcaacggagaagttgagctacctgacagagaccgtggttcagaggcaacccctagtgggaagcaaatatctaccttaatcaagcctgattctgcaggggcaaatagcattcctccagctggagttcggttgcatcacagagctgtcagtattacttttaggttgctacttgatgctgctatacttcatattctcacacatacattttccaggtggttgtagctgctgagactggtggagctctaggtggcatggtcagacagctttcgattgaccagtttgaaaatgaaggcaggagagtttgctatggaactccagaaagtgcgactgcagcaaggaaattattagatcgacagatgtcgatcaacagtgttcctaaaaaggtatagcatgcaatcatgttgctcattgacataccttatgaagtcactttttgccaacttacatgtctgtttcttttctaattcaccttaagattttcaggttaacatgttgcatctcacattcccttaacttctaaccctatgtgatcatgctggacactatggccctgagattttaatgctatgaaactctagttaatgacttgatgtttctcttaaaattcaagagttatgtattttaaactaaatagtagtctcactcatgaccaagtttgtttgactatgaactaaacattttttttaagaaatgcaatggatagatgcgtttgttgactctgcccagtgggacgcactgggtcaatggttgtgatagtacagatgcattggtccttagggaagcttcactttctttttcattctttacagttactcgaaatgtatccaaatgaaagcgcgttgtttttttttctaagttagttgtaatctctgagttgtgagacttggatcttctttggcctaggtttagagaaaaatagtgagttacttttcctttggtggaatgattaaattattgtttattattaagacttaatgtgtatgtgtaagtcctattattgtcaagttttgtcatttttaatgagtttcctattttatccttcaggtgatagctcatcttttgaaacctcgtggctggaaacctccagttcgtcgacaatttttcttagattgcaatgaaatagcagatctatgtgatagtgctgagaggatattctctagtgaacctagtgtcttacagctaagggctcctattaagatatttggtgatttacacgggcaatttggagatcttatgcgcctttttgatgagtacggttcaccttccactgctggggacatcgcgtaagtcattattgttcaagcaattttgcgtgaagcctgtatttatgattcgaaattcaattttttgtcagttaggacaatccttggtcaacatgtttcatctcacctgataagcaatgtagccatggtgtgctttgtttttgggatttttttctttgaattttgtaggatttctttgttgtcttgccggtcccaactttataaatcaggcatttttattttatctttttggaggtcttgtgatactgattgtttgtgaatggactcagatatatcgattatctcttcttgggagactacgttgaccgagggcaacacagtttggaaaccatttcacttctgcttgctttgaaggtattatctgtattcttcttctattgttgcttattattattagattattattcttgtctaaattattgatcttgcaggttgagtacccccaaaatgtacatttaattcgtgggaaccatgaagctgcagatatcaatgccctttttggctttcgaatcgagtgcattgaacgaatggtatatcttagttgggtagtcctcataattttccaattgacttgttaaatttacttgctttttaatatgtgtacagggtgagcgagatgggatttgggcatggcatcggataaatcgcttgtttaattggctacctctagcagcactcattgagaagaaaattatttgtatgcatggtggtattggtcggtcaataaatcatgtggaacaaattgagaatcttcagcgtccaattacaatggaagcaggctcaattgtgctgatggatttattatggtgacttgcctatgtttttcatattatggtgtttgtagaaatgttgtatttttttaagaaaatgtgatttgcttactaacattggagaatgacattttaactttctggtcttccctaggtctgatcctacagaaaatgatagtgtggaaggactgagaccaaatgccagaggtcctgggttggttactttcggggtgagtttggttacttcattcaaaatgatgttacattcatgttctaaaatttatacacatttaaataaaacgaatgcaagtgcattagtctataaacatgtgtatttattatttctaatttagttgacttgatgcttttgaaattacttatgctttgattattctgcatatctaagataagattttgttggcttaatgatataaaacaaagtcatttaatggcggtttactattgattcatttgtgatcatcttgcattaactgcttgtcagttcttaactcttatgttatatgatgtccgtggtaacatttgtttccttcttaaaaggcctctttcactgatttttatcaggattggtagaatatctttacgtttggtgttaatttttgtttgtgggtatccttcactcagtttttcatgtaataattctctattgttgtggcaagaagtttgagagttcttttcttttcataaaacataatctaaagaagtatgcatttttcagcctgatcgtgtgatggagttctgcaataacaatgatcttcagttgattgttcgtgcacacgagtgtgtaatggatggctttgagcgttttgcccaggggcatttgattacgctcttctctgccaccaattattgtggtatgttcttggagtcaacacattctatgcagcattttgagctcttcatgaattaagtgtttcacattgttgtttttgacaggtacggcaaataatgccggagcgatcttagttctaggtagggatcttgttgtggttccaaaacttattcatcccctcccaccagccatatcttctccagaaacctcaccagaacgccatattgaggacacatggatgcaggtattggattggatataaagcttatgttaggtgctgtagttgtatctttataactatttcatgtgagcgttgaataatttttgtttggtaaaaactatcaaaacaggagttgaatgctaacagacctcctacacccacaagaggccgcccgcaagtgacaaatgaccgaggctctcttgcttggatatagttgattgttccaacgatttgattcaacgaatttattcagaaagcttatacttccacctggggtttctggtttcctgtatagagcatatggtgccacacatgaaatgttttccagaaatgggatgaaaggctttttgagtttttggtttcttgccactcaattggtaggcctttatagatgatgaaaagatgcaagtttcggtcggagccaggttgctgccggcgggtaggttatttttacatgctaaaaagttgcagttgatccatccactctcacccttgtaaattgagccacaggcaggtagaaatcagtcttcgatgctcttcctctggattgttagtgcgctgagtatttgtctcattaatttatatatttttttattcctcgtgttaggcctattaatttttttcttcttcatttctttgcttctctttttgagatacataattgtggtgagatatataaaatgttagaatccttgtgagggtcctttgtatcatagaggtgttgctttgtgtatttacatctctcttgcttctgtacaatgtaacatttgtgtgaagataagccaccttatttttgtccatcacgctgaattattggcaagttttggtctgtagagaaaatatggtatgaatcttttctctgcctacaaaattacttgatgatgtttttggatttttgttaatattccatttagtttttttttgtttttggctgatgagattcgactgtcttgatttatttttgtaaaactcagccattttgctctgatctaaattaatgtacccgctaactaaagtgaacattcacatggtagtataacatctgactaatgcgccatataatatgacgattctcataatgtattatgtatattatcttgtaataattgtcggacaccaaaactccacactaacgttgaaaagaccagaaacttttaaaattccagaagtatgttcttagtctgttggggaaatgaaatatcttttggcacttcactagtcgagcttaatgc

SEQ ID NO: 42578 - DNA, 3871 bp, Cannabis sativa
ttaacgggagatcaaaggtaatcgttaaatttaacagaatattcttttattttttaagtatattctgttaaaccaagaaaagaaatgccgttagatagacacttttaatatataaagatatcaataataatatgctaacaatattagaaataagaataaataaagaatgagaataatttacatgaacattacattaaatttaattgtataacttaaactttataaacatatgagttgttcatgaaaaaaaatcatattgtaaaaattgatattttttaaaaatataatatattgtgatttgaactgcgattattaaagtcaaaactgcaaaccgtaccatacagtacagtttgacaaatgtaccacgtgtaaacggtttgatgaatactctaacttaaatcccctttcccgccctggccttgcggcttagtctatggagtctgagacgtatctaatagacaatctccaccaacaattaaccctaaatcctttcattgtcactatgctcagttcaacaactattagtttgcaacatcccaagaagatcgacaatatttccgaaaaagaccataaaggtttggccaatatcttctaaatttattttaaatcaagtgaaattttgtaaattattaatattggttttagaggtgttttttttaagatatatactggctttaaaagaatctattagaattatttattttcatacgatgtagtatattaaatccaaccggctaaaatgaaattgatttattttgtgaacgtggggtgggattacaataaaaatagtataaagtccactgcaaattcaattaagtcaactcgatttaagtcatattataaggccaactgccacgccggccaatacttgtcattgtattttttttttttttttggctcaaatgggggtagttttctaagaacaaaaaattaattgaaattaagtaatggcaaaaacaataaaccccgaaaaaacaaacaatttatatattttcaggaaaaaaaaaaattatatatatggaaaatcttgaaagcaaagcagctaccttccagaagttagcaccgacactgcagacgagtacattgacgacgtcgtattgcaattactattatcatctcctacactaaaagctgcaagctgtggtgccgcgggatcatcatcatcgatggacaataagtcaacaacgaccattttcgtatctggcggttcttcaaccaccactcggccctctaacatctccaacacttgggccatactgggcctcatcctggcccgttcttgtatgcaccacaagcccacataagccaatctcatcacctccctctcatccgcccctcgcccaccattctccgccataagtctccggtcaactacttccataatcttcccttccctcattttctcgctcaatatcttaggaaaatactcccattttttaatgccagctgccttgttgtttctcctatcagctacggtacggctcacggtgttcctgcgaccgccgatcatctctaacaaaaccattccgtagctgtaaacatccgatttttccgatattccacgttcgaggagccattctggagccaaataacctcttgttcctcgaattgtggttaagatttgactctcgtccttacccattagcctagagagcccgaaatcagcgacgattgcgtgaaagctttcgtctaggagaatattctccggctttacgtcgagatgcaaaaccctagatcggcagtcgtggtggaggtaggccagcgctttggccacatcttgggcaactctgtaccttaagtcccaacacaggcaaccttctcggcgattggtgcgacgggaaatatttctattcgggttgaaattgttttcttcccggggagggaagatccaagcgtccaaggatccattggggaggaaatcgtagactaggtaccggggacgaccggggactatgcagtagccgaggagacggactaaattaacgtgttgaacactagcgatggcggcgacttcggaccggaactccttgtcgccgcgatcgaccttatcggttccgttggtaccgatacatttaacggcgacggaagtaccgtctgtgaggatgcccttgaagactgtcgcggagccccctctgcctatcaatgcttgaaaattgtcagtggcttcttcgatctcattgtaccggaatttggttgggacaccggcgactttacgaaggaaactgtactcgatccggagctctcgaccttcggagacgtgtttcgattctagctgctttcgagatcggttgtaatggcgtctgattatgagccatataaagacagcgataattacggaaatagcagagccgcagatgagaaagaaggccttggataaatgaagagtgattcgagttacgatgatcaagaggagcaaagagagtactgttgaaacagctattatgttagctaaggcgtcctccattaaagctactcattcttgtttcatcgaggtatatagactagggagagaagagatcagaggtggaagaagctcaacctaaaacacactctttttgtattaaataaaaaaaaatagaaagagttataaatcaagttagattctttattttccttcctttttctcgaaaattaagtgtggcataacatgcattgaaatatttgacactagctgattgagattcagtatatccagatcggccaagagttgaaaaacaaggcagtttctgattttaataaatggaatcaaaaagaagaaacataaacctaatatatatatcttcggattcagtccatttctaaaaataaatctatattgtactttcatctaaatagttaattttatttttaaacgtatttagatctcttatttttggacttttatatggtcaactcaacgattttgtatcataattcattttgttgacaatatgagaaatcattttcaaatgactccaaagcttaatgtcaccctcattgttttaattttattaattattgattataatttgttttgaaggaagtttataataataataataataattaagttatatatattgcccacatgcacatgcatgatgcacatgtttgtcttattttttgctatataagctctatctatcgacctagtcttcaatcttcatggacgtactcatactgtgtatatgagtataaatgcatacatatactaccattgaattttgtttgtcttagtgaatcccaatatatatatgaattatattccgatgcttattacttgaaaattgcagatccattatttgtaagaaattaacaataattttaacacgaccctgcatgagcctcaatttaaatatatattagtagaaggtgctcatatagtcaacatcaaacattttttttgaaaaagaattaaagagtatcgaattaaggatcgcgaattgcagagtagaaaattggataaattaggtattaaaaaagatttaacctctattgcgcgttactccaacgcatatagaaattaaaacgctcctaaatcgacacgctttggcaggaccacttgtgaagaatatatatattgtgaaaattcaattcaatatacttgaagtataattaaaaatttagaacaactacttgttcaattgatcagaaaagtcttgaaaggctatatttatttgaaagtgttacgatagtgacaaagtggaaagaaaggagaaagagagaaattgaaattcattgattaaggaaaaaggaaaaatacaagaggtatttatacagaattgagacaaggaaaaacagagcaaactaattaactaacagcctaaataaacgggaagtaataactgaattaacagacaaacagtaacagaaataataggtaaatctaata

SEQ ID NO: 42579 - DNA, 3934 bp, Cannabis sativa
gcaaaaatactaattaaccaaataaataataaaaaaaagaaaagactttctctctccatttgactcactcttgttttctctctctctctcatctcatgtcaccctcactctttttatttttattaataatttaataataacaattaaaataagtgttgaaagaaaatgaatatataataataataattgagattctctttctctttctctcttcctcttctttagctccattcatctataaattagtagcaacccttattgacaacctttctttcctgtctcacaccaaacattaactctccaaaaattttctcttctattttctattttttcctttcattttttttatatttctttttcaatattttttttgtttcacatataattatacatactctccttaaattatacaaggttgttttgaaagagttgagtttgagctatagctgtacagagttaagctaaggtaataaatattttcctttttttttttaatttttttttatatataatttgcttagatcttaatcttagtaattgttcatcttctagatctaaaaaaaaacagatttttttggcaaaaatagaaagatttaacagatctattacaaattagcaaaatagtaaatttgaaaaattttaatattgtatttgtttgaccagatcttgtcaaacgcgtttttcgatatttgaagagagaattttttttttaattaatcaacgaattttgtttttgacttgctaattatggtttttaattgattaattaattttaattttttttttttttttggaagaaagggatgaagcagtgtgtgattcaacaaaaggggttttcaatttgtgaagagatgagaggctcttctatggattctgttgtttgccctaaacctcgtcgtcctaccctcctaaactcaccgacgccggtcagatctttccgatggcatctcaagtaagttgatttttagcagaatttaattttttgttggagaaaaaaaatggaataatattaatgatttgaattaatttttaatttcagttaccaatcagagctttgtgattctaaagctgggactgatctctttgatgccatcctcacaaaggttagttctttgatctgcctgaatttttttaagaattattatagctaaaaatcttgtttttagggttagggttagggtttggttgttgattgtttgttttgtttatttgcagggtggttatggtgttgaaccatctagttatacggcccaagtagcctcgtcgcccccatttttcagcgggtcgccgccgagcagagtagctaacccattaattcaggatgctcgattcggagatgagaagttatccccattggctgcgtcgcagccaattcagccaccgtctggcctttcttccccgaggaaaggaggctgcgttcggggcaattttgggaacaaaccaactgtgagaattgagggtttcgattgtttggatagggatagacgcaattgcagcatccctgcccttgcatagagcttgatccatctccaaatcgagtaccaaaaggtgtataggaaacaaaactaaacaaaacaaaacaaaaaacgatttaaagttcggttatagaaaagcgagagagggaggaattttgaaactaccacgcggagggaagaagaagaagaagaaggaaaacagaagagtttgggagatccttttgccttgtgtaaatatgttttaaagggttctctttagagaggtaaaatttgtgtcaagaaaaattgtctttgtatgtaagtaaatgagtttcttcttttattaactaaataatgagagaaaaaagaaagagtctttttagggtttgtaaggtgtgggtttgggattgaaagagaaaaaaaaaaggggtcttgtattgaccacacccatctctatatattgtaaagtatttagtagtctttgatgggaatttttcattgtatctctttgtttttgtttacatggggtgctttaaaagtgttccaatgagcaacttgtgaaaggaatctgtataaattaaagttgctattgagtcaaatttaagcagtcatttatgaaaacttttgtatatattacatttctatttctcatcttcatcatcatcatctcctttactttagtttaaatctcctgaatctgaattattataacaactacaagcaagtttgtttactttgtcatcaagtaaaaattgccatctttcatctttttttgccttttactttgaatttgatcttgtgggaatcttaagttatgatcttattgtgttttccacaagctttttttttaaagcaatgacaccaaaagtttcatttgatcagcttttttaaaatttgcacctttattcgtttaggtgggtaagagcatctatagctctttgtccagttgattgtgcatatctcattttgctcatctaagcctgcaaatttttatggccttggtttttcaggatgtccaatcagaatggaatataatatatttttttcctcctttgtgggaatggtaccattcttctttggttttgttttatttgtagtaagttaataataatttcccattattaatttgtcattagctcacaaaattcttgttgtataaaattagggaaatttatctagtattcttaaaaagatattttggtagtttgtttatctgtttcgatattcagacaagttttttaatttttttatataatcgtgtattttgtagctatttagaattattgtaaatttttaaaaaaaaatttgaattgaatagaatagtttacaaagataaaaataaagttcaaacagttacttactatgcgtataaaaagaactgtcacgcatacaataaaatttaagtcttatttttggcattgtaaactacttaaaattttctgaaaatttacaggtgatcctaaataattataacgtgcacgattataaaaagaatttgactaaactcttttttaaatgccgaaacagataaaaagaattgtttaggaggtgtagtatagacaaaccctaaaattagtatgaatcaattaaaaaggtaattttaatacaaattttgttttgtttaaaggaactggctttggaaacaagaagaaaataaattgtgaagactggttaccaatttcagtttgattatatatacttttactaatagttgtcaacattggaaagcaaggaacatttttctcttatagatcgattacaactatttttcttgagatgaaagcatatttgtcatgttcttggaacaagttctacactttcttaccaattccttttctactctaaagtctaaaattagcttggcaagaaagtaaatttgactctttggtactgttttttctattaaggtcttattagtttatagatccataaatcttgcattttaaagaaacttcttgtaattttgtcttgttaaatgaaaattgtttactttaaaaaaagggattagtttttaagaaattacaatattaatcattctcaatctctaaactatttcaagccacgtgacatatttaaaattttgaatgaatttgtaaaatctatatggttaccaagtagcaatctttgcaaatatattgattaatcctaatatgtcatgtacttaacttgaaatagctagatttaggttctcaatcccccaaatagagtcatccccttttaggttcttgataacagtctctgaatcactctccaccaaaataaaaggatgaacaatgagaccgccgtctccatggctaaaagacatgtcgcagtttctccaatgagtgggtcagagaagtgtagcctttttgtcgccacccacagaactgattcgttatggtctttcgcaatcgccacagcacacatagtttcacctccgactttgacatcgcagttgattttaactcaatcttccggcggcggagaccaaacctgagtcc

SEQ ID NO: 42580 - DNA, 3990 bp, Cannabis sativa
ttttttttttttttcttttaatagtatatgttggtgactgttttattttttgctaacaatttttgtaacagtgttactttgtatagctttatgtagattttatgagttccttgatatgcttaaggattgctttataatgttgggaagcatacgccttatgtgatattcaaattgattgttggtcaccataaagaagaaagctggaagtgttccttgttagtttagaattttctctcttagattgggatacagtagtatttgtgttttattatagataattaggtgctttagcggttaccttagaacgttttctatgctggctgatattgaattttggagttattgttactgttactaattgacattatcttgatcagaaaggttgcatttcttctaagtattgtaattttcatttctaaggacaatactttttcatctataggaggttattccatttgtaaattgggaggcaactgcatttagtagaccagtgcttgcagttttggtttttgcttctgtttccatttttcctagcctacttctaccatctacaccatcaatgtgggcggctggaatgacttttggttatgggtatgggtttttacttatcatatcagcatcagctgtcggcatatctcttcctttcttcattggttctcttttccatcataagctgcaggtgtgttccttgtgttgattctctcttgttcatacacaatgttctctcgttggcatcatctttatgtaactttcttctttgtttttttgcctattttgtagggttggttggaaaagtatccaaagaaagcttcaattctaagatcagctggtgaagggaattggtttcatcagttccgagctgtagcattgatcagggtttctccatttccgtacatcatctataattactgtgcagtggcatcaaatgttaaatatggtccatatctctttggatcgttggttggaatggttcctgaaatttttgttaccatctacacgtatgataacttgtcctttaagcttcaagctccctctatgtttgtgattgcgtagacataccttatatgccgttttgcgtgtgactaattttttgcttatagaattctattatcttatcattcatgaatcatgacatcaatatcctaagtccatatctctgctaaacacatgtcgtgtggagaaacatatcatgttacacatattttatttgcacaaatgtaggatattgctttttgtagatgccatcattgaccatttttgacattacattcattaacatatgaataaataagtgttaggctctcttctcgtacaaatgagttcacataggtcagggcattcttatatattcttaaagaatatatatgtcgttttgtttttaatacgtgctttctctccaatttcatactataatttatacagttttcctattaaatttggaggcaaaattcacaatgcttaatcactgcacttatgttgtgggttgctcgcacttgatctaattagttttatctccttcctcattccttctgccgccgtggttgctgctatttttttttttaattgtttttggccctggcagttcgaccgggagacctcccagttgtctgcacctgaatctaatgcacacctttgattactaagaaataagaattctatacactttttttctttaaaatattgatcaaactattatattaactgcatagaacacactggtatatcatactcttccatttccttaaaccagtgaaatgtggtttaaatgtttttgataagaaacttatcatttttgttccattgcagtggaattttaatacgaactttggcagatgcttcgaatgatcaccatggcctttcagcaccgcaaataatccttactgttgtaggcttttgtgctgctgcagctaccacaactttcttcacagtgtatgcaaaaaggaagcttaatgatctacagacagaagatgatttactcgtgcagtaagctctcttttttttttggccttaggaaaaccatctgttatacacgaaactgaccagtgtctctcttaacgggcatggcgaatacagagatgaagtttcattattaaacaaacttcatccatgacaaacaggggttactttattataatgattgtatatataaaaacattgaggaaaggacatacagaaggaggaggaaactagacagttttgacatgattgaaatatgtcaccaatttattatgtcttctttcctcctctagctatctgtctttggtatctatttggtccccatgcccccaaacccaacccttttctctcttcctcaattattacttgtatatgattgaaatcttgctttctttttttgtgaaggaattgaatttgactttggcctcattcttaactgtatataaatgtgttgtttttttactacatgatttgataatgagtaagttttttggggtgagctacttgaggaagtccaactcaattgaaccactttagcttgaggcttatctacaagtagttgtatcttataaatgaaccagggccaatggaagagacaaaatcagaaatctcagtgtactgcacacgctcatgtgctttttggtcaaaactgagttgttagttttatacaaaagctttaccataatggcatgatgaatgattattatattatgtattggtgtacaatgtatgattattttatgtacaagtgattgaattatgtatccaaaatcattggatttctacttctgcagaagaatctttgctcggtgacccatgttctggttgtatataaactaacataacaattatttttctattcaactaaataagagtcttagcaaaaaaaaaaataaataaataaataaataagagattctcttcaactataaaaacattgtctcttggtacttctacttcagaaatgataataataataggaaatatttcagatacttttaggcagttgtataaatgggttggtattaggtacaagaactatgttgaaaatagcaacaaatgtatccatgtaatattgaataagagtaaatataataaataacatattgtttcttaatactatattatttatttaattgttaggaattatactttttaattaattttacaaatagaagtacaattaattcttttatatcattaaaatttttataacatacatttcaaaaaaaaaaagtagaacacaattttattgtttatttttaatttttttaaaaaatttattagggcagggttggctatgggttaacacttgtactaaaaagtagggtcgttgaaaaatcgtaccctaataacatgcaaaattagcatcaatctttacttttattatttatttttatctcatttttattattttataattatatttagttgtagtgtaaataataatttttttagggtaaatactattttagactatgtgttttgtaaaagttactaattggaccctctattttgttgtatgacaaaatagatcttgtattttttaaaattgtaataatttttttagggtaaatactattttagactatgtattttgcaaaagttactaattggaccctctattttgttatatgacaaaatagatcttgtattttttaaaattgtacaaataggatcctgagctcaattttcaacaattttattttttaatataactaactttaaatgtaaccaattttatcataatatttttttaatcagattattatttttattttgataaaaaatcaattcagggtcttatttgtacaattttagaaaatacatggtctattttgttatttaataaaacagagggttcaatttatattttttgtgaaacaaaaggtccaaaataatatttatccattttttatattaataaaattattgctatatatttttaataaaatattaaaggagtattaattaaatattagggtacatttagttggaagtaatgaaagaaatatgaatataaatagggatata

SEQ ID NO: 42581 - DNA, 4703 bp, Cannabis sativa
  modified_base (4161)..(4161): a, c, t, g, unknown or other
gttaccaaacggcaccataattaaatgacttgaagatcacttgtccaagaaaatggtttaagaaaagcttttcattaaaacatgacattgagcaaacacatatcatttttcatcagcagcaagcaatgaggaattatcacgagataaaaaaataatgaaaaaagcctaaaactgatttctatacatccatggagttcgatcacattatcacaaacagattaggacccagcataatcatccattatcaccgatggattaagaacgattaatcaagtatcgatgagagaatggatgtcagcagccatgaacaataccaaaatttactaagcggaaaataaaagaaaataacaaactatgggattgtcattgaaagttccaaatccatggggatagacataagacattgtactaaaacttaacaagtcatgatccagatgcagctttttatatgtcatatgaggaaaccatagcaacaaatccagtgtttttttacttccatttgcatcttctatcattcccccatgctttcgcttctattcaaatttcaaacactgccaagttaaatgaagaatgagtagagtgtgttcaataccaaccaggaggaggaatgtaaaaaatggattaaatataatttcatattataaataagtaaatcctacaaaatcaaaaagagagataatgcaatccatacctaattgtcgtagaagcgggaacgatgtcttcgagaactgttatagcaaaaagagaacatttcccgagttatttcagtaaaaatgttgcatggacataaggcatatacaatcttgagatactagaatgattaggagtacagtacagatagtaacataataaatcacaagtgcagattatcaaaatcccttaattatgccaactaagaccatgcagttaaagatatcaacatgatcaggcataacatcaaaagaaagaaaaaaaaaaaagaaagaaatgcagaattgattaagtactacaaccttcggtgagtggagccactcctcgagggggcatttgagcttataaactcgtcgtcagtttcgtctaccctgtactctgcaaattctacagatgccacagaaccctcgtcggaatttgaagtatcataacttgatctgcgactacctcttcttgcatcactaactcttgaccttcttttatttctggaattcctgaacttatcaaacacctgatacaagatacaggaggtccaccagttacctttattcccggggaagtcctcgaactcatctccagtttcatcatcgccatattctatcacatagtctcctagaaccacaccccgtgggacttctgaatgaatggtgctcaaaacatcaataatctcagaggactgctggaagttttcccagtcaagctgccttgcaggatcaatttttgatggtcgagcatgagggtgctccttttgagcatgtttctggagttctgagtacgtgcctgtaaaagtacaccgttcctcatcacagcaacgctttttctcatccagatatgaacggacctcatcaacgaccatccaaccagtaacatcacccctacacaggggacagcttgatttggagttttcctctgaaaccaaaggctcagtgttttcctcgttaactgtatcaattgtggatgaaggtgacatcccatatgcacttttaaaacgatctaaacagtttgagtgcaagtggtttgtgtcacaaacaaaaggacggcatcccttctcataagatgagcaatgaagaagtacaccattgtgaggaaaatccaaacatatgggacaaatcacatcttcccagttggtaatcaactgaatctcatccatgtcagatattttcagttgaaaccttctagtgctataactgttgaaaggcatgactggtctaatttctataagatggacaagagcatggcctgtgttttgcacatgtatcagaaacaccaagccaggcgatcggctagttaccagaagaaacagcaatacctcgatccagtaaagaacactttcgtataaggctgcatgttataaatagataatataggtttttaagtgtaagtgagatgtagactataaacaggtaaaatattatacataaggcataatactcatgttgttcaatcaaagaatatttcaagatgccagttaagtataaacgaaacctactctagctcagtctatattagattagaaggaaacaataatccaacattcagatttggggagggaagaagtgcatagcatcattcttcaagttcaaacaatgaactagtagtcaattccaccatttatacaacaaaggcttctaaagatcctagtactcctaaaattaattgaaaacctttaattgaatttcttttgttaaaagcagtccctgaatatcataataaaattaatgaagtggttatcaagacaaaactagttctaattaacacaatatctatagaggaatgatccctaaattctccctaagattagaattttggtcattcaaccaacctcaagagccttaatactagttaaaatttctttaacaattcacatctctttttcccttactagatgtgccatttccacaaatttcacagctttattttcaacagaggcaaaaatggtgtcagcacatattgtcatattttgactaaagtgaattatagaaagaagagtcaaacacaaccaaaacagctaaaacaaaagataaccggcaatcttaatatcttttgcctgctcatcaagagcaatagttttcagcatgaaatcaattaactttttttcctttggagacagacaataaacccaaaaacaatacataggtcggtccactggatggaaatctagtcaatcaatccaaaatcaaagatataaacaaaaaagtcagctttcagaaaccgtaataaaaacaaaaaataagagaaactgaaatgatcaaattcactcacaaacaaacgattcatgaaaaaggttgtgatcaaaatcaagaactgataaccaaattgatcaattcacaaacataggttatcattaaaaaaataaaaattagataaaaacaaccaaaacatataacacaaatccaaataaaaagtgaaaaaacaacaaatgggtatttcagtaaatcaaataaatttcatctttacaataataattaaaaaaaaaaaaataacccagaagaaaaagaaagctttgtctcaccttacataaacgtatatttatgtataacctgcaatagaaaaagaatcccagaagattgaagaggaaaagatggtttgaatgattagaagagaagaaattagggaagttcttatgggtattatgtttggtttgattgtgtgcgcctgaagaggtcagttttttctctgaagactctcagagagtaggtagggtcccggggtcccttatctttttcttcttcggttccctttttcttttttccaaaaattaaaaacaaaacaaaagacttaatacgaaatgactaatatacccttcctcgttgaccaaccttcacctgtaaaaccttctcatctagtttggtaatttggtccgtacagggttaattaaatgttttctcgatttcataaaaataaaataaaaaattactcttttttatttttaattagtgaaaaatgaaatgaaaaactaactgcagttcagaaataaaagggatttttggaaatagtcattaaccgattttattttttctgttttcggaatctaatttttttttttttgaaatggagaaaaattattttctaaatatgaaaaactaatacaaaaagattaatattaccattaaatctcttgtgggtgaaagtattgatattaccaatattatatcaaaatttcattttctttgactctttctccatattcaaaaaatctccttttttttttatttgccatacaaataaaataaatatgcataattatcaaaagtggtgtatgaaattaattgttttgaatttgtaaaaaataaaataaaaaatcttaaataaaggcacaccagccaagtgactatataaatagtcagccacttttttttatataatgtaatgacttttattaaacgagagacacttgttctacatgccatgtttgcaattaattacatatatagggatatgattttgtcccgttattgtactttcacggantgtaatccgtgatgtacggcagccgtcagataatagagttatttgatctgacggctgagattgatctaggggtaattagggttaaaaaatagaaacgtaccctaacactcatttaatgtaccatgagacccatctaatgtaccacggaatacattccgtaaaagtacatcacgggacaaaatcatatccctatatatatatatatttatataaataaagtgggagaaaattaatgagagatgacgataagtacatggattttggctatatatatttcctaattaaaatcctattcctattattaaaactattattacgttttttaatagattaaaattattattaattatcatattttaaattttaaaaaaaataatataagaaactatttaaaaatttaaaacaactcccgcataataattatagaaaaatctccaaaaacattttatttttttgttaatattacaaatataagaataatcataaacacgacaaacgatgcaaaaattgtggtaagatattgataaataaccaatatctta

SEQ ID NO: 42582 - DNA, 3879 bp, Cannabis sativa
  modified_base (2570)..(2577): a, c, t, g, unknown or other
attttaaaataaattttcattaattatgatgttggacacttgtccgtactcttaataaatttattatgagagagatttcttctttcatcattttttttcttggcaaataataattaaaattttctccgtcttttcactttttctttcttcagccatacaattaattcatatcttaggctcaaattaatttgtaatgtactcacaataataattccctccaaagaatcttaattattaatccttttagctgtaattagtccaccacttatcgtatcgtaatcgtatccaagtctgagtacgagtatcgtagtcggcagtggaagattcaaacgcaaatattaataaattaatcaaacaaatattaattaaattaaagagaaaaagaaaaaaatttgattaaaccgtccttccacacaataataaatttatttatttatatatgttatatgttatagttagtgtgtcaacaatctcgtgttccaatagggagagagtcggtcatgaagtcccacctctcctcacccttataaatatcacccttccctaacctttttatctccacccaccatttgagctagctcttataactcattattattaaaaataaattacaccaaagttattattgtaataagtttcattttttttttttctaaactattgataagctaaagtagtagtatttattttccttggttggagttcttggcgtgatgatttaaaagtaaaggagaatctgtaaagctcaggagggatagcgccgtgactaacttatattgtttacaaatgaaaaataaaatgttttcaaagaaaaagttccatggcgctatctatcctgagtttcatggcttcttcttactaaatcagtctctaatatgtcaacggcggtggggtttcctttatttcattctcttgctattttaataagatttattttttgagttaataatgtttagattcaagattaccttggattatatatgcactactgttgttgttgttacttgtttgtgatacagctgttgatggtggatgtgactgtggttatggtgaaaagttgttatgttctgagtctttatgttttttgtctccaaaagcttgtgcaaaaaaataggggtaagctctttcttcctttgacgtcgtccttgttcaacggtatatatttatttcatgtgatgtggggatatatataggattttctttaacattttttgtttctttcttttatatccatatgcacatacatatactcatactcatacttatattcctatgattctttctatagatcttattttattaattttgcttaagctaagataaaaatatataaaccctaaagtgatcgacgtacaaagttgttatgactgaaagagaaactagatttcttacactgatctttaataagctctttcgctagctagtactaaatatatatatatatatatatacacacacacacatagtggtcttaatatctatttttgtttcttgaaaaaacttgataaatgataatatgaagcgattaacttgggtcgtactatatactactttcttcttattctttccgggaacagaaaatgttatcctatggagattaaacgtactgtgttattttctattagatttttgtttttctatttttatttgtggtgtttttattgggatcatgtgttttgtccagatgaaaccctagctattggaaacagaattttctagcaaaaagaaaaagaagaagaagacaaaatagtgtacatgttttttgaaatttactttatgggaactttctttttactctggtattgggactttttttaaaatggggtcagatacaactttttagttgcagggtgtgtctgaaacaaaccctaaatatctcgttcagaataaaaaattgttagcagttgagaaaggtgagttagggtttttatgccttgactgaaacttttgcaggcttttcaataatgtggatgttgaccactttttcaaactttgatcagatcatggactcctcgctttttctcttgtgtacaaagaacccatatacctaataaaatctctccttccctccataatttcctgtcctgtttctgacccatacgaattaaatggccacgtgtcctctgcaataaactgtgtttccaaatttaatttaaagagctaaaaaaagcaaaaatatgtagtatacctattatttttttttaaaaaaaaatatcactccaataagttatttcaggatgttttttttatttgtttctgtattcaggtaattatttttttaatcaagattcttaattttacaatgcaactccttaacacagatatactaatgcattgacttgttttggcatctagaaaaaaaatttatttatttatttattttttttatattgatgtacgttataggtatataagctatcttacaaaattttagaaaatataaaataattttcaatatagaaaataatgttcaaacagtctattttacacgcctataaaataaaatagtcacgcgcgtgcaacacactgtttgaatgtagtttttggcatgttaaatttttttgaatttnnnnnnnntttgcaggatgttttaaataattataatttacatgatcaagagaaaaaatttaactaaaaaattatttcagtactaaaatagataaagatgtatcaatgtatttttaaaaaatttgactaaaattttcctaaatttttcttaaaaaaaataaatagtttttttaattggtactacactacacttataatgaaagaataattgctagtataaattaatatttgaattatatttttagtaatatattatttaattttttttttaaatttatatgtatttctaacatacaccattattaaagaagaaaatatttgttagatggggaaatagagtgtacccgtaaaagtaccctagcaaacacttcgcagtctgaatccaattaatcccatggatattttctttattctttggtattatttaattcaaaaactgaaaatacaataatattgaaataagaaacaagatgtaaatattctattggatgttcaatcttctttttgttaaatgaaaaaaccaacacaatttcaaaatatatacgaaatttttcggaaccacaaataagtatgtgaaaataaaatgtaactgatgataaatactatatataatatcttttttaattctataaatgtttttgtttttgaaaagtctaaaagtaactagcaatactgcaatcgacgttgattttttaacaatctagaatacacaataatacaaatgatactgtatatgaattaaaattgactttctcaacctagccatataacaagaatatcagtacgtactatttttttttttaatctaatcctatctttaatagagtactataatatatataagtactatattaccatatatatatgcattaaattattatataattataaattaatttttttttttgaacatattataaattaaatttaataatatatatctcagcttcgatttttattctcactatgtcatgaatattacataaaatttatttgatcattcatttggttgatgatgaaaaagttgactagatttatatagctttgcaattagttatcactttatttatattttttttttttttggctcacacagctttatatatatagttttgttgttgtgattttatccattcgctgtttgtaatggtagtatgtatcatctggttggccactaactgccacgtgtacggaggggatgaaaagtctttgttgcactgagaagattgatccaactttagggcacaaggtgtggtcttactgtatggggacaaagaaaccagttctcctgtataacatattatatatata

SEQ ID NO: 42583 - DNA, 2821 bp, Cannabis sativa
  modified_base (706)..(706): a, c, t, g, unknown or other
aaatacagggtccaattgataactgtaaaacagaggatccaaaatgatatttaccccataattaacaacaacatcttcataagtgttatcatttatggaagtaccatgtgttagtaatacttatacattattgacgaaacatatttcaatttaatattgcaaaattaaggtataattaagtatcttatgtaatataaataataatttcattatttaagattccatcgacaaaagtcaaaatctgaatagtcaatattaggtttggttaatagaattgtaaaatatatgaaattttatctcaaaattactgggctataaaataattagtagctcatgaaatttatatatcacattttatttccacgctaatagtgttagactaactttaatatagttaatttttttatttttataatcgcgtatgttgtagctatatatataacataattttaaaaaaatttaaaaaaattgaataatttatcgtgctgaaattaagattcaaacaattacttaccatgcttgtataaaaaaaatagtcgtgtgtgtaataaaatattttaacctaatttcggtattgtaatttatttaaatattttaaaaatttacggataattttaaatgactataacatacacatttatgaaaaaaagactaaaaaaattgttatgatgccaaaacgactagaacctctatttaagaatactcnattcaagaataacctctaatttattatataaaaaaaaattaaattccaatttgagcccgttataaataagataacccctaaattgtaatttataaatttatttatgtagaattaataattttattccaaattgtaatacatgtaaatattatatttactcaaaaataattttattataatgtagtattaaggattatttattgttattgtttttacattgatattttttagtgttttaaattttttttcttgtagtataactctatttagttataacctctcaattagaatataatttagttagtttcaagaattctaaatagatgttctacacacgtgaagtgaagtggagcacataagtttcatagcaaaaatgatggttagctcattctctgaaccagaatgatttataggtgtagtacactaattaattcataacctcaattatagaatagcaactactccattcggtcataattataaatgaaaaaatatatttcttataaacaaaatttgtaaatttataactaatgttttgacgtttataactatatagattataattttgaaaataatgtttaaaaactaaataaaaaaactatgatgttataaaattgttacaaactgttatttttacaagttttattttttttaaaataaacttttatagatagaaaagtcttatatcttatggtcattacaaaaagtattattaggattgattgaaagatcaattgtaccagttatatcattggcaaaagcccagcaaatcacgttatggattgcaaaattacaaaccctaaaacaaaagaaaaattacaactcaaaaaactacaagaaagcttattataaatttgcacatagttatcaatcctccacatggggcatgatccttctagcgccttgacaactgtttccaaatcactctcaattaacacaaaaggaaaattccaacacatggccttctccatggctagctaacacgtccctgtctctccaataagagggtcaaagaagtttagcatattagaagtcaccaacaaaatagaacctgtgtgattcctagccaaagccaatgcacatatgaatcgtaacctacatttacgtcacaattacttttgatccaatcatccggagaaaaggaccaaattaagggcttagcagtaaatggtaaagagaaaagacaaaattcataatctacctaacaaaaagatatagaatcaatatattatttaatgttacacaaaaaattattgggtatttctacaatagacaccctaaaattagtcatgcacccctaaaatcttgaatagtgattggttataatattgagtcatatggtattttggtggaatattacacattgtatatttatttatttgaaaataatttatttatttagtttttttttttttttttgagggaatggaagatggatttattaaaatattgaaaactgatatttggctatcgttatcaagtttaaagatttaagggagagactctgaacaatttcttttttatcttataatcgattttagtgcataaaagtgagaggtttattttgagttgaagaaattatttctctggaattgatgatagattgaaggcagaatttgtggtatcgtggagttacatgccattttaagtgaaattaataatataaggatatttatcttttcttcattaatctgtattgtgtcttgggttagtatttctgtcttcgaaaattaaatgtgtccatagacttcgagaggtttaaatctccatttcaaaatccagtaagtttcaattataaaaaaaaaaaattggaaaagccttaaaaattctattttgtctttctccaagaaagagacaaagagccataattctgcaccataaacgcattatttaaaaactatttgaatcatcaaagtttagaattaaataactgaatttaaatacaaagaaaactattcacctagagaataaaaaaacttcaataatcctaaaagaaccctgagtagtttaccagctattgtaataatgaagacaaaagagttgacagaccaagcatgagtcggatcaaatggccgcgctggaaaaaatgaccaaatggcagaggactgagaagga

SEQ ID NO: 42584 - DNA, 4254 bp, Cannabis sativa
tttttttttttggtaatggaatcaataataattttaataaaatatataattgatcatatttaaaaatatatttataaattgtttattttttttttttttgtaatctcacattgattcttgattgtacagtttatgttcttcaataaagattcaaaaatattcaattcattctagtgtccattcaatctctgtgtgaaagagtttgattaagtgagctgtgtgtgtttgtgttcttgtatctttggattgattcgatcacatcaattcacatatagaagaaaaacaaccttatatatatttttattctagcattaatatttattgtaataattggaaaatccaaacaaaataacacatgatattgcagtggtggatcatgatatcagcatcaagtttttgaaattgatgggacccaaaaccactgttaatagttccgtcgtattcgtattcatatcattatttcttttcttctatatatattgatatagtaatgataaaattattattacgcattacttaattggctagaacgggttgcacatcgggcactgtaatgggaaactcatcgatttcatcggtccagggattcttctccttggccggattaacagaacggattgccttccaaactgcactgttgcatttgaaacccgacccaaatgccatctgccagacccgatctcccctctggaccctacctttggcttccgtgtaagctaactcgtaccaaagagagctactagaagtatttccgaacctgtaaagcgtcattctagaaggttccacgtgccatttcgtgagattcaggttcttctcaatctcatcaaggacagctcggccaccggcgtggatacaaatatgctcaaaagctagcttgaaatcaggcacgtactgcttgatcttcatcctcagtactttcctccccactagattagccaagaagaggatttgttccgatactgggaggactaaggggcctaacatggtgatatttgtcttgatggcgtctccggccaccgtaaggagatcctttgagagcttgacgcccacttctccgttgttgtcttcttgctgcatcacgcaacggtagctcttgtcatccgcgcccttgtgtgtccgcaaggtgtgcatgagttggtatttggaatggcggcgttcagaggatttgttcgttaggaggactgcggcggcgccaagtcggaacaagcagttggtgatgagcattgacttgtttgtgccaccgtaccagttaagggtcatgctttctgtgctcaccactagggcatacgagttcctttggtcctaataataaatattattttccattcatcattccattaatagtcgtgtcacattaattcaaagaaaacacgaaacaatattctagatccatttcattaatttaatagtgattattgattaactcgggaccgatatgcccatgttattaatagacacgtatcgacacacaaatagttttttttatgagaaatgttaaaagggtaatattagtgctatgatcctaaatgtcaataattttattggtataattaagtatggtccatataatttattataataattttgatggagtataacaataacaataacaatgctttttttgtttattatttgtttgagtcaaagcatagatttatcattgactcccggttttgtaaaaggcaaataagtttacgagcatacgtcgacaatgtaccatgtgcagataattaattttccaatatagtattgtatatgtcattttcatatatagttacttcctattcatgtcatctgaactattgatgttgacagtactttactatggacggtcatgcttctatgatttgaaaatttatacacatgatatctcaaccttagccagacattactatatatctgccggactagccataaaacataaagagttccataaacagaaagacaatccagactagacattactatatatctgccatactcgttagcatgtacattgacactacatgcatgcttatattttcaaataaataaggctagccaataaataataacacagattatgacgatgttatctaatattttctatattcactaactactcaagtgattgaaatcatgatcagttttaatctacgtatgctcgaataacaatccttttatgttgtttttttaggtactacaattgtgtctcgtagtccgtattatttatttatataaattttattattatatataagtatacaaacctgtaacaatcgttttgcgaggtcaacagaaataattccagcgctgcaacccatcccaccaagactatagctcaaaatattccctctgagcttgtaacggttaacaaccatggctgaaagagatggtgtaggattgaataagctacagttgacgaccaatatcccaatatccttgagattgacttttgtcttagccaacaattcgtctattgctccaaacacaaccatctcaacctcctcccttgccttccccatcgttgccattggcaggtcctccagcgctgcctgtggtacatatgtcttttgtccgtagcctgacctctcaatgatcttctgctgaaaccctataagatcgtcgctaaaggcactcgcttgcacagtctgccgcatgaacgtctcacggctgcacattagggcaggcttcggcttgaagcaagcgaagtcgacaagataaacatctcgaggacgccatgagaagtagagcgtgataaggcacacagtaagggccgtgcacacaagagtaccggagacgagccctaggtcaaagtgttggaagagttgaacaatatcttcaagcgagaggtgacctagggctatgataagtggaagaaggaaaagatactttgcatttgagattaagtagtggtaaccaagcttgacgtacttgagtttcactgagttttctccattcttcatgtttcgagcaatttctttgtcgttccccattttttgttcgttgaacagtacaaaaattagtgagactatttatgatctgtgatgaattggatatatagaagaaaatggattaaagatgcaactaatttactgaatacgggagatatttatgaggttgttctaagtacactaagaaaatgttggtcaatgaaaagtacggtgaatattgtgctaatatgacaatggttgttatgtttttatagatgaagagaaggcggaaaattatgtaattgatgaggaattactttaaatttattgacattgcctactacctgactcgtgaaataaatgtaagccaactatcaccataaccatcgacaactaccacttgcactctgtaaatccaccgtattatacataaatatataaagagaattgttaaaaggttacattaaccataactttttttatccgtatcatactgttataggagtaattatataacttataaatataatttataaaaaatattattaatcaatcgccacttataaaatatatactagtcactacgggtgcatcatagtaaatgctcatataaaaatttatgtggaaatgattcttatggtagatataaatacgtgccagttatatgtgatttatatatttgtacactttgagaaagcgaataatttaatatttcagagactgcagccagggaccaaaactagccatactttaaataatattaaatatttgtgagagagcaaccttacactttagctaagagctattttctctaatcaaagtatgttatcaaaattttgtaaaataggagcgctaatgttaattttcttacaaccttttagttaatttctacgacttaaatcacgtaacaaaatattattttaattttctttatagcgatattcattatactattacaacattatccctataaatttttaaaaaataccaattaatttacaatgcgaaaaataaagttcctaatattctaatataccacgtgcgttcgaaaaacttcaaacttttttatggcactgtaaactatttaaaatttttaaaaaatttacagggataatattataactataacgaataccactataaaaaaaaataaaaaaaaaatatttcaacatgtgatttcagacatggatgttaactaagaggttgtaattaacactcctcttgtaaagtaataaaaaataaaaataaataaaaaaaaaacgtgacaaggcactacaaaaaaatttatttttaacaaaatttgtgactaaagataaatagttgtggttaattataaattatc

SEQ ID NO: 42585 - DNA, 14470 bp, Cannabis sativa
ttggttatgagtttttttcaaattttcggtaagcatatacatatatagaatgttttattttttttatcgctatatgtaagatgtttttggtaattatgtatataactaaaaattacccatctctaaatctcctaaattaaccaaaactaatatcaaatctctgtaaatattaaaaattattcatttattttgaaaaaattggtagggataacaaagcttccataaatataaccatccacacataacaatacatgtgcaagtggattgtcttttatcaaatggaaattgaattttgaaaagagaaaaaattagtattaaaaagcaaattgaattctcatgatctcacaagatagcaactccctaattatgtataaataattatgttgataaaaaaaaaaaaaaaaaaatctaaacacaccttcaacaataaaaaaatagaattgtctaaagagttgcttaggtggtgtaggatcgggctggcctaaaatgagttaggcttgctcctagagcttacctagccccaagaatcttaaaaggagaatttgaagaatattcttttttttttttatatatacaataactaaatttacttttaaataatatttaatttaagtatacatttttttttataagtattatacccaaattatccttacaccgtcacataactaaaacataatttcaaacataatagatttgtgttctttggagatagatgtgtaagtttgtgtggcgaaattttaattaaagaagaatagaaactatcgtgaagtgataaggataaaattagtagaatgattgaaatagagataaatataatagattttaaaggaagagtaaaaataaaaggtatcaattaaaaagataaatataatcctaaaagtattttttttctttgaaaaatataaataatttttaaagtattcacatatttcttttcatgggggccaataatatttttttgtcctaaggcacacaaaatttcaggccgaggctgaggtggtgggactaagtggaatgatgaagaggagatttcttattaagtaatatacccattatcacaatgacaagttatatgtatatttttttaaaattttgattggctaaaatggtagaatgggtcaatcaatctgacttctgacataataacttattgcaaaaactatcatgtcaaatcgtgttgctacattgtgagtgagtacaagacctattttatggcaacaacattgtgagttatttgctaaaaaggaaaggaaatacattagaaagaagatgaaacttgataatatatgctttgctattccaatatcttagggagagaaaggaacaagtggaaaaacaaaattgaaaaattacatgtaataatctactgccaagatcagatttgatttgagcctataaaaatacaaaaaccaacttgagaggaaatagtacaatcatatgtcacagcataaaatgaagcctcaaaaggccatgcctgcctgcagtcttacatgaaaagtgaaagagagaaaaatcgatgacttttcgaggcgttctattcggaagacagaatcaatatttactttcctgcaaaccactattcttcaagaacatttaaattgttctattttttttgtctatgttgtaagttttcacttgtagaaaatcatacacctaaagtaattgtgagaacagaagcctacttgatgtcatatagagatggtacaacccaattccttggccgcgacatcaagaaactgtgtagacctaccggttgcgagtcggctatgagcttcccatcttaagcatttttcaatatcagctagccagttaatgtcatctggattaaaatacttgttataagaggggtctcgagaagaaccgtttacttctactggtttagaattagttttgattgaaccagtttgcataatatcacgaagaactgatgtgctcaatgcacggacatgtgcacttggatgagaaaggcaccgaatggtggctgaaagacgacactgcatgcaccaaaccacacaaatcgcaaaacaaaagtttaacatttgcacgaaaaaacacaacttgctttcttttaggttcatctttgcctttcgtaattattgaatttaacgcttatcaaacacattggagagattattttattttaccttcaacaagtttgagaggccatcggcaactgccaacccagattctcccagctccagaacaggatgaacagctctagcagttgcctccaatagctgtcatattaaatagattaataaccagccaaacatttagagtgaaaaaggaaaagcacttagtaggcaatttaggctatgtaggcaattgagtgctaactaaggatgtcaagaatgatagtttacataaaagatagacatggatgaattaaaaatgataattggatatgtccaatcaattgaaacctcaagtgggtaggtacaagtttgtatttttagtgggaagaacaagccaaaaaaggaaaaagattgaaaagcaaattcatgttgcttagtccaggtagttgattgccatatagtactattgcctttgttaagtcattgcaaataaaaagtaatcataatttgttacctccaactgaggtaaagtgcaagcttctccatcaacaagcatcccgtctgtggcacgaagaagtagatcggatgaacttgccaaaattaccaacgattctaagctgtcatggtttctcatcagctcaacgatcagctttacaatccgttggttgattctccatatcttctggccatcatctttcgcaatccacggctgtaattctctttcagcctaacaagcacatacaggccatgaaagtgactaaacaattgaagtcattgaaacaccaataaaaccagaaattaagctaagctactaactatcaggcaactgactgccaacacttcctcaaaagcctttttttagcaaagaacagacagtgttgaagtcagtttaccaggaattatactataattacaatttcaattgataattacaaggtgaacagaaattggacctgaagaacaactgcagtcgaggcctttgttggtgaagcgattacaacattgcataatgcatcgactacctataaacatccaggataaaggatggtcaaatatagcaattttatgatataacaataatccaaatgatgaaagaaagaagaaatttattgatctaatgaacagatgtcaaaaaattatttctatccactccagaaatgaatacaaaattatttcattcattacaagtgaggcatgaaaacggctaatacacaaggaaacgagataaatatgttacctgtctccacccttgttgggcagaagtgctttcggcagtaggcttagtttctggagctgcaatcaacttgtgccataacagtgaaacaactgagaaacataactcttgcttctctgctagaactgatcccagaaacacttgtgcactgcaattgaatcctaggtgcctgtccttggtgaggaagttggctaaatccgaagcatctagagaaaagcttgcaatacctttccccgaagcacttcccgatatttcatttgaatgtgatactccctcagatttaagtttagaatctgcatttgttgaagtcttgctttgcgagaaagtaagcttccctgaaactgagcacctaccattttcatgttgggtttgctttttcccattcaaatatgtacgggattccttccaaactggtacatgtattagatgtgcttctaaaggctcagccttgttaacaatggatgcaacagctttgctgtgaatatcaatgaggttatacaatgacgatgctctgttgtatatttcattgtccaacttgcaccgcatcaggactgatagagcatgcatacaagccttcgaccgcctaaacaattcagaaacatgtgccgcaaccatagctgcagccactatctcatttgagctgtaactccatgatgttccaagtgaagacggttttagtgaaaatagtgcctccagaattactaagattctacgtgtgtgtccaatggctgagtcaatacttttacgaaattcattactagttccatttattttgataggcttggcatcattcttcccatccttagaatgtgaatgattaattcccttcaaaacaaaagggaataattgcaactcacatgaaagagcacaaacagcagcaagaacatacgaatcaaatgccgcaacaggtccttgtttgtttgtccttttagagcgattgtctctcagcttatcagatgcatcttgtgattcctcggtaatttcatcatattggtaattctcctctcgcctgggtttcttgttcccaatgaactgaacttcatgactgacacacacggttaacacaacaaataaaaggcgagaggcaagctctactgaggcacacgattctaagaatagtgaatgaaccattgtgcgtagctcagcaacagcaagatttttcgaggcagatcctaagctggaaaagtatctggtttttctgttttgttctgatgaagattcagatggaaaggttctctgaagaatcgcttccacggtggcaacaaaaattttcataagacatgcttcagatggacttccacgaggaagatattctagtactttaaggagaggtatgtatagattccacgacaaaacaggaggttgcaatggagtggcaacaatgatttcgggaagatcaaccgcagaggaactcaaaggaatcaagccgtaagcagcttcccatatcgtacaaattctccattcaacatcggggccatgagcacaaagcatcgatgcaataccttgagcagtagcttctattgttgcaacagcagccggcacctctatctggttaatgcagcattgagaaattttcaggatcgagacagatatgtattaatttcgttctggacaaaataagttaatacacgcacaacgacaaaaaagatgaagaactgatgaatcatcacagctacctgctttctgtaagacgaaatataaccacccattggatcgtgttgaacttcaactccctcaacttgccttataggagggaaaagcagtgcaggctgtgagaggatgcggaaaagtagagctgctgctgcatcagctgctatgcctgctctcatggacattgctgtcccgattgcacgcaagaaatgcaaatgcaaccagtttctaggaagctacatacaacaaaaagaaaaaagaaatgcattttaatttaagaaaagaagtcaaagtgctatgtcaactatttggaaagatccaaaggtgcaagaaattaagtcccttgtccacatagaaaaccataaagaataagaaacgtttatcttcatcctgttgccaaatatgaggcggcgtttggttggaggtaatgaaatggaatccattcctttatttggttgcatagtaaaatattggaatgtcattccaatggaatgccctttccaccattttggtagaatgattatcctattttgaaagggaaggaaagacaattccaatgcatgatgagaaaaaatttaataatttttttatcagatttttatatgcattttaaattttatttcattccattcctattcctattcccattcctattcctattcttatgttttcattcctcccaaccaaacgccacctaagagtctatcttgttatatatgagaaacaactaatttcaatcttgtcttcaataacagcaaacacagaacacctttgctcctcttaccaccagcagcaaaagctagaagcatttctattggcaacaaggttggttttagagtaatctttgtgtaacaacagaaaatatcaactcgaggtaaagcaatgatcttcaaaatagtcaaaagagagaatttggaaaatataattccgagggcctcttggaaagctatatagtttctgaagaccatgatttctcctctattgaatatcttctctccctcctaatattcccctgtgtactcagtcctatgaagaaatggaggcccaaaactaaaattccataaatgattttgggcctacaatagacattacttagctacccgaagggttgaatgcatgtaggctctcataataaaaaaatgagaatattttgaatcattacatatcataaaaacataggtaaacaccagcaatgtgcagtatccagctcacccttattccagaagcataatcttcagcagcccggaggagttccacgagctgtacagcagcatcaagtgcatctggagcccatgacggtggtgcttctagaagtccaagaagaagtctttgggtggcacttggagtagcaatggcataatacctaatacatgaacagcaaaatttaataattgtattcagcaaagccaagttggacatttagaaatgatctttgacaatgttaattaataaagcaaagagccatcttatacctatgaaataaacgcgcatatggctcaagagctggaagcccagcaactagatgttcatccaaagctgttgtaggtggaggaagtaaaagtgcagggacagccactgctgttaaagtagcagtttcatatcgagcaacttcctcgtcacaaacacttaatataacaccagcaccattggctactgcccaccttggagttgatggcatcagctgaggatgctttccagatccacgagaagctaaagtaacaaagaacttgaatcaatattggtcattaccttaaaagggaaaatttattctaatgttcgtgttaagaaaatagagatgttttacttcaacaaacgtataggcatctaaatttcattcaaacaaattggatacggaatctatttcattccactagtaatttttttctagggggataagactggtcattcactatagaatcgttttaattgcattgaacaaagatagtaaaaccataaagtaattactttcatagtttctttctatgcatgcaagttggtcctccatctaacaagcaacgataacaccaaaatttcatcaactgacttttacactaaaaatatgactactaaatcgggttgtttcatatgtatttcaggggataaatttcagtgagattatataaaatatgaatcaacaagttttcaaatgaaacatcatctgatatgtgacctcaagcaaaaccattgtaaaaatactaaacgcccacactatggttcgctcatacttgagaagacctaactgacctgttgtaggtagcttaagctctccagcagcatatttacccataacaccactgcacctgttagttacatcaaagaaatgtaagcattactaggggaaaataaacccaagtacagaatttttttttgacttttagacttaatgaagatgattctaaactaacatagtgaattaatgatgattaagcgtataaaatgaaaatgaaagcctggtcaatggatctgcaagggagaaaaaacaaaaatggaaagcctactccaatgtctagattctgtttccccttgttggaagtggaaagtatgtcaattcgtcaaaatattttcgaaagattttacatgtcaagtagtgagaggagtgcaataattgcatgaagatttcttattgtgaatgatttataatcaagaaccaactctatgcatcaaccaataattgcgtgaagatttcttgaagaattcaccaaccaaaaccttctctgcagtaaaaatttgaactattttgagcaattttaagagccaacaccctcaaccccagcccaaaaatattattatatcaaaacacatcctgaaaactctttgaagttgttgactatagacctaactcgttaagcatcttaataacacaacttcgcaaagctttaaaagggaattgtctacaccctcacacaagctaacatattcatttttgtctttgaggtaatgattaaaagaaagagaaaaaaaaactacgtttttaagaccaagagttgttgctttagcttatgatcagaccatacagaaatgtctcagcaagtcggctttgtttaccttttgtcttaagttggtatagtgtggttggtttagaattgacacaaaaatgttgataatctcgggataatattatgtatacatacagtaacagtgagtctgaaccaatcaaatatatactcaccaacggaagtagtcgcttcggatgccaagaggtgcagtgagcaatatatcagtaatccagggagacaaaggcctaataggttttctctcttgctgcgaaccaggtggagaggaggaacccccattgttgctagtagtgacctggctgccactacgacttctttcagtttcattgttttgttgttccactttgtatattgggcgattataatgagttaaaattcgtaaaatctccccacacgccagagcccattgctcggaatattccttctgaggagagttcaagaaaaaaaaccaattaagtcgatgaagaagttctttttcttttacattttttaattaaaaaaacaaaaacatgtgaagatacaacaaaacttggggaaacattgaaaaccattatgaactaaaatataaagtttaccaaaatgagaagaattaaatcattaggatgtagccaataattaatcttcccatacctcactgcttgggcagactaaagatatgaaagaagcgaacggtggactggccctgtcatacaccagtgtgccatcaataatacacgaaataattggaagaacaacagcatgcccatgctccggatgatgaaggacaaatgttgctgcacaaaaatttattacatcaataagtcattacaaaattattggaaaaccttttctgagaagagtttacatatctattaggaaaacattcaaaagtacagaagtagtacctaagacatcatcaaataggcgttgttcctttgaaggataacggttacgaacaagctgccaacaaaaatgtatttttagtacagcaattgacaaaaacacctaaaatctcctatccgaaaagaattaacaattatctttcaagcccttgagcatagataagaccattacttcataaaaaaacatacctctgcaatgtcgtcaggaaactgatctgatgtgaactgaccaaaataatccacataggcaataacttgagcctatacatgcaaagataaggaaaataaataaacgaagaggaagaccatgtttctcaactcattttcgcgttgttttgtccaacatgaaaagtcaaccaacaagataataacaagaaataggtagttgatacacatattctcgagcaaaaggaagaattttcaattatctgatacatccgatttttttcttcctaagatatgaaacaattcattttctaaaaccttttcctataaaaaatccaagttccaaaacataaaagaatgagtaatcaataaaacggatgaatcaaaaaacattacggctatgttaactaaaccatgatgaaaagaattgtaatggaaaaagattacagatgaactgtacacatgacagaatactatagaactgtacacaatctaatatcacttattacacatcacaactcatttccaactaaaaaagaaaaaagtcatctttgatgggctctgaagaatacatccccaaaaatttcaaatcaaatattgagcctaaaagagtactaggagaacaaatctcaaaaggaagaagctactaattgatcttttgtcaaccacagcaagcaactgtttatttatgtattttcatttaattcatcaaacaaacaaaatttgcagaatcaattcaagacctaacaaataaaatttattcaagtgaacaagtttcatcaggctgaatctatgtatatatatatatatataaacatagagaaatgagattaaagttataaagtctttacctttctttgttgggcatcttgtgaaggaggacaaaacaaagaagagtactcaagccgatcaatccatctctcacgactagtactggcagccatttgagtaaaattaaaaagctttaaccaaacacaacctgaaaaatcctcaagctccaccaatcaagaacccaaatctgatagttcaccatccccaatcagaaccaaaactcttcatcaaaacaaatcaatacaacatgtatatataactatatttctacaatcctgcactatataacacgcaaaagctcaacttcaagtctttcttcctctgaaaacctccaaattaagctcttggattttctgtgataaacatggtagaatcttaacaatatgctaaatcaaaataaataaataaaattaagaaaaataaaaaatatgcccatttccatcaacaatctacagaaccaactcatccaacaaaaatctcaaatttaccaacttaacacctcaaaaaaaaaaaaaaatctttttcagaaatgcccaaataaataaaaaaaataaataacaaaaccagctaaaatcatacacacacagagaaaaaaaatgtaaatttcaagaagaagctaaacccatcaaggaaaaaatctcaaatttcaacaactgatcagaaccaaatttaaccccaaaaaatattgctttttttttttccaaaagaaaaaagaaaaactcacctgagtattaatccagtgacctaataattttcctaaatgatttcaggtaatgacacgagacagagagaattcagatttttcttttttccgcaattttttttttcttcttctgagaaattatttttattttttttttaagagagagagagagagtagtttttggagagatatagagagagaaagaggagatctttagaaggcttctcagttcatcatcgattgctaagattgatgcacacgtggcattgatattttcctctcgcctcatgggcttaggtgtcatcctatatcatcaccatgttaatattaatattattattcatggtcatcatacacattcatacatacatacatataataataattatattattaaaatagtcaaagaaaaaaacagggtcgttaagtgggcactaagtgacatttgtgagatgaatttacgaatttgcccctgatgggtgtttatgaatctgattgctgaagttgacagctataggaatttctataataggaaaaggcatatttggtgttttggaaagtgggttccattctcttcctagatattttctcaaagagaattttcgccctacttctcaagtctatgcacttctcttgtacctctcttttgtttttttttttttctttcaataattagcatttcattgataaaaattagagagttaagtatatccaatagataaaatagaaaattatccatttattatgagtgcatgcatagttaattcatgtgtagtcatattgaccgagcgacgaacataaattaggaacgtcccaagaaaactgaataggaaactatagatttcatccaatacaaattctaaatcattacaaaaagaagattttctagtaaaagtagacactactgctaaacaatctaattctacagtgctaaatggaatacacaaactcaaagaccaatcaagtgctaccatataactgttatcgcttctgcatgtacaactgtgagcttacctacacaaaacacaaagcaatatataagaaaaaatatcatggagaaataattaaactcttattctcctaatgacttcatttatttcaaatatgcttgggaattttgatacaaggtagacctatgagaatctttatctatataaaagtttgggtaattttataatacactgtaacaattgttattatgggtgttcatagaatacacaatttaatttaatctgtacatctatgactcaatccaatttaattggtacgatttaatttaattcaattcacaaagtgcatttgtgtggattgaattagtttggaaaatctaatccgtacgatccaatctaatccacacttgtggggattacattgaaaaatttaaaatttgtacttgtgctgattgaatcttaattgacatgtaaaagtaaccgatataatctaatctacacatatttatatttgttttaaaaaaaattatatacaattaatattttaatatgaaagataataatttaaaaatctaatacgtacaaatacatttcaaaatttatatatcaaatatatattctattcttatatataaagattatataatttaaaacaaaattaagtatttctttctacaaacaattttttttcttcctttaaatttaatactttttgttttatttattttaattttctgttggagacataaaacacaataatttattttattttgttgttaggtatgtgaaaaaaaataatttatataaataataaataatttaatattaaaaaatgaccaatccaaaataattaatctaatttacattttttcagattaaatttgaactcttgtgtggattggattggatccaaaatataaaatttatacttagtgcgcattaaatacactatgagcaaaatagtaccgattgaattagataaacatccctaattattattttagtatgaaaaattgtgaatccttaattactttattgtgtcttttgtttcatctttataacatttagtacatatttgctcttagttacaactatgctatgttggtattttttttttttttttttgaagatgaagctcatatctagttgattcaacggtttcaagagatttgaaactaaggattcttgaatgaatatttaagattttgggtaaattttaatttatatcaatttgcaatgttgatttgattatgaacttgtatttgtaatattacaatgattgatagtgaagttagtttatttgattctttgggatttaaggattagccacttagaatgtttttaggataggtaaaccttgtaaattcttagtgtgattttagatttacgttttttttttttttttaaaaaagtatagttttgaatgtatttcgaagaaattaatatatagtgtgatgtaaaagtttgatataaaataaagaaagtaaagttttgataatatattttaagggattgaatagctgagaaactaattatcttaattattttcaaaactaaagaataaactgcctttcacgaaaaagaaaaactaaacaatataaaggataaatactatttcggagcttgtatttatcacaattatagatttgattatttgttttattaaatgacaaattggatcctgtattttttaaaatagtattaccttgagctcaatttttgtcattttattaatataattaatctgaagccaaattctagcacgaacggatgaaaaaaatgtaactagttaggtcaaaacattttcaggtcatgttattattaaattttattttgtactatcttgaaaaatacagagtaaattattattttaatacaatagaagatcacatccataatttttacaaaataaaaagtctgaaatactattatccaataataaactacatttttctaattagtgtaggtatcaaaatataatatttgtgtcgtgtaatattaatacatgttaatttggacatcaactaattttttaatgaatcaacaaagatttcattaatccaacaataattttacaaacgaatagcatcttcaatcgaaaaacctataaatatagccgctatacaagtatactttcaaaattacacacagttttccttgtacaaattagaaaattaatttgtatgtatagcactaacttttttaggccaaaagcaactaattcattatttaacatcatttttaatcttatttacaattaattttccctgacaatataccaaattctacactgcttcgtttctggcatgctaaatttggtaaattagcgttgccattgcagcagaaaatactagcttaagaaatttgctacatttagcgttttctatccaccgaattaagttgcgcagctacttcgagtcagccctccaagaaagccaaaccttcacttgctgaagataattaagagacaaagaacaacattcaaagaataaatgttctacagtttcattttgacagttgcagaaaacatattttccattaacaataatgtgaaacttcaacaacctatctttatctttagttctcaaacaattttgtatggcaatccacaacgcaaaattatgcttagacacattaagtcttccctagactttttggctccaacagaccttgttttgaattagacataacattttatatcctcgagaaatctagtaaatttctcttgtaaactgttgagtgtcagtgagttttttaagtttgtctttgacagtaatcaaccttccctattaccaactcccatgagtactagaggtgtttattggatcacatctaatgggtttagacctaacccaaccgatccgatccaattagttattggatattaaattttgtgatctgatccaatccaatcgaattgagtcatccgatccgatccgatccaatagatgtattggattggat

SEQ ID NO: 42586 - DNA, 2447 bp, Cannabis sativa
aaaaaaaaaaaaaaaagtgctctctctcaacaaccattagtgaccaaaaaaatgagaggaaggattaccactatgaaaacacaggaattactaatatcatacaagcacctatcattatttttaataattgaaattcaattgaaaagttgaaaaccaaaaagaaaatgctcacttagggcgtgatgagttcatgcatttcgaattcttctatatatattacatagagatttggaacaatatttaatttttttaaaaagaaaaataatatttaacgataaacccattcaaacatgtttgtttagggaaaaaaacatgtatagcgttgcttaatcaaatggtgcgatgaaaatttaatttttaagaagaaaaaacattattaaccatggattttaaaatgattcgcgatgaaatttggtgaggcatttcgcgagattatcaattttaggttttttttttaaaaaaaataattgttttgttttctacatttagaatatgcggaatattataattgttgtgtagatcaacaaattttgattcttttgagcatgagtcattatgaatatttattaaattttatcgtaaactatcgttaagcatctatctacttacattcttccttaaaagttcaaattttcatgacattattgttaaagtatcgtttcttttggcctaaacatcaagttttcatgagaccttcgtagttggaatatttaaaatcttatagataaaattttatgatttcgattctctgttttgaaagattatgaattttaaagttaatatttttatctaagtttctacacatttaaaactaatttttcaaaagagacaattgattcttggtcaggagacaagtttctaataatctaagttgggatatttaaaaataggagtatttttttttttttttttttgataatgggagtattagaatgcttaaagtcaaatttccctatctatattttgaaacattataaaaactaatcaaaaaaaaaaaaatagcaagaaagaagttgattgcattgcaagaagtacataattgcttcttctttttcatttcattttttttttcttcctttataatttcaaggtaaatcaaaagatttgctaaaattctgtcaaaggcatcttcctaacattaaataaaactagatttaaattactgtcataattttataaatgatgtccataaataaacaaactcaatctccacaaaatttcaacaaaccaaaacgtgtcgtacaatgatgaactaatatgtgcaattcttaggaagattcctaatgacattactcttcattcccatcttacttcgcatggcctcaactcctgttctattcatttccttcatcactttcatcctcaccatacgttctcttgattgcacagtcgctagtcccatgctcttgtacctgaaactcaacattcaagaaatcttctattagttttcggttcacacaaggaaggccatagatcggcaaggtagaagaaaaaggaagcaaaccttgaggccagagcggctgagatggccttgtcatgaattggtgatgggcgaggtttctggcgataataacgcaagaaatcccgggaaccaagtgttttggttgaaactccattgttagatctccttgttataaggagctcaggtccagcaagttccacagcgttggtatgacctgacacaaccatctgtttaccatcctcatccacatagctgtatcaaaagataaaaagagtatcttgattagatacatttttacaaatcacataaacataagattccacagatacataagcagaaccggagttatgagaaaggaggaaaaaacctgctgctgtaatcatagaactcttctagctcaacttcctcatcatcaccgccatcaccatagtgtactttgcaatggcttttcgcaatcatatgcttccgaactgcttccaaactgctaaaggggtggcatctatcattacagtacaagcacatgaaatcccttctcacctgaaaatataaaaggaattaaagttagagcaaatccctatgaagagcaacaaaataatcagtatagaaggaaagagcttttttaaggatgtaccattaggccaagataagtaagaaagcctttaggatccttcaagtactcaacatcaggaatgaagaatccatgatgtttgtgcatgtgaacaatgcagctctctaggttatcatgctctaaatcacacataaagcagcaagacggatccaagtcatcaaagtcttcaacatcatccttttcatccatgtcttcatcagaagcatgctcatcaacgttcaagccagtcaaagattttgcagcttcaccaatcaattcttcttcaggatcaacttcctcccactcaccttcactctcttcactttcttcactttcttcattaggagcatcattctgcagaggagccttattcacaac

SEQ ID NO: 42587 - DNA, 3383 bp, Cannabis sativa
aaaaaaaaaaaaaatcagaatttcagcaaactactctcccactcttattctcttagctaatatcttcttttcaaatttttcattatgcagccatgcatatttacaagagcaagaaatataaatttttctaataaattttacaagcttgatggtcaagtatacaaaaatataaattttaatttatgtacttgattaattattttttttatatacttgattttatattatgtgatcatctttattcttgcaatgtattatttatttatttatttatttaattgaggtacgttattgaatgtgtgtgtgaaagaggggaaggtccacaattgttaaaaaagaaagtgagaaagagataagatattagattaaaaggatatataattactcaaaatggaattattatatgaattactcattgacaaccatatatttccttataaataaatacacaatgaaatggttatcatacgcaccatgttcacaatatcatttaactcaatagttcaaacaaattctatctttcattatatatacttatacaatatatataccatatgacacaccctcttatattatccatatgtacataccataaactaagtttcacaataatattttgcagaattgattttttttttattgtggcatattacaatatagtaactccttattctattcacagaattattatatagataaaaaaaaaatacatgtttatcaaaaatattttggttatttcaagaaataagatacatagtagataatcttaaaattattattaccaaatatatatcaattgaaatgaaaactgtaaaatgggattatctttccatacttaaaaagcaatgcattaacttcaaaccctacataaaaagaaaaccaatgtcctattaatcttcacacacacaaagaacactcatactaattatcaacaaaaaatcttcttttcttctattatattcatagttcatggagagatttgatctttcttctgaggacaagatgaaggccatcatgccttccgtgctagacaattctgaagaacaatctccttgttctttagatctaaagctttcgatcgaaaaatggtttttcgcaggttcccatggtggtgctagtaatgctaggtcaagtagtagagaacttaatctcttcaattcttttcttcccaaccaagaagagaaagaagaagagaaagaaacatctgatgatgaaaaactaccaatcgggaagatgactttcccatgcaattattgcaggagagtattcaaaacctctcaggctttggggggtcaccaaaacgctcatagacaagagcgtctcaatgagaaacgacgtcgttggattgaagctcatggaccttatgggccccaccgctattctccgtataattcagtcactacttttcctggcttctatggatcttataataatagatcttttgcgcttgctaatatccctaataataataataattcttactcatctttgcccgctggccctaccactgagtacccattttttgggacccataattttggtagcggccgcggcattgaccatattggtagtggggcatggtcaaggcagccctttgggtcgaaccctagaagagtaccctctcctaatagcggtggtgattttggtgttatgaataatttaaacaatgcttcggttcctaattcttcagaaaatgatgatttgtctcttcaactttaattaattaattagttttattgttgtttatattgtgttttgatgtaatttagatgaattaatcaatccttaaacacatatatagatcatgtttaaggattgagtgcattagttttttatttgtgtttggattttattatcaattttgtttgtacttgtaataatcatatacatatatgtgatttgtttttcccaaaattttaaaaaatagatgtattaatttgttttctaatattttagtcatgatcaaataattcatatattcgccacattaattatagttttcattagataataaagtgttcaattatagttatcggacatgggtgaactcacatagaagcgatgaaagacaatcaatatataaatatattaataattagctaacgagttgatatatatgtatgtgtatttattgtaaataacattgaaggtgcgcaaaaaaaacacatttcactatttaaaataatttaaaaataaccgttaatttagtctctttaaatggaagtcttgcgatcaaatataacgtaaaagaattaataacgaagaatgatctaacctaattatagacttcttcttgctttatgatctatacatccattaattaagattaatatttcgatgtcttatgagtactcaatttgtttttcaataaatctaataagattatgtttaaaattagaaatcaatgatttagtctctcaaagtgaaaatttacagtgatgatcaaactataaattaaaatagtacattaagaattactaatcaaaatacttatatttttaaatccataattatagttagatttttttatagcttttcgccctacattttttagtaactttacttaatctataaatatatttatagctagctagctagtcattatatatgtatacatttattgcaaataatagtatgacgcacaaaaagcgcgtgtcactacttaaaactatttaaaaattaaaaaccgttaatttggtctctttaaataaagtcttgtgatcaaataggacgtaaaagaattaatgacgaagaatgatataacctagttagacttctttactttgctcttatgatctacattaattaattaattatgatatcttgatgtcttatgattcttaatttgcttttcaaaatcttatagatttatgttttaaattcgatatcgattatttagtctcttaaactgaatatatatataaagatatatatagtgacaatcaaactatatactactaaaaatcacttatcggaatatgatgcttattatacttagatttttaaatatctaattattgttagaattttctatatctttttgctctacattctcagtaactatatactaaaaataatgatcattatttttttatttttttttaggatgtaaaaccaagattttataataacttatataaataaaattaggtagttcaatttgatttgaattatcggtgaggcttctgaatttgtggccgagccaaagaatactaaacggtctagattcactggaacattgatactaaattcatttggtctcaaatagttgttttgattggttgagtttaaaatcgcaaatttcgaattgtatggactgccttaatctcttttatatatataaaatcaaaataactaaagttcaactatataactaatatttt

SEQ ID NO: 42588 - DNA, 2672 bp, Cannabis sativa
ttttaacggtcaaaaaagttcaagtggcatgatttagtacatgttaaaatttagatggcaaaaatcttaattagccgaatataaaagatggaaacttgtactaatacataagtcataaataaaaggagtagaagttgcttacaaaataatatgatagtaaaaaaattatctagtcgaataagttattttagaacaacatgcacaactaattcataaataatttctaaaaattaggataataaaattgcatatttttttttatagtgtaacatattattcaccaaattcatttgttacaaaatagtaacatctaagactattattttttattacttaaataactaaaaaattattaaatttttactaattatttatcattaagtatctcatttttttaataaaaaaaccataaattaaaaagttgatattgtcaataaataaatcattttcctaaactagctatgggatggaagaaagtggtgaagtcttgctgatcagataagataccatgaactttttctgtagtaaaataggtcaaatgcggcaagcaaaataggtcaaatggggcaacatgatttaaaatttgcacgaaataaatgagtttaagtttcttataaattagtttagataatttttcagttgacacgattaactcgtttatcaaacatatcattttcaaattgacatacttaacccaaaaatgacacaacaacaagttatatgaaagtatacactcttatatttattattttgttacatgtaaactgtactaagctagttaagtatgctataaatatattaaatcactcataaatatattataaaatagttataaacatgttcaacttattataaatgttaactaacatgatcttttatataaatagattaaatgaattgggtcaggttaatggatttgagttttaggttttgacccgattaataaatggatttagtttgaatttgatattgtttgtaatacctaatctcgacatgaacacaattcataaacacgaattaccactcctagctagagggtgtcgtgaccccccaaattttttattttttcaaaattacatgtaataaataattaaaaataaattataattttattctttttttttcatttgagtattataattttattctttgatagtaaaagaaactgagaaaataataaagattaattcaactaataacaaaaattattttgctgcgaaagaaaattaagaaaataataattatttgatatactttaacattgaggaaagagtaaaagtgtagcaccatctgagttttggaatagtgttgaagcatctgagttttggaacgagctgtggcgattaaaaatacctcctaagattaagaatttgatatggagagggggaactaattgtctctctacaaaggtccaattgattacaaaaagggtggatgttgatagtttatgcccggtttgtggtttgcacaatgaaacaataatgcatgcactagtttattgttctacagcgtctcagtgttgggagaaagctccaatacagcttccattgcagcaggaaaccagttttgtcgactggtgtgtaactgtcttcaacacagccactgtagagacccgaaaattgttttgtactttgtgttgggctttatggagtgcaaggaatgataaggtatggaagaacaaagacacaaatgcctcctttatttttgcatttgccacatgctatcttgatcaatggaagtcggctcaaactccttatttggagacatcacggacaggtttgctggttggggatggtttagaccgatagtgtgcacctaatgtcaatgaaatcaaggttaatgtggatgcatcaatttttggaagcagtcaagattatggtgatgggattgtggcaagggatgaacatggctatatgctagaaggagtgtctcggttgtgccatggaaacattcgaccggagttagctgaagcaattggagttcgagaggctcttagctggattaaagataagcaatggccaaatgtgatcttagaaactgattgtttggtggtggtacaagcaatacgtagtctaattcatatgatctctttctttggtgatgtaattaaagagtgtcaaaacttgcttatgaggttaagaggtgttactatttcttttgttaaacgatcagcaaatttagtagctcatgcaattgctaaagctgctatttcttaccctgatcgtatattcagtatggggatgtcccaactgatatgcttccttttttggttgcagaatttgaagtttaataaaattcgattactttcttcaaaaaaaaaaagtgtaacaccattataagtagtagtcaaatatacacaagttttcccaataacaatgttttggaaaacaggaatttcttaatttaagatcttataaaaataaattcaaaaccaaataatcaaacaaatacaagtcatctaatggcacaaacaattataagaagatcactctaatgtgaatgtaaacctgtattagttgtagtttccaacagctttgtcacctcttacaaacgaaaattataataaagcctctcaaaaaatttaatgtagtttaatcttaccattgatataatgtttgaatacaaaatctaatccaaggtgtcaaatgcaaattcaacttctcatggagcaa

SEQ ID NO: 42589 - DNA, 25407 bp, Cannabis sativa
  modified_base (16659)..(16663): a, c, t, g, unknown or other
cagtataaaagaaataaaaatgggattggacagtaaaaatgtaaagtttgccgtgtcccagtatttttgaaaatatttggtaaaaaaatagtatttttgtaagtttcccttaaattaatgctaattggattttggcttggtgtttattgtttctctcattatattaatcattatacattttctacgttggcttggtgtgtgtactgctacaacatctgagtccgcgaagccactattctcagccgccgccggtgactgatcccaaaaactttctccattgcctaattctagctcaacggtatgcttttccctctgattacgcctctctaatttttttattttgtcaatttttatcccaatttgagatatccattcttagggtttgtactcctcaaatttaaacattttaattcaattcgactactcactgaagaattcgcaggaatggtttttgttttacttttaatttatggtgtgtttgatttctataatattcttcagatacataccaatgaaaagggcaatgccgtggagtgacagcgaaggtgattcttcctctgatgaatcatcatcagaatctgaaactgatcatgggtcttctaagtctaccgagattaagccaaagggtactcaatttaaacctttcttaagctattttgatataattttattgtgtataaaaattcaaagtcttgttaggccaaaaaccatagagggagtactcagtgtaatccttatccaaaaattgatgtgtttttgtaatttatatgctgttgaaccatgcaatctttttgtaacagtgaaatctggtaacaaagagcatattgcatacaatctaataattcgttcctaactgatatttatgtattaaaaattgaagtatagtgctttggttattgtaacagtgaaatctgggaacagagagtatacaatataacccatcattcccaactgatatttatgcattaaaaaatgaagtgtagtcttgtttcaactagctttggttatatgtaacactgaaatctgggaacaaagtgtatacagtacaatccttcattcccaactaatattcatgtattaaaaaataaagtgtagtcttcaactagcttttgtttttgtaacagtgaaatctgggaacaaagagtatacaatataatccttcacttccaactgatatatgtattaaaaattgaattgaagtgtagtatttttatatatatatatatacattttataaaattgaagtgtagtcttgtttcaactagctttgtttttacaaagagtatacaatataactcttcattcccaactgatattaatgtataaaaaaatgaagtgtagtcttgtgtcaactagctttggttttttgtaacagtgaaatctgggaagaagactactactacggttgactttgacgcattgaagagatatgggtataaaggtggaccatcggtgttgagtgttccacccccaaaagagccagaagagcaagactggtcttggtctagtggtaaagagaaacgtgatgccaaggagagcgaggagtcttttcaagaaaggcagaaaaccagagctgccttaatgcagggagaacagcttcttggtgcactgactaggcaggagaaggagagtttgagagaaaaagagagagagaagaagaatgtttctttctctcagaaggaaaagaggaaaagagaacttggtcaggcaagtaggggaaagaactatgttgaagaagagaaaaggttgttgagagatagtggtatatactctggttttgattcttgatctgcattgcattgcttgaatttatgacaacacttttgttcttcactattgggatttctgggttatgttttattgtaggataagataggataggatatgcaatgccattatgttaacagttaactcttgtaaattttctctttggagaaacatttttcttgtattttgtattgtaagcctaccaacagtaataatattaagagtaatattactgtgtaacatgtagggatatatttttggtttattaccttaatagttatatccatgtctaagcctttagctagttattaaatacataaactaattgaattttagtagttatttgaatcaactcaaaaaggtaaaaagagagagacttacttgaaaagtgagaggtgaagccaatgcctttttttcttagttaccaaaattttacaacacaatttggaatgaagaaatcaatatagaagaaaaaaaattacttaatatgggcaataatttattattttttttttttgataatatttggaaatttgtgaaaaaaaaaagctgtagaaccttgtaaaaaaatctagtttcatgagaaaaaataacccttaattaatgaaagcaaaaatttaagtgaaggcgtgtcgtgtgttacaggaaatgataaaaagtttgagttaaagaaattaaaactaaaacgaaacgtatcgatcgagggttcatttatcgaaacgtatttatttcattttacctaaattggagatggagagaaacgtcttaatgtttttttaaaggaaactacttcggcctctttcctttttctatgtccacttcttccatcgactcttcttacaatttcacagtaaacccaacccaaattttccaaacctctctcttttttttttttttccttttgattgattttcttgccatccaaacagaatatatatatttatttattaatagttgagtgatctcttcgtcaattcttggagtagggcttacttttgcttcatcggaatcttttgaaagttaacttgagatttctaaaactcgttttgttgattgtattttgtttttataagggttcgtatttggttgagtccgctaggaaggatgttcttttcaggcgatccgtcgactcggaagcgagttgatttgggaggccggagcacgaaggaaagagataggcagaagcttcttgagcaggctaggttagagcggaacaagcgatattgggttcggcaacagaactttgctgctactaaaattcaggtgtgttgtttattcttttgttttgattgtttattgtaagtttaggcgtaattgtcattcttgtggcatttcgtcaattttttgtgggaaatggagaatgatcagtgggtaaattgttttgctctaagctgtgtgttttgtagatatatatatctattatgtatatggcaattgtaatactggcattgtggttgattttttgattaactaaattgatcaaatatatttacgttcttttgcaacggcatgagctcggaattcttttggcaatgtcatatgattcatttaccggtttaggttccggcctagtgtcattgataataatgagtactaatggaatccaaaaactcaattttatacctttgttattttgagtgatgatttagatacctacacaatttacactcatcgatgtgacaggcaggcatattcaatcatccatgtattgaaatattgattgttagaagttatgaaacatgtaagttttgagcattcattttgtgtgacataatcatatgactttttctacttaatttaacacacctgacagttgaattgtttcttctagttaagtgtcaatgtttgtgttgtggtgtgtgtatttgcgtaagtgttactgattactagctacagaaatgcttcaggggaagaaaggtagtggctgctgaacgatctaaggttcgagaacagttctatggaaaatttgggaaactttgccaaaatgtggacaggtagccttgctgggttatattgtgtttgtaactattgactactttataaacttttcaaacagggttctttgctctggaaactaactagctttttcctttatttccccataggaattgttttggtttggattcagaatttttacgccagttattttacttttttgatgctcgaaaagctggagatattgaaacccttatggagacatgccgaatacttcagaaattggtccaagatagtggtatttttacatttctacattttgtttcttcagcatccacgtgttttgaattatatatttaactaaatggtataaatacatatactagatatacatctactgtaataatgtcacactcctctcccttttttgttattttttactgatattctatttataatgccttatttgttatttgttttttccactttttctccttccattctgttggctccatgttttttaatgccttctttaatgacgtacatgttcacgaaataggggatattgtgagcttatttgctgggacggagtactcatccaagcatgctttggtggattacagagtgaagcaacttgcatacttatgtattaaggctatacatcaaaacaggtttgatgcattttttgacatttatattttagggtttaaatatgtggtattatatatatcttgtttactagttattgcttttaattcaattacctcatgttctttggtatcttatgaaataagcacggaaatgattttggtttttctagatttgtgcttttcaattccttatgcatattaaattttgaagatagtaacgttgatatctacattgatcccgagtctcttatggttgatattgcgatatgttgaacactgatcatatgtaagagtacggacttttgccagacattaaactgatattacatttgttttgttgcttatttggtgtattggtgggcagacatcatttaaagagtcaaatttttgccgcacctgaagagtcaagcacatgcacaaccctgttgttagaaacagtgcaccttttgatcgatcccaaacttccatggacttgcaagacagttggttttctattgctaaaaaaggcatttggcatgtttagagagatcattctaacaggaaaggtatgcatattattttatcattctttgcaagataagaatgtaacatcctgtttaaagcttgtgtttattttactgtatgatcctttgtttattgcatcctatctacgtgtttgttaccactttttgagtttgaacattttcacaccgctgcctgatgatgggaatatagtgtagtgtatgaaataaaaacttttcacagagtactttacatttctattaaatgtgcaagggtgttaaaagtattaagattctctatcttaatattctttggctgggttgcaggagaacttggacgttcatatttgccttagcaaagtgtcttcattggaacaagtgcttgttctcttaagctctcatactggccaaaatccctgtatttgcccaaatattgatgcaagatggagtttctcatcccaaattcttactgttcctttcctctggaagcttttctctggtttaaaagaggtacatatgagaacataaaaagtattttgatgtttaattaacacaagatttgtgatgattggtgatgtgaagtgctacactgttacacattttgtctcttctaaaataactaataattaatctttcctatgcaatattccatataggctcttgcgacaagaggtttgtgccaattttaccttcatcagatggcaatctacgtgcaaaatcatgctaatgtgcttcctagtgatttatcaaaagagtttcctggttatgcctgcctccttggaaatatattagaaactgcaggagttgcattatctcagcctgattgctgttttgaaatggtgagggagttgatagagatgtcaattctgttatagttccaaatattaaatcagaatttcgtattatagatgttggaagacgttatacatgttcagtttgcgatctagatattttcttttcaatataataatcgttgccgcctagaaagaggataacttctggatgttgcagttttatcactagaatttgattgtttattttcatgtgattcattaattttttttgcatcaatttctctctcaagtaattatatgtcagtcttagtaagtctacttttagaaattatttgtatgtgtaaatctgtattcaattctttaaaattcttcctttctaagttgtgtgcggatagcttcctatctttttagtttttaaggcagctattattattattttgtaaatttgtctttttttaatatgttcaggctgtagaccttgctgctgttacaacgttcttgttggaggctcttccttcaatgaaatcttcaaatagagaaactcaagacagtaagccttactcataatacatattcttatatatgcattcattatatatctcaccccttgatctattacgatgtataagtggttttttttcccttatatctacgtttcatccttaagttattatttcggttttaaagtatgcaattgaactttacctgtttgagttcagatatgcagattgatgatgaagttgtggcgggtgatgagcctgtggaaatggctttgaataggggtttggagaaacaaatttgtaatgctattgatccatcctttcttctacaattcgtatgtcattttgactctttatgattctctcacatgtctaattttatgaaaaagcattttctgcattacactggaataacaaagatacttttttggggtcggatgttctgcagacaaatgttttgtttggaggaatttcaactgtcaagggttcgcataatgatccagatgacagagaggttgctgctgttggtgcagcttgttcttttctccatgccactttcaatgcattacctctggaaagaatcatgactgtgttggcttatagaactgaacttgttccagtactgtggaattttatgaagcggtgtcatgacaaccagaaatggatgtccttgtctgaacatttctcatatcttttgtcgggagatggacctggttggctattaccattggctgttttctgtcccgtgtacaagtaatgctgcttttgtttattcagagttaatttgtaaccttttttggttggcatgccacttttggaatatatataattactactaatattctaattggcgccattttattgaataatctatcatggataagctctaagtgtaaaattatctattaggcacatgctcatgatagttgataacgaggagttctatgaacaagagaagccactctcactggaggatatcagaagtctgattattatactaagacaggtaacatttattgaatgagctctactttaatttcagcaaatagaaattggaacatgatagagcttaagtgtgggcactagtcagccacacggttgcaatttttttttctctcacatgctatattacaattactataggttaacagtaacatttgtgactttatgcaatggttgatattgttatactgtgtatgtaggccttgtggcagcttttatgggtgaatcctacaagtccttcaaattctgggaggtctgtcagccataataatactattaagggaaacccagtggaagtcattcaacacagggttagtgttgtagcctctgatcttctttctcaggtaaatgcaccctttcatttctttggaatatgtaatcacttttgttaatatgctttgatgctggtttctagagttttctctttatctattgagaatcgtacttcatttttttttttgatgtagttgcaagattggaacaacagaagggagtttgcatctcctagtgacttccatgctgatggtgtcaatgagttttttatttcacaggtaatagactctatttgtaattttggtttcacatacctaaatgcccccggggttatattgctaatattttttctttgtgcctaggctgtattagaaaatacccgtgcgaatgacatattgaagcaagctccctttcttgttccttttaccagcagagtgaaaatattcgctgtgagttgtttattttgatttaaaagaaattttaattttgataatagggttatttacaatttcagttgacccatgttgttttagtgcgccgcatttaaaatttttcttttcactagtcaatttatgcctaacaatatgttcgaaactgcattttgcagtcacaattggcagcaattaggcagaagcatagttctcatgctgtttatacccgaaaccgctttagaataaggagggatcacattctggaagatgcttataatcagatgagtgctttatctgaggatgaccttcgtggaccggtaaaatttcttaatattcatttacatcttttactttaagccctctttctcctttgctttttgccttttactattttttaaaagtgagaattgttttctgctgacacggtgttttttgattttctgaactacctagtatttgtttcttctgtttacttgcagattcgtgtaacctttgtaaatgagtttggagttgaggaggctggcattgatggtggagggattttcaaagattttatggagaacatcactcgagctgcctttgatgtgcagtatgggctatttaaggttggttttacagattgcaaggaagctaagtttactaattagtgacctatataaactaagactcaaggttatgtgcaattggaaacatagttaaaagctaagctgctgctgaaccctccactcacatgagaaaacaaacatcaacccttatgtggtctaaagatcattgctactgtgactttctagaagcaatagaatgacttacaattgggtaaaaaattgtctacaatttgtttttacatagaatttagaataactagggcattaagaggaaagagagactgggagggactcgcatgacatcagtggatgggagaatattaggtcttagtcatgtcttattaatttctttgtttgaactcaagagggctaactcaaatggttagacattcacatgtgatttgcttccgcaaattctaagggtcaaaaccctcttgggaacataaatagcaattgccatagtttcatggcagcatggagcttagcttcagggaaaaaataaattaacttctttgtttggtatattcaggaaacatctgatcacctgctttaccctaatcctggttctggaatgatacatgaacaacatctccaattttttcattttcttggagttcttctggcaaaggtatgtgtttccaaattctccgtttttatttcttgtagctcacaatgttgaggaatgataattttgttttagcttctggtttttgttgcttggagatcatctgcttgctgttggtgtcttcataatctacatgtcttagaaaaagcaacttcatataaaaatttcatagactataagaaggctggcaacttcttaactaaattagaatatattagtgactgaacctgttcgaaactataaggctataagcaatcactatttcaaagcagaagtgttcatgccattagaatagtaaatttttcaaaaaaaaaaaaagtcattagaatagtaaaattcatgatattggtttctcaaattagtgttattaagcaaatgacataattaataataaatcttgaagttatctgcttttacatatcttggtggtccttatgttttttccctttgtaggcgatgttcgaagggattcttgttgatataccatttgcaacattcttcttaagcaaactaaaacaaaagtatgtatttgagattcctaatctctgctgtcaatacattccttttttttcaagattatggaggctcagtttttgaaaccttcattgtgattcaataaacatcttgtatactgtaatgcgtatacctgcataatcatattattcgggcaatcaacaaatttatttccagggccaaaattcacagtgcgattgtgagattaagcagttttgagaacttctattagtactattatatgtaatttagactagtctctaatcttatttttttgaaattctaaagatgtatttttttgtttgttctttaggtacaactacttgaatgatttgccttccttggacccagaattgtatcgtcatctcattttcttaaaggtaatcttatattttctaactccaaaaatcatatgttctatcacctgcacgtgttgtaatttttttgtttctatagtttgatcaatgatataagaaaccttgcttattgtgttgttcaattgtatattttttttctaatgctttcatgtaaaatggactcttaggggtgtgagttctttttatactaccttggtggtttatttattgtaataataccattttctttttaccatgcagcattacaagggggacatatctgatttagaactgtactttgtcattgtaaataatgaatatggagagcaaacagaagaagaactgcttccacggggaaaagattcacgtgtcaccaatgacaatgttattacatttattcatctagttgctaatcatcgattgaattttcaggtcaaataatcttctatctttggattattttctgtggcatctattattgcatttttcttcctccagtggcattattatgacacagaaaagcaatcattttcagatacgccaacaaagttctcattttatgagggggtttcagcagcttatacagaaagattggattgatatgtttaatgagcatgaactgcaggtaggatcagttcattttttttgttggtactcattgatggtatcatggtacattattattattttgctattgtagctaaatgttgtaaaatagatagaatatatttgtagtagcgattgctgatccattttgattctcaatacactagaatgtttatttttaatttgaaatgctgacttagaaaactgactggaaccgtactattagctttgctgatggaattgccttaaaagctcaatttcttagttttgcaacttgatagccatcaacttgcttaacttttgtttttctccttctaatgatgtcttttctggtcaattctttttggcttcttaattccacccgcattgcaatcgttctaaaccttcaagtcttttcttgttcttacatgtattttgtgttgtttccttctctctgttctacagcttctgatatcaggttcacttgcaagcttggacgttgatgatttacgatcgaataccaactatgctggtggctatcatagtgtatgtgcttcttacttttgatggtttataaatcttatgcagatcattttatctagtttgttttagttttcttcacaaatgtatgtgtttcttaaaattttaatatgaaattgaggtgtttctctctttcctattcacaggagcattatgtcattgagatgttctgggaagtcctgaaaggcttctcaatggaaaatcagaagaagtttcttaagtaagttatagaatgaacatcccagcaaaaaaaaaaaaaaaagttatggaatgaacatattattcttactgtattcgtagtaactgttagccacctcaaatagtttacatttagctgtatatataatgttaaggattttaattaagactaaaaattgtccaggtttgtgactgggtgctctcgaggaccactgcttggattcaaatttcttgagccgctgttttgcatacagaggtaactttaatatgtccatcctattagagttaataaatttttttctttgggcaaacagaaaatgcaacctacttggtcgatctcttctacatttgtctatggtaaaagcttaataccatgttactgcagggcggctgggagtgctactgaagaagctcttgaccgattaccaacatcagctacttgtatgaatcttctaaagcttccaccttatagaaggtttgtgtctatcctttgcttcgtcagaactattaagacctttttttttatcataaggatcctgccatggcaccctgtggtgcagaagaaaaattaactgatatgatattagtaacttgatagttgatggagtttgctcggagactcaaatctctcatttaacagatagtgacttcataatcatgcatctattgcatacattgagtaatttgtcttcaataagcataataaactttcctattcctctgtattcttatttttcttgttttgattgaaaatcattgtctagtttttctttctttttcttttgttttttgtttcaacgttgtctaaacctgttgttcatatgcagcaaagagcaactagaaagtaaactgatgtatgcaataagtgctgacgctggttttgatttgagctgaggagtttgttctttctattcacctcctaccatttccgaaaatttctgctccaacctttcacgggacagttttacaagaaaccttgtctggaaaaatcgttttctcaccacagttgggagcggcagctaggaccggcgaataataccttacccagaccggtaaaaaaacagaccaaaagcccgaaaataggattgggaaaatatttttatatttatatttcttgatagcctcctcgattaacatgtcaataatatgtggaggggtcatcggctttttggcaagtcattattgtaaaaaggaaaaaaaaaaaagttaggttcaaattgtatatgtaaaatttcctactacatttgtgtaaataagaagtttgcattatttatgacatgttatggtagaatatcctttgtgatcttttaagaagccttaagaagataatgccattgcttagttggtttagatgcatttcttggtaacataatagacccaaaatagtaaactatgcaagtttcttaatagatatggtgatatatgcaaccaaacaaaagaatggaatgaagattgttttcttttcattccatttcattgcctccaactaaacgccacctaagaagcttagagaaagaagcaaaagaacaacttgaaacaactctattctctattgattggatcagcctttgacaatttgagaaaataactcctggagtaaattgcaactccctcaaaatcttcaaaccagtgataacacaacatataactcaccttcaagggcctcatggatagaaaccttttgatggccaaaacttcattttggtctttgataaccacccccaacgcagctacaaattcttgactaccccaataacccaagctttgaaacaaaaaggtgtgggaatctaatcctttgagccatcaacattaatagtaggaactgtctccttgtcattataagctctcttatggccagtgaactttctatccacattccactgtcttaaagatctcctctaagagaatagttgtcttgtcatggaaagtcatgtttctataacaccaaacttcagacaacaggcaacatgcatagataatactccactaatggtaagattgaaagattctaggtgaataatccacctgctcataaaccaaagtcttctaatactggataatcacaaaagaggtgatatgtggagttaccttcattttcatttataaagcatacaaggtctcaaacgatttccaagcacagttgcaagtctctatcttgtgggtagaatattttggtagagtttttagaggagtttcaggcgatcatgaaccttagctttccacaacatcttgcaaattgactgaactcggtcctgaaatctctttttattgagcgtccaataggttgacttgaggttgaaggttccattagatatgggattccaaaaaaccctgttctgaataagggagagaagctgagtcgatagcctacaatttagagacaagttgaggactgaaaactctctgagtcaactcagtatctgagccatccgtatctcttgcgactaaatcacttactctaacaagtctattaactaagggattttcaccatgtttgggcaaaagattgtctccaacaagccactaggtgttccaaaaatctaactgggactcacttttaataggacaagcagaatggttagataaattctttggtatgccaaattcctttagcaaccagataaggaatgaagatatacgacgataaagggttccctttagcaaccagataaggaatgaagatatacgacgataaagggttccctcggcggattcctctgtgaggcttgaaagtctttgtcggaccaccattaagaagaacttgaaagctcacatatgtgatacaaaacataattattatgatgaaggaggagtcgaaaccataggccttgaggactgtttcaataaaatcccattctagcctatcataggcttttgacatatcacatttaatcctcacaacagtcttttttcattccctctttgttagatcattaactaactcctgagcaattgataggtttttcaacaatccatctacctttgacaaaaacaaattgatttggcaaaattaatttgtccatgactcttcgaagccggttgggggattgggtttttgatgtcttgatgatttcaatttggctatgttgggtgaacacgcttagaggtttctgactaagcctgattcgttggtttctagagtctataaagctcagtattttatgaatgagaatttcctttcaacagaacttggcaacaatccaagttatatttggagaagtcttattgaggtaaaagagttggtttgcaagggggtaaggaaggaaactagtaatgggaaggagactcttttatttgatgatttgtggcttccgaatggttcaattccaagtttagctagtttggaacctggtttggtcaataaaaatattagtagtatttttgtggtgggtgagaaaacttgggatgttttatgttgtcaaattctgccgaagggaagttctcattctaaaaatattgagctttgtagactctagaaaccaacgaagcaagcttagtgagaaacctccaagcgtgttcacccaacatagccaaattaaaatcatgaagagatcaaaaacccaatcccccaacctccttactacccgccattcctctcccaactcatccacgaaattccttggcaggaattcgtagatgacttccaccgaaaaattaaccataagttgttccaaatcaagacacattcccgcaaaaataggaaaacgctcatagcataagctggaagactttgagccacattacgaactagaacctccttaccaaaacacaacaagagtttaccattccaactttgtatatgcttccttatcttctctttcaggaagcccaatacaatagactagttttaaccgattatacttgggagatttaagtacataatattctcactagcttcatttatatttaacatagcataaacaacctcctaaataacatcgctcacattcctactaaaaaaaagtagtagatttactcaaattaatcttttctcctgatatcctctcaaaactatgtagaatctccatcactctttgagcccatcctataatatagctatcaccagcaaacaacataggagaaattgacaaagcacccttagccacacgacacccatttattaactgatttcgctcataccaacaaagtaatgctgaaaagcctccaacacaaataaaaaacagataaggagacaaaagtttccttgcctaatccatcgagaagaaataatgggccccatcctatgaccaccatgactaacttgatacctcaccgtgaaaaaataacccgataacagttgcactgatgttgtgaaaaaccaagtttctgaagcataaacttgagataattccactccatcctactatacgctttactcatattaagttttaacgccataaccccctcattcacggataccttacgcttcaagtagtggataatttcaaacgataccatgatattatcgaaaatcagccgacccggtataaatgcactttgtgtgttagaaataacctgtggcggcaccactttaaatcggttggccataaccttataaacaatcttgtagaccacattacacaaagaaatttgccttaaatcacccatcttcacaagattcttagtttttggactaagaataatattggtgtcattaatgccaattggaaactcacccaaagagaaaatctgatgaactaacttcatcacatccgcccctacaatatgccataatttttgataaaaccccagactcatcccatgaggacccagagccttatctgaatgcatttaaaacaaggctctacgaacttcctctttcgaaacaggtcacactagatcatcattttgagaagtttaaaccaaaaattgaatatcatcaagtagcttacctcactcagcatccaaaacaataaaccaagcgccactatcattttgcagcttaaaaatataatttatccttttacgaacactcgtcgcttgaaagtaacaactattcttatcaccatctttcaaccaaaactctcaagttaatttttgtttttgataaatagtatatcatatgtttgtttatttttcttctttcttctttttttttttttttttcaagtataagaaaaatatagataatataataagaaatatatatttttaatttacaaaacatattaatattggatgaataatttgtaacatcaaatataatatattttgacagaaaattatttcctaagtgtaattttgttgtatctatctagattcttgtctgtcttttttctctttgaaatcgtctaataattttagcttaattacaaataataataactccattcttctatggtttcactctgatcatcatcatccaagagagagagagagagagannnnnagagagagagagagagagaaccagcgagcgaagatggtgaaggtccggatgaacacggccgatgtggccgcagaggtcaagtgtttgcgtagattgatcggaatgcgatgttctaatgtctacgatatctctcccaaggtcttcttcttctcctttcatttctttctttttcccctaatttattattcttaatctctcaaatttatttattatttttgctgtagacgtatatgttcaagctcatgtatagcagtggcgtcactgagtctggtgagagtgaaaaggtttttcttctcatggaaagtggtgttaggctacacactactgcttatgtccggtaaattaaaaccattcactttatgattcttcaactgaaaatttgtattggttcttgcaccaatgaaatgtggttaacttagcattgttttacagggataagagtaatactccatctgggtttactctcaagctcaggaaacatatacggacgagaagattggaggatgtgagacagcttggatatgatagggtctgtactgtatcatcacataaagggcctatctttttgttgtttttagggagtatgatactgctgctgattacaaatattcattgtttccatgtttatattagaatcaataattgtttgtatgagttatcctaaaactaaggttcatttgatagttgctgagttcatgcttcctattttaaactgtttgacagcattcatgatggaattcactattgttgtgaactcctactggatttcataactgttctttgtctaattcttttaaacatttgccactttgcagattgttctctttcaatttggattgggtgctagtgcatactatgttatattggagttatatgcccaaggaaacattattcttgcagattctgattttacagtcttgacactacttcggtcccacaggtttgtggttgacattctttttttttttcattgaatttatcatgacaatcaaaggtttaccaacatgcatcaaatgcatttgttttctatactcttttctccccgatccctttttaagcgtattaatggagttgctggttgaatctatttatgatggtgtacttgacatgtgcaatttgagtataataaatgttaaaatctagaaatgttgttgttacctattggctttttgtctcggttgaagttgaatttatatatagtatctggttctgctactccttttgctattattactataagtaattatttctaggaagtgtcttttcttattctttcagtaatgggcatactgtcagataaataatactgtctcatttcactagggatgatgataaaggggttgctatcatgtcaagacatcgttatccaaccgaaatttgtagaacttttgagcgaacaactatttctaagttgcaggcagctcttacaacttctcaggaacgtgatagcattgaagctgataaggttgagtctgataaggttaatgatagcggaaataaggttcgtgctaactcaaaagaaaagcaggttactcacaaaggaggaaagacttctgatggtgctcgtgccaaacaacccactttaaaagttattctgggggaggggcttggctatggacctgcactttctgagcatatcatattagattctggcctagctccaaacatgaaagttagtaaagatagcatgttggatgatagtacacttcaggttttggcccaaggtgttgagaggtttgaagactggctgcatgatatcatatcaggtgatcgaattcctgaaggatatattttgatgcagaagaaagttttagggaaggatgtccctctgtttgaaccagaaacaggaagtagaagccaggttatccatcattatactgctatgctttttccattcctttgtttgtgcagtattcttaatgtgtgctttttgttttttcgcttttgcagatgtatgatgaattttgccccattttactaaaccaattcaagtctcgggagcacactcagtttgagacatttgatgcagctttagatgagttctacagcaaaattgagagtcagagagctgaccaacagcagaaatcaaaagagttctctgccatccagaaacttaccaagatacggacagatcaggtacttattttttgaattctttaatcggtgttatgttttcatggcctctaaagatccacttccagcaattactatgcttcctgcattgtgttttaagtattgtttgagttgttagatgaggggaaactagaaggctattctagtgcaagtggaaatgtttaggaactcattattatgtgcatcagtccccaatcttgattgaagtacataaacacatgtgaaattgatggcatgctttctactctgaaaataattactatgggacagtgttgtatttggaaagagtactgcatattgacgccattagtaaattcagtcagccaaattctttgacctctggaattaaattaattttcatttaattactatctaaatattcaacaacagaattaatttgtttcaattccacgatgcaggaaaatcgagtgcttactcttagacaagaagttgaccgtagtgttaaaatggcagaactgatagaatacaatttagaagatgtagatgctgctatattagctgttcgtgtggctcttgcaaatggtatgagttgggaggatcttgctcgtatggtgaaagaagagaagaaatctggtaatccagttgcttgcctcattgacaagctttatctagagagaaattgtatgacattgcttttaagcaacaaccttgatgaaatggatgacgatgaaaaaacgctcccggcagataaggtactgatcaggctttgtgattattttctgtatatttgtataatgaagaacttttaatttattttccttttctcttctcttctttatgcatgtaaatgttagaattgtgtcttcaagatataggactagttctaagtatataacgatccacacacactattagatgattttattgatgtaaatgaataatcagctgtttagcctgtactatctctggctttatcaatgaattaatgtaaaagaattcctatttggaatgattatcgttttcataatctcttcatgctcaataacatagaggctctctttatgttgttggaatgtccccttaactataatacatgtactgtttttacataaagaggggaatatgttattgagcatgcgtggagtatgtgatatctgaatcgttgtatgtcagtatccatatttactcttcacgactatctcttaactattttaggtagaagtcgatttggctctctcagctcacgccaatgcacgacggtggtatgaactaaagaaaaagcaggagagcaaacaggaaaagactgtcacagcacatgagaaagcatttaaagctgcagaaagaaagactcgtctccagctgagccaggtttgtttcttttccctcagagatgttcttactgttcaatagttttgtacaagtttttgttattttgacaacttcattgcctcataatattttattctctttgatctcttgtgaacttgtcatgtactcaattgactgtagacccattccaattactcatgatttgggaaacctctatgcaatagcatgcctgttacaacatacaaactggaagatcataagctaatacagatcagttttatttaatttttaataatcaataatattattggttataaattctatggctggtgaacaagaggaaaataagttatttttcttattatacaccaccattaatcaaacaaccttaactgaaaaaagaagaaaagaaagagataaatttcttcattagggatctgaataacatatactgtaagttaaactttctacagttaatgatgaaatatttctgcttcttatcacctaccatgaaatgaaatcaaactatcttttttataaagaagatgatgaaagaaaagttaaagtggagggcataaatatttaaatagatttagttgcaaagttataaaatttaggagaaagaaaagaaagttttgattttataaaattcacatagagtctcactagaccagggatgggaggggtggagagaaggttagaaacgaaaccactcatgttatacatgtttagtatactttattaaagaatattagttaagatgctcccaaagtgttcgatcctctcatttttcttaaaaaaatctacgcaggaaaaaactgttgctacaatttcacatatgcgaagagttcactggtttgaaaaatttaactggttcataagcagtgagaactatttggttattagtggacgtgatgctcaacagaatgagatgatagtcaagcgctatatgtcaaagggggatgtgtaagtttaatagctgtttatattttctcttagcatgttccatggttaaatgatttcagcttttactaatgtgccaaattgctaaaattttgctgcacttttggctatatctgataatgtgatggtgttatgcaacaggtatgttcatgcagagctgcatggggcttctaccaccgtgataaagaaccacaggcctgaacaaccaatacccccactaacattgaaccaagctggatgtttcacagtaagtatggttttttcgtaatagttaatttttctgtagtattattgtcaatattgagttagattgtaatagtgtttaaaccttagctttttaataccattctataggtgtgccacagccaggcatggaattcaaagattgtcacgagcgcttggtgggtttatcctcaccaagttagtaaaactgctcctaccggggaatatcttacagttggtagtttcatgattcgtgggaagaagaactttcttcctccacaccctctagttatgggttttgccttgttatttcgcttggatgagagttccttgggttcacatttaaatgaaagaagggtgagaggtgaggaagaaggaatggatggggttgatgaaagtgctcctcccaaagaagaatctgattcggagtcagagactgaagaacttgaagagtcaaaaagcctgcctagtttgcctacaaatctaatcaggccagatagtttatctggagctgattctactcaaaattttcaaacagtttccccagctgaaccagtaaactcatcagaactctccactaatgacagtaagacgtttgctgatgtcaatcaagagaatgtatctaatgttgtttcagtcccgcctcaacttgaggatctccttgatagagctcttgagcttggatccgccactacatcgggtaaaaagtacaagattgaaacttctcaagcagatttggtagaggaacatgatcatgaagagaagaaggcagcagcaagagacaaaccgtatgtctcaaaagctgaaagaagaaagctcaagaaaggccagaaaaacgacacagaaactgttgagcaggaagggaaaaaaaatcccggaggaagcaatcattgcgagaaaaatggtgctgcaaatgttgagcaggaagggaagaaaaaaccagtaggagcaagcaatcattctgaaaagcatgttcctgatgcaaagccagttggtggaaagatcagccgaggacagaagagtaagctcaagaaaatgaaagagaagtatgctgatcaagacgaggaagaaaggaaaatccgcatggctttacttgctgtaagtactatgacttgcacagtactagtactatgacttgcacagtacttgaccttgtacctgatttatttttgcattgtaatctatgttttttcccacgtttaaagtaacctttttctatgctgatattataagtgggtcatctaggataactattgggactgctgtaactttcaaaatatccattgttgcacagctattactgatttctacttttgtctatccaattaattacttgatgacctttgacatgttaatctcagtctgcaggaaacacaaacaagaaagacaccactgagtcacagaatgtagatgcagctccgactatagtgaacaaatctgacggtgatactcctaatttttattgattgaacttgttgcttcttagtttcattgtgttttaatccttacaattgtaataataatgttatcttttttctccttgttttattttatctggcaggtcctctagatgatgcacttaaaatatgttataaatgtaaaaagcccggtcacttatcccgggactgtcaagagcatctgggtgatgtgtcacaaagtcttgtgagtgaagttgaagttcctcatgtacccttggacgaaaatgcttctgagatggacaaggtagtcatggaggaggatgacattcatgagattggtgaagaagagaaagaaaaactgaatgatgttgattacttaaccgggaatccactgcctactgatatcctcttatatgccgttccagtctgcggtccttacagcgcagttcaatcttataaataccgtgtgaaaataactcctggcaatgcaaagaaaggaaaaggtaaccattatcttcaccttcctattgcatgcttatgcgcgagaacctctcttttatgcttgtgctttggcttatataccctttgtgcttgcactgatgaacagatcatttttactgttttattgtaagttttacattaaggaaggaaaaagtagaagagaaacaataatgaagaatagcataacataactcttaacaagaaaactacaaaacttgctgcaattcatttaagctcattaccctttctttgaccacttgcatttttcctttttgtttcatctctatcttttctagttatcttacacttttaattttcttgtattgtatagctgcgaaaacggctatgaatttgttcagccacacaccagaagcaacagttagagagaaggaattgatgaaagcatgcactgatcctgaactggttgctgccataattggcaatgttaagataacagctcaaggccttactcaactcaaacagaagcaaaagaaaagcaataagagcagcaaaggaaaaagctagtcactaataccataatgcctgcctattattagtctcacatttttttttttcatgaaaggaaaagcacaaaggatctacaacattcagagtgttaatacttttgtaaatgttaaattttgcttgggacaagtctttgttactagtcaatctgattttgcagtaaactaaacctcaaagttctcaaattctcaatacaagagatatagctttttgtttacttaagttcttttacattgttgctttgcacatcagttcactactttgaaactactcaaatctaattttacttattttatgtctgtagtacaaattttgcacacattttcaaattgaacaagtaaaatactagcagtttgtgtaatgaacaaaatgcttttctgatcagcttggaagcctaagtatgtgagtttgacaacaattttcacaagcataataatcaagggggaagacgaaaaatgtgtcttattctgaatctgcatcttcggctttgggaacgtcgctaagatctaaaccctccgctggcaaatcggaagtaagagggcccaagataccgtctgagctgatcgataatccactctgtagtttcaagcataaatgcagaattaggttcccatttatttggtgttactactgttcatcatttaatctaaagtgtcatacctcaggctggaaccgaagcatatctgcacgagccatggcttctgcttgggctattctttgcctgaatgtctgagccatctcctcagcctgtcagagcagaaccacaaacgtatgtacagttaaagtctcaacagaaactagattttggttgctaattatagatgactaagtccagcagataacaagttcaggggttttagtatttagaaaataccttctcgaaaacaagctttggattgcggatcatatctccaggtgtgggttctaatttcttggtagaaagactaactctgcttctctctcggtcatggctcaatatcataacctgaaccacaatttcatatttaaatgtaagttatcgatgtatttatttagtctgactcaataactgaaactcgcaatttgagtttgtatctataccttgagtgtatcaccaggttgaagcaccgttgcaatatcagcgacacgatcatgactaatctgactaacatgaagaaggccattgattcctccgatgtcaacgaaggcaccatatggcttcagactctggacagtgcctaggaccactgatccaattcctaattgtgcctggctgtcttgcatggccttgcggttactgagaacaagcctggcttgttcttcatcaacctccacaaacttaagaggaagttctttatcaagtagctcctctgcagttgttttctagtatgcacaaaaaaaagagaggtcacagattaagactttataaatgtctatatcattgagttgttacggttgataaacccataaaagcttgaactcttaaggaaatcacacaccataagctgcaaaaaaagtgacttcacaaatgattttcataaaacttgaattctagaagagcaattgtgacatattcacaattattgagaagagaaaaacacattctcgattgtatcaacttcaatatcatattctctacgaccaaattatactaaaagactaatacaatgatgaacttctgaagataacaagagcctcacaattgggaaactg

SEQ ID NO: 42590 - DNA, 2982 bp, Cannabis sativa
tgaaggcttcgaggaaaatagaaatgacaatttagtttgcaaattgaaatgatctatttattgtctcaaacaagcatctcaccagtggtacttgaagtttgataaggttgtgacactgtttgggtgacacgtgccactttcttgtggaaaaagatggcacaggtagcatgacataaaaatgagctttggaatggcttctttcaatcattttatgatccttgttattggaggaacgcatttggataagtccctttagtactttaagagtggtgatctgtgccatctttttgtgccaaaagatagcagaggtctcatagaccataaaggagagagtttttgtgtaattttaactttatgttcaagtactagccacattgtaccttaatgagtcaagtttttgttgatttccttcttagattgaggtctctaggatgaaaactcttgcgagggcccacaagttgggcactcttaggtgtaaatcccagcacttaataattggttagtattttcatagttttcctgaatgtgacatggaactctcaagtagagtatctcagctcgtcttggtcaaagcctcaagtttgattttcaggtataacattatcaattaagattatgtgcaactgaatatttttctttacaagtggaaaaagataataaaatttaccttattctttcaaaccaaatttaatttattgagtaagttatctacatatttctcgattctctgagagttatattacttgtctacataattgatgattaatgattttctttttatgcatcttatatgcatcataaaggtgcagtgtcgtttttggttttctgaacatttgttctctccgttcagagacttataatcgcagcagaggaggtatctgagatttgtgtgttagatttactgttgtgattggatctgaggaaagatatactgtgaaaatcttttcccttttcctttctcaaatgagttgttaaatatgccaatttaaatcatttaacagtttgatgtaaaatctatgtaactcaaaagctactcaacttaaatatcaattaactttatttaaaataaaaaaaaaaaagttacacttataatatatacaagatcatgactattaattaaagcaaaaaaaacatatcatagataaaactgatcttaattatatagataaaaagatgaattaattcatttagcatggagagtagttggggaagcaatattctcagcttgttgattcacattcttctcatagtaatggtaaattgcagcaccagaaagcacagccagtgtcaatgcttgagcgtgcatcctaattatttagaaagaccgaaacaaaatcaaacacttttcattttcatccaaaataatcacacaatttcaacaaatatactagaaatatatgtatatgtgtatgtatatacctggcatgtatgagccgaagacttggtttcataatgggtgcacttgatgatcctctagagtaagctaaagaggctccaatacctgatgcccacaaagctcctgcagtaaaaacaattaacccactttatgtcagtgtcaattatttctatgattcaaaatttaccttcactaaagaagaaaaaataaagaagaagcctataattaccaatgctggtgagcttgttttctgaaacccatgactgaattttttccatttgagctggctacttcttacttctttaattaatacactaataaaaagagatagctgataagttgatgagatggagggaatatgatatgagagctggtttgagtgttgaaagcaggggtttgggttagtatttatagagttagtgtggccccttggtttatttggatgtatcatatatatgcctttattggtccactgaaaactcaaactagaggctttattttaccactggtattttttttggaaagtacttgatagaaaagtgtgcctttcagaatactgtccttttatcaaatatacttaatacttatatagataagcccttggatttgctccagctgttgatcccagataaatttctctaacctttttttattcattagtattttatgcattattatagttttgttttgatcaaaaaaagttttggtatgtgttgggtgaaaaccacctcgaaaaccttttataaaattatttatcttcctactagatacaatacaattgaaaaaaaaaaaggaaaaagaaaacagatatcttctcttttgacttactgattaaatcagagaagaaagaacaaaagtctcactaataattaaattggaaaaaaaaattgcttattaagaagatcaactcaggaaattgtagctatcgtgtatatgaatgagagtaggtatattaccagtaaaagcagcagtagcagttaaattcaaaatatggtatattaaattcaatagatgagttaagaattttaagggacaacttaaaactgtgttctaatgagagataatggagtgttcaaagttgcactaaatctaaatccaatacagcggaaagtgacaacttacccaaataataataaatcattttctaaaggaattaattcgatttgaaaaattagaaaagtggtttttataatatatatttatattataagagagtttttgtaaaaaaaaaaaaataataaataaaataaaagagtggactcgcttctgtcagatctataaaagaagaaacctttcatatctacagggagaaacaaattaaaattcatgccaaaaaagttattagaaaagaaacataaaatcatacatattcaaaagccaatcaatattctatctgcatatatacataaataatggaatttttttttcataaatatacaacaaaaacaatataattacaaaaaatatgtaaaaaaaaattatttataaaacgtatacattttgaaaacttattacatgaaaccatatattttaatcattaaataatataaataattaatgattactaattaccataaataaattaa

SEQ ID NO: 42591 - DNA, 2751 bp, Cannabis sativa
agtgggtatatcttaaagaatatagaaataaaggtaaaaattaaaacaaataaaataaagtaggtatagaatgtaatttcctcctatttcaacttatactctaggcccaagttaattgttgcacaatcaccaatgcccaagttgacgtatgttgacccgagacacttccaacatgttttatgaagatatttctagtgaattttcttcgttttcatcaaataaaaagatacaagtatttttgggcaacaaacgaatctatttagggaaaaaaaacacctaaccaacgcccaagttaattgtgacactagttatcaacacccaagttgactatcaacttggaacgtgcggttttgtcactcaaataataattttgtcttgggcattccttgtattttagcaccaaatgaagggagagtactcgtattcagacaaattcatcattgaaatacctgaatgacatccaggtgacacctgaacactgcactaatgcccatgttcactgttagcactggtgcatgtggtttcattcatccaaatgtagttatgttttgggaattatgctagttttccaccacgaacaaggtatagcgcttgtggaagtcaaattttcactttggtacgtcaccctgagcctaagttgacatacttgcgctcaggtggccatcagtcatcacctgatgcatggctgagctcaatcaccataagacaatgaccaacttcaccaaaatcatgaaattagcttattaatgcactaccattaccttaacagcctacaatatgctaagaacatggtttttggagtttctagcacacaggttaactcttgcagtcaacctgactgttgggagtcaacttgattgttggttgctaaacacatcgcagtgtttcaatcatatcttgatgtgattctaagtatttcaaagatctttctacacatgtatgatagtcatatcaaaatttcgataatttcatattgaaaattgactcccaagtcaaagtacgatttttggatcagaacatcaaaaaataatttgatagtttatatccgatctcccgaaattgatgatcatcatctaaggtcaagatgaataatctcaacccttcaataatgacatgaaatctaccaatggtctcaaatatgctcagaaagaatattcacaacatagtcctgatacttgtaatattttattgttattttaagagacttccattcctataaataaaagactcttccagtttacttttcacatactcacactttgttacttcaaagattctctctctagattcagtacgttttctctctataagctttgatttgattataaggcttcttaaatctttctcttgtaaaactataaatttttttgtgattaataaaagctcaagtagatgtagttcctttaccagtttatacggagagtgaactattataacatgtgtttatcttactattaactctttttttatagttatgatcgcttatcagatttgtggtagctaaagggatttaagttggtgtacacgatggatcttgtataaaaagtcaagagatttgactctagggtttccaggggactttgattcacttttcttgagtgtgggaacacaagagtgggtatcttttgtttttactctatcaaggaatgtaaagttacttttgtaatatatgagttggtgattgtaaattcgcattgattgataataaagttatgtacccgatctttatgatccaaggaatagccgttcgaaatgtcttacgaacttgtaaattttgaattcttctttttactttaatcttcataattcaaagtttttattcaatttaatagattagattcatatcgatgaaaacaacttacacaatataaaaataatgtgcaagcaacatgttataaatatctttatgaaaataacagtttttaattttgtaaacgaaaaattttagtccttaaaaatatttaaaataaccatgcgtccgtaattttgtaatatttttaatttttttggttaatcattaatttttttaatgggcagctcatatgtacaactggatgtaactaattttttaatattatatagaatttataatataaaattctattgtgcaccccctaaaatttagtgtaccgatgcatctattttatatttttgacatccagattgattcaattgtaattttctaatatgacattgtgtatcatagttatttaagacatcttgcaattttttgagaaatttaaaataatttaatgcgtcaaaataaaagcatcccatcctttaacctttaactatgtaattaagggtttttttttttgagaaatataccatgcaataaagcgagataaacatgtggttctactgaaacaagtaaagaattcagaagtaaggaatatcgtacccttaagagcacaaagggcagccacaccaaaaatcatttgaataatattaggaagcaattggatcatgaaaacccctacaagagagagaatgtaggccaataaaagtggaatgggaaagcttcggctaaccagagttttgccatttgacatttcaagatcttccaaacctttcgatagttcattttttgtcagcatatgaaaagtaattccttcaggaactgctacttagagtatatgtcattataagcaaattcatagttagggagaaaatttgagtcaattaagggagaagctttcttagtaactaatttagatttatctttagtgtttcttgaggtcatgattgaag

SEQ ID NO: 42592 - DNA, 4037 bp, Cannabis sativa
  modified_base (2698)..(2705): a, c, t, g, unknown or other
tattcacatagagagaatggctacgcttacggtacctcatccagttcctcctgtgggcgacgattgtgacaatctacacaaagcatttcaaggtttctctttaattatcatcacataatattcttattttttcttcatacattttttatgttctattttttctaatcacgatcgtcaatattatttcaagtcttgcaaagacttaagaatttgaacaagaatctgtgtttattaaagctaaattcgttctaggaagacacaacatttgaaaaggctttgaaagagcaccatttgttacctttaaattaaacatgttcatgtggactactctcaagtttcaacaattttagtcattttaactagaaatttgtcagactaacaaaattaaattgtaaaatttgcagtgtaaattcagtggcaaagttcaattctaggtcagacctgtgaccaaacatgcatattttgccaataaaaaactttagaagtgccatgattatattgatcaaattatgataatgaattaacaaaatttgaataatttaattttcacttttgaatcttaaattcaatatatgatttgatttttcaggatggggaacaaatgaagaagcaataatctccatattggcgcataggaatacaagtcaacgtaattccattcgccaaacttatgttgagacatatggagaagacctcatgaaagcattagacagtgaactttcaagtgattttggggtcagatttatatatagcttaaccattttaaattgaaattcttgcttcatttgattaataactaataacaaagtgaaaaaaaattgtgtacagagagcagtgcagctttggacactgcatcctgctgagcgcgatgcattgctagcttatgaagctgtaaggaagaacactgcgaacggccattatgttttgatcgaaatagcttgtgcaagaagttcacacgagctattccaagtgagggaaaattaccatgctcgtttccacaaatcgctggaggaagatgttgcatatcacactgcaggcgattttcgcaaggtagcctctgcttcttgttatttagtttgttacaaaaataagcttatatttcaatttcttatggagagcaatatcaaatttattaccatcaaaagttggtgtacgggagtctcaaactcaaggacccacacaaacacaaatcctctactaaaatcataccaaacatatgtttgattttacattctcattcccaagaatccaaaccctcataacaaacaccttttgtatgactaaggtagagaagcataaaagaaatgtgaaaacctattttcttattgttttgttgtgttttgagtattttctatcagctattggtgcctctagtgagtgcatacagatatgatggagctgaggtgaacatgacacttgctcattctgaggctaaaatactgcatgagaaaataagtgagaaggcatataatcatgaggaaattataaggattctcactactagaagcaaggcacaactcaatgcaacacttacccactataaaaatcagtttgggaatgatatcaacaaggtatgctcaaattatatgatgtttgaatttgtactttggttggtgcttgtgtccttacaccaaaacacaaaacaaaactcttctaagtcttaacaagtaatgcttgagtacaactccataactcaattggatttgtttaggcatcagagtattgataggcttctggttttctagtctacaagtttgatttccttacttttaaagtcatttggtttatgctgtaaaaagaatccaaaaggctaataaaaagaaaaaaaatgagttataatttttcatgaaagaagtataagctttgattacaaacggtagagggctcttcgaatcgatcacaaaatacttattactctcattgatggaattttgttgtgatttgtttgtggaaaaacgttatgtgcaggacttgaagacagatccaaaggaagactacctagcattactaagaagcaccataaaatgcctgacttgtcctgagaaatactttgaaaaagttgttcgttttgctaccaaaggccttggaacagatgaggaggctcttacaagagtgatagtaagccgagctgaggttgacatgaaacgagtcatggaagagtactacaaaagaaacagtgtcccacttgagactgatataaaaggtgacacttctggagactataaaggcatgctgctcgccttgattggtcatcacaatgcctaagttatttcccattgtgcatgtgttttcttgggtttttcattctaataaaaataaatgataatatggacccctctttgtactaagatttcatgagacagttaaagatgttcttgtcatttcaaaatcactagaggattctgtattctcaagcaaagaaaaaagggaatttggctttactttgtatcatatttactatgttgtgataataaaggctaattagaatatttatcccctgaactttaacatgtaccaaatcatgcttcctgaaatttttttggccgttaaaaattccctctaaattattgaaattgttagatttaaggacttttgtttaatttcattcaatttttctgtttcggtgattttttaagtactaaaccatgctcaccaaactttgatatttaccaaatcatgcccctcgaactttgacgtnnnnnnnntcatgtctcctgaactttcatccatgttagactttctttactaaaattagacaaaaatctttaaattcaacaatctcaatagttcaggagatatttttaacgacctaattagccgataataaatttgagcacaaataaaagtgatcttggttatgttggtatctgattttaacttataacttctgtaactttatatttgtctaatggaagaaagatcagacgttacaaaatctgaagagttaaaaaaaaaaaaaaagtgtttaataaaacttactgtgacaaactaaataaccatcttactttaacaaaaatatttaactaatacatttgaagttccaaacttacaactaatgaaaaaatgtttctaaaaaatactaaagactaaaataaccatctacatttacaaatatatttaactaatacatttgatgtttcaaacttataactaatgaaaaaaaaatgtaaaaatactaaagacaacaaggctaagtgaagttgctccataatgatgcagagcaggatcaaaaattagacgagcgaattcaaaatgtagatcggtgcttataatatttcgaagaaaaaatcgcccttgaaaatggattgttgcgcaagtttgcttcgtgtggcttgattgctttaaccagaacatcgcgtatgcggccctagaatacataatagaggaaaatacattaagaaaaggaaattaaaataagacatcatgacatgacatgtataatgagtttaggtgaaactaagttgttgaatcacataccctagaaactcggagagctacttgaatcacatagttgccaagttcgtgttgaatcagttgttgaaagtggcaactcaaaaccagttccaaaatgagttttgagcgatcaatgtaattgaaaaattcgagacacttctcaacaacatggctgctacatttctgcattgataggtgaacatatcttccttcaaattgagcagccaaaactgagttgacatgtgggatttcttgctccaagatacattgaattacataatttctgtataagaaaatgattataaataagcaaaagaaaatatacaataattatagacttaatatttatagttgacattagaaggtttaagtaattacccatataaatcttgagcaagcattagtgatttttccaaaagatctacaatcaaagttttcttaagcatcccatcggaaattctgatgcattgttgcagaacatggcatccatatttgttagtggcaagatcgacattatacttgatagtctcaaaatatatgtgctgccaaatatattgacaaaattcattacaaatattatagat

SEQ ID NO: 42593 - DNA, 3345 bp, Cannabis sativa
acatttatgtgattttatttaagataggtccaacttattgaaagtggcttgccaatcttgtgtgttcacatatcattactcgtaaaatacctcatagtggtgttactagtgtcttttagctattttcatcttaccataattaaattcataaaagataatgatctgcttctttgatataataaggagcatgatcaagcagttgaaacagctcttgggtattttactaacagttaaacaattgataatagaactcagcattagattatagcagctcaaagtaaatgctaattaaacatttaaagacaaaacagaagcaagattgaaggaaccaaactcaaagaatgagaacatacctgcaagtgatgtggtagcagccctctaacagttcaaccatatggttacacttagcgcactgacgccacaacctttttgatgcaagagacttcagtagttgttcatctccacggggatacgaactcgtctctctgtagtcattgcaagacatattgtagtgccaggggactctgcaatcgatacagaagaacttttgacatttcatgcatttcctcgcaccagagcgttcagcaccaacaaatgaagtcttggtatattccaaaacctcattctttgacattaaggcagagcatttgggatctgggcaataaactttctgtgtagtgggaatagcagattctttcattcgttgatccataaccttcactaactcaggtggcaaaaatttctcacaactatcaatagctaccacagagttgcattcagcatgtgggcacttggctacccttccatcatgcaactttgcttccacatgttgtttcatacaagtaaaacagtacctgtgcagacaaccatcaaccgaaaacatctcagcaacatctttatcttccatacaaattgtgcatgtttctcttttagtcttgccattgcaagtttcttctgtccaggcaatctgagcaacaacagcatctcgagcagatttataagcaaacttaatgctgtttggggttgtgaggagggatggaacacaataggtaaacttcctacgaagaagatccacttgattgactaatgttgtgatttggctatttcttggaaacagtttcccggtaatctgtgggcagaaatacaaacaaatcgaaagtaagattcatatcactatgcattcgaaaagacagataacataacgagataagattttctctaaatattaacatgatgatgtcaagaattatgctaacaacaagaacaaggacatgacaataagaattagaactaaacaactggcatttccccctagacagaagatttaaaccgtctccaatagataagttacaagttcacccaaataaaccaaaaggagattaagactaaaataataatgaacaaagagaaataatagaccagcagaaaaaacttggagtaatacatgcctcaacctatacaagagtatgtacgtaaaaattcaatagaaatccacgatagcaaactcaaggatattgcttaacaagtaaatgaatagagctcaaaataggcctattctatgacacactgatgggtaacttctaatagttaaggctggtaacatttcaaattcttggacactaataccttgccaattcctcaagctatcttcaagtgttcaccaattaaggaccagaaaatagtagcaattaatgtaggagcaaacacactttacgtgactgaccgtttgagctatccttggtaaaaaataacacaaagtttcgagcctgtgtctttatactaatttaaaccaattaaatagctctatcacatgaaacatatattactctaataatgatctattagtgctattcacataacattgatattagaaattgatacacatttctacaatactcaatttagtttaaataattctacatttgtaaaaatacttaatctaaaacgttctagataattgtagaatagaatttcctaaacatgtgaaaaatactatagaacaacataaacatttctagaccaaaaacaattatagccacaaaagcttgaagctagcaactatcaatacccatcaagggttccaaattgtgacacaaacatccaaaaccaaaatctacaaactatgaataaagcttactactttcaacataaaattttctcttataaccaaactattctcatcgactaaattaaactcatcacctatactctaacttgtaattgaagcaatgtacattttcattcaatttctattctcttactttgtcgtttccacctaacatataatacccaatcaacttcatctcagtgtcaactatacccaaaagcaatagttgatgcccaaaattaacaaaaccaaataatatccaattaaaaagacaagcaagaaaaaaaaaatggaaaaattgggaattaatgggtcatcaaggtttgaaaaagactaacataatggtaaagtgcattatcctcgcaaaaaaaggtgagacttttcaagtccaaagccaatgccttgtctaaaccctcaatcagagcttccaactctgccgcttcagagctcaaaaccttcagattcttcctcgaatggaaaagcaaattatctttaccatcacaaatcgcaatcccagcaccagccaccaccaccttcgaatccctaatcatctcctcgctcaccaaacccttgaagtacaatctcaacacctctgacccaaccatcgaagaagaagaagaggacgaggcacccttgctattattaccgtaaggtttctcaaaccaatctccgtaactcgaccaataatcctctggcaaagtctctatttcagacgcaaccttctgatcatgaatccgacggtccagatcctccctagccattctccattcctcactcgatcgtttccgatcaccgtactcctgcatgtaacattccaaatctctcaacaaaagcgacgaagcaacgcccaaaacgtcgtcgtctttgacatccgcagccggaacgacgtcgtcttcggtgtccatcttcgtcgaggaggtggatttgttgttgttgtggagaacaagagaggaggtcatggcttcttgcatttgaatatggaaagccaagtcgaggtcggagtctagggtttgagcggccatgagttccttcctttgctcgtccagtgcgagttggagaatgtaggcttcatcatcatccatggctgccattgttagttgtttgaaggagaaagagaaggaaaagggtcgtggaaattttcagtttttcgtcatggagggagacgaagtagcttcttccacacgaaaccaaagaaagttcactctttttatactgaaattttttattttttttttatt

SEQ ID NO: 42594 - DNA, 5582 bp, Cannabis sativa
  modified_base (1685)..(1688): a, c, t, g, unknown or other
atcggatcggatggtaaaatctaatatccaatatatgattggatcggatctggataggcctcaaaatattggatgtgatccaatgaacacccctagtcaactgtataaattttattttcttttcaaaccaataaaagttttggatagcaaaactaaataactcattttaagtaaacatttacatgatcacttttttggaaaataattgataataaataagaatagtaagtatttatgttatcaattaaaaaacaaataaggggggaaatgaagcttcataatttgctacgacatcatgctaattgatacattttacaagcattatagtacatagagccgtggctataaatatatctacataattaatagaatgctacaaattaataacgcatgctttattggtgcttttcaatacttaaatattacatattaatatgtaggatttaagttatctctgacaaaaaaaaatgtgttttaattaattcttgttcatctatttttatttttttttaccatattactaaataagaacaattattaatactaaaatgctaactctttaatggacaagaattatgacacaatatatatttggaccaaaaaatggttttatgtctgtatatataaattccagacttccagtaataaagtggggttagcatatgaatatctacgtggagacaacaatccgccttagccgtttttttgtcagaaaatgatacgtaatttcaatcttaacaatttatttcttggcaaaaataaataaagaagcattcgattaataatcgcttcgtgcttacatattgtcgatgtcaagtcattatgatcatctagatatagtgtaattgtgcttagtttaattagttaaataacttattgtattaataattactttgattgagaaaaatctgggactagttattatgtgtgattcaaacatataatcatcagtattccacttaaataacactatatttacaattaccatgattatatcaaattaacattaaaatatttgagatgtgacaattagttagaaaattatataattaaatagataaataaagaaagaatgatcatattcttgacattgtaacaagtaattaatgaaagagagtacttaattaacttaaacttaattaagatttttgctctctacattttgaaatatactaaatcatgctttttaaacttttctaaccgttaaaaattcctcctgaactattaaaattgtaggatttaaggacttttgtctaatttaattcaattttgataattctgtgtttatccatgcactaaatcatgctccacatactttaatatctaccaaattatgtccctcgaatttcgacgtgtaccaaattatgcttcctgaaacttacatctatgttagactttccttattaaaattggacaaaaatttttaaatccaacaatttcaataatttagaattttttttaaaaaaccttaaaaattcaaagagatgcaaaaattttaattaaccttaacttaaatataatcaataatttcaatacaatacattaaacattaattatggttgggaaaaagaataaaacaagcaatgagatgaataaatgattaatgagagtttctttctttctttctctctctctagatctcttctctactttatttaagggaaaaaaaataaaaaaataaaaannnnaaaataaaaaataaaaataataatgtgagtaccaataattgtgtctgtgtctgtgtctgtcaaactctcgagcccagtgctctccttccaattgactctctttctgctcatctccgccgattgcccaaaagcccaatttttttaccgataaaaggtaatgctttaagtttcaactttagccaaaaatcattaactcctacgttcagtcatttgacccttcattcacatcacgccaattgccaaaaccactccacgctcttaaattttattaaaaaaataaaataaaaattcttaaaattaataattcccatgtttctaaatttaataacaccaatcaaccttgtacaaattttagtcactcataactaattggtcaccaatggtgggggtaggaccgaaggatcgagacggagtagtacttaattatgactaatcttataatcatcttagctacgtatatttccttctacttgtgtgtaaatgtaatattatcatcaaagaaaggtaaaagtgatatgtgtttgcgggcctaattaaagatcaataaatagaaatgagagtgttgattatatacagttacaattaagatatgatgactagctaattgtgttacttaatgatggattagtctataaaacaagcacttatcgaggtagaaaaaagaattttaattatttccatttaccgaaaggatttatacacatacatggggaaaggaagaaagaaaaaaaaaagtagcaatagttttagctatttcttatagcttaaggttgtctttttcaagtcattcgctcaacttttggaatcaacttaagaccaacaacacatgtaagtgtcaatgtttcctttgaacagataggactaccaacctatatatctttttagcaaatacatgaatcaaataaaaagtaaacaatcccaacgtatgtaatatatatatatatctaattatatatatccccttgaaacggaaataaaggttcatttttttccgttttacatttaactaatgaaaattaaaatatgtgttatacattgcaattgaatggtcaaaaaaactgaatagaaaacctattatataggtagagaggagacgaatgatatttgtagagaggccaaaattaccttaaatctatatataggggaactattactttaatcatctgttacaacctaaccgaagtacatgtagagcttttcgcctatgcttattcccatacttgtaatgaaaatattacctagtgtttaggtttagctccatgtttcactatatttatgggttttctttccttaactaattaaccgtatcagtagtcgtaattttgtgatgtactcttgcactaaaaataaaataatgcaaagtattattggttacatttctcaatcaaaattatgattccaaagtctccagtcattttcttttattagctattaaataacaattaagagtaatagcacccttaatctatatagccttttaggctttgtagtggggagagtagagaaatgcgataatagtaatgggcatgtattaattaaaaatttgtagagtgggccgaccttagtagttaatacataagagttgtatatggtagtgcccagtgcatgtggagaacatcataagaacgtagttatatatatagattttgatttatagatcataggtttccctttctaaagtagattatattgatgtcatttgccatttaaactatgtatttatgtctcatcaaagggtgcatatcctttaccaaaggacaaagcaaattgataattgatacgctttaaaagattcaaagacaaagaggcaacaaaagacaccatcccaaagggacaagaataagagatttaaaatgagtatcaaagaagaagccctcacaatttttaaaagagaaacttgttttcaatggatatatagattaactggtcataatttgaacccgctaaagacagaatatgggcattaaactttttctattcttgttcagtgtttacaaataaattatacaactgattggtgattataacaaatgaagcttcacttaccaacaccatatgaaaaacattttatatccccaccacctcagcctaatagacttgtcgaagttctgaagtttattacagtaaaaatgatgacaacatatagaatgaaatcctaccagatcaaatggaagagaaagatgaaacctgataacatagattattaaaaacacaaatacaacataaacacgaactaaaggaatccctctattcaaaatattgtctttggtagagaagatgaaacaacatataaaaccatatagcctttactgggtggaaaaaatgatcttacttgctcggtattaagatcatctgatttgggaattaggagaacagagcaaacaagatgcatctgatccaacgacagcaagattacaaacagtacaaagctgaccttcttgtgcaggcacaagatgagagcaggcattcttctgtccccgatatatgggcacatatgttgccccacatacaacaaaagggttcttgaactcatagttcaactgggaggcctccaacagtttttgcttggttatctttgggattggtctccaacaggcgtcttgcaaaatttgttgcagtgataagattaccagctttgtagcacacagtaatctcaagtgaattatttgcaaactacagtgggtgaagtaggctgccagctcttgttgttgaactggatcaccctcactttccttcctcttgagctccaacttcaaattcagaacatattcctttacgataataattaattcttttatttcatcaacctctctccgtgaatctacaaatatcagaggaatagtatgtagaatacttagaaaaaggcacaaagcctcttgaaatttccattagttgttgccttatatgcatctttaagcttctcatccagcttagaaagtttgaacactagaacaggggagcctttggcattggggctagctgtttcactccatcccctctcaatcgcaacagaaatcacaagagctgacgagaaggcccttattagataagaatggctacccatgtgtaactcaaggataatgattttaatggagcaaaattgtgtaactcaagaaagaatgactaccgaattgcagtatcaaaattactggcagctgcatgttcagccgcaagagatgacatttggacccaaatttgactattggccataccaggaattgggacaacaaatattgagcgggcattgttggcagattttggagtttcagctttaggtggaagctcaagatcttcaagatcccatcctccctcatcattttcttcatgtacctccccatcattcaaaagctgatatgtatcacatgagaggaacgtgagtcaactcaaagaatataataatgatcttatatcattactataattaaataactcattataattaaatataaatttaatagaaaatgttcaaactcgctcactgggtagtctaacgcgagacaaagataataactattaaactggtatcgacgagttgcatgtctgtctcgggatatactcagataaatagacaagaagaggatattcacccactcgagcagaataaatgtgacaacacacatccgtctcgcgttacacatagtgagaagatcacctcgcataaccaatgccaataatacgacgagacgaattatatcttccaacacttagcattttttcctttttaagatggacaaggaggataactcatatccaacaagacatgaccttccaagtgagcaataatcgtctaaagaataaaaataaaaagcggttggatagttattagatattatcccatgtgtgattaaatgaaatgtgggaattatccacacttcatgaacagttatattgaac

SEQ ID NO: 42595 - DNA, 5203 bp, Cannabis sativa
cctaaatactatacccactttccttcaaaacccttttccgaaatctcactccggtgatcggagctccgttttctctgccttcggtcggcgactctctttcaccttcttcatggtcctctttcttcttcatcattcccgggacagagtagcagagctggaagctggaagataaggccgtgttgaaatcaatttgtatagggagactgagaataaggaatcccaagaagaaaaaaatgaatgggaatggagtggcggttggaaatggaggaattggtgggttggaaaacgagtacattcgaagacaccataggcatcaacccggaggccatcagtgtagctctgttctttccagacacatcaaagcccctgttcatcttgtacatctctatatctatctgtccatctatcctttattgcttgttcgtgtgtatacgcatgtgtattctttcaagctctagggtttatgaactgtgtttatcttcttattatgatctatttatttgatttcgtcaactttttgaaaaattattgaaattgggtttgttcattttcttgcttttagtgtttgtgatagtgattgatttccgtttgatttgggattgttttgggtttctttatttggattttctttatctcgatctatgaatttttattggatttcttaatctcaagtatgtagggtctatttgacatttgaggtttgttgaatttgggaataaaataaaatcctggaaaggtaagttgagaaaaagataaagactttgaatcttctcattagttttactgatttgtttggttacaatgttgaattttgtagtaaaagtgtaatttttctaatggtatgtgtgtcattgtaaaggctggttatgttacttaacaggtactgttggtgtgtagagagattaaatacaccaaaaaaagaaagaaatttgaccctactgacattctgcatttggaagcatttcttcttcttcttctttgatttgaattgagtgtttttgttttctatttcataccagttggagaatggagtataatggggtttcagtactgtctgaggaattattatatgttatgttatatgtggtttgtttgttcacttgaaaaaattcttcatcaggtttggtcattagtgaggcgatttgatcaaccacaaaggtacaaaccgttcatcagcaggtgtgttgctcaggggaaccttgagattgggagtttgagagaagttgatgtgaaatctggacttccagccaccacaagtactgaaagattagaatatctagatgataacgagcacatcttaagcatgaaaattattgggggtgaccacagacttagggtattcttcttcttcattctactcatgtttttacttatttacttctgttgccattgtgatttcatagcttacttgttggtgagtaactttaagtttgtgcacacaatgcaattatctggccttgttggtggaagggttttggatttttctgagtttaaacactttgaaacttgtcatggtgtgaaagcaattatcaagtgctattagagtcatgcaccctcaagtggaagacatgggctcggcttcaaagggggtgtattgttaggatcgcacattgacaaagtatgggattggttagtagcctaagagaggagggtgtccaagtagttatatattactaaccaatccttgacttggtccctgtgagatcttaagagaaatgtagctaaatgagttaatcattatttgactagggtgttgtgcggactgcggaggttacaatcagtctgagattaaacttcgttcttggacggtcaattatagtagcttctgtaatcttttattattcatggaagcttgtctcttactagcctttccgaaacctgataacatgtgatatgtatttgtaaggacctaggtagcgtttggttgggaggaatgagaataggaatggaataaataaaatttaaaatgcataaaaaaaaaaaattgataaaaaattattaatttttttctcatcttgtattggaatgatattttttttcatttcaaaatatattagtcattccaccaaaatgatgaagaagtcattccattaaaaggacattctatgactttaaaatgcaaccaaacaaaggaatagaatgaaaattgtttttttccattgtattttattaccaccaactaaacgtcactttcttgcaaaccatattgtttagtttacagacccttttgtcttgcagctattcttatgtagagtttccttttcttctttcaactaagaaaatttcaacagagaatttctatcatatttgttttctagtgcacctttagaagttgggaacagggaaaatggtcccgttgcttagtgagtataaacaagttgtgtggatcgatgtgtaataatctgtgatgattactcatattcgatagcccagttgcacttgcatttgactttccatggagttaaaaggagttctctatattattatatacgttacttaattcattggttctattaactgtacgcatccttaaccatcggtcctcaacttttctttgtatctttacagaactactcttcaattgtctcgcttcatccagaaatcattgatggaagaccagggactttggtgatagaatcatttgtggtggatgttcccgaaggcaacacgaaagatgaaacctgctattttgtagaagccttgattaaatgcaatctcaaatcacttgctgatgtctcagagcggcgtgcagtgcgcgacaggactgaacctattgatcggatgtgagagtttggaactggggaccaaagtttcaacctaccttagactgcatggatgaagctttcgaggctttcgcatctcggatgctctggagacggacatgcagtagtattttccgacataggccatgcagtagtatatatctcttatacatgatcgttcctgattataatcaagataaaactctctcaaagatgggaatgtgttttcaaaatcatcaagaatcaaccctcccattcgccataacttaaatcccaaacctttagaatatttattggtagaaactgtcaggttttttagaagatcttacagtgttatggcaagtgttttaggttggtaatgttacctatgtattttggtaccccatttcccaaatcattacctcagtagtcaaaatgttcaatagatttcttttgtatccaaaagaaccatttatgatgttatttgtgagacatcctattaagatttatgctagaatttaataagcaagtagttgttgtagatgtatattattgagtttattttaagaggttccttcctaatcttttctataaaattgacacacaggcttcaaacttcattttgtaactatctcacaattgagtttttgtgattatttgatatgtaatatagtttggtttcatgagacttatgtgatatttttgtaaaagtatatggggacttgtgtgatgtctatggaaaatgtttatgtgataaggtagtaatattgttggaaaagatgaggaacttttatgaatatatgtttctttattttgaaaattttaatttttgtaatacatttttttaataaaaaagagaatgctacaagaatctaaggtaattggttcaattaagcatttaatttaataattaatatgagaaattactatttataaagtgtcacttcatagtactatgctctttcaaaaacaaataacaaaaaattaactagttgctatacttctcttaaaaaattattatgctcattcaaaaattaataatgaaaaaaatttaatccaaataataacatattgttataatacttatgaaataaaatgctattaatagtaagactaaatttactaaatttatttgaaagaaagaccaatcttatgattgattggaggattcttgtctctattagtgcatgagtctccattgttagagcaagagaaaatatccggagacataaatacacttggaatgacagaaatagtgaataatgtcccaaagaaaaaacaaaccaaagaaagaatataacaccaaagcctcagtctttttaacaaagcatacaaaggagaaaataatgaaaggaccaactaactccaataacacaaaattcacagaggaaattacactatatatttatttttcattcatttcttattttaatttttttacttcttttattactctttaatttatacttagttttataggtcatatccttattatgtgcattagagattctaattttaataagttatgtgaggttatatttaatactttgattatgtagttattacttaattaatgtgtaacaaaaaatgatatttctcaacgtattccaaatttatatttaaagtagtcaatacgcatgttctaacttcaaatggtgtagcctcttaggtgtggagaacacataacaagtcacatcaataaactctttggactaataatgttaggattttcatgaaaatttctcttaatattaaattatgtactagacaatatgtttcatattagatctaaagttaagcaatatctttcatatttagaatattaaagaaatctaaatgggacaacgcacgaactcactaataagtttctagcatggaattgtaatttttaaaacattctctcttagtgatttcattagagctattgcaaagagagtggtgaggtacgggaaaggaaaatcgacagcagttcaggcaatcaagaagcaagaaggatgagatggatgaattagaagcaaactctgtatttgaaggggagcaagttccattaacgccaagaccagtgatgaaacaagtgcagcaagaagaacataaggtgagaatagaatttgtgagctgttgccaagaagagacgtgaatctcaactcaagtcatgtaactgtttttctccctcaatcttaagatctggaaatgtcattcaacgtttaagggctaagtttggtgaattagaagctaaggaagggaaaaaggagtatggggttaaaattgatatggatgacatagcagatgaaatattgttctggaaatcaatattggtttgttatgttgtaggggctaatccacctctcaatgtctttgagggttgtgctaaaagaatttggaaaagataaaaacatagacaaggttggattactagctcatggtgtgtttatagttcgatttcaagctattggatgaaatgg

SEQ ID NO: 42596 - DNA, 7026 bp, Cannabis sativa
tacaacagcacactccaatctctgatagagcattgaaataatgcacttgcgctaaattaggtttctggcgtaaactattaggctatgtttggaagttggattttggcgaagaaagtaaaaggtagtagggaaaaaaaagtgtagagaattataaaaaaaaattattttactttcttttccattttttcccctacattttctaaatctttttctttttccactaaaatctaacttccaaacatagccatactatgagatgataattaatatcttctcactgatgcaaacatgcaaaaattccttgacagtgtgcgttgagtgttaggtattcaaaatatgagtattgaatgtgtgtatcattcgtatgttgaatactgtaatctgtaaatactacttgcaaatacaacacatatttcatgtgtgtgtgttttgggtgaaattccacatgttgaaatgggaaaaaactggtaagaacctcttgggatttacttttttttaataaaaaaaatagcaataaataaaacccttctaaattgaaaacaaaatttgaccctcatgtacagtaaattgagtaaattgataagcaatggaaaactgaattattatttaaatttgataaaatatttgagtttttcaaatgacaaatcagtgatagattttaaactaatctttgtgcatcccagtatagagtaaaatgtactctgaactttatatatgtgttccagatttagttcaacttcaaatgagatatctaataacatggtttttcataataataatatattaatatatatattttgaaagaaacattttcataataacaatttaaaaatcaatgaccgtttcccatttttcaaacacaaaaggattctgtcaaaaaaaagatcactagaatatcattatgctattaagctatattttcaaaattaaaagataatggcaaagatacatactgaaaacttctgcaaggagacttgactttcggcatcagctttggcctgatctccgaaaaattgggcagatgaaattgattttgcatttgaaaacttctttcttgcttcatcagtttcctgaacctgatgcacacgagaagagagaatgacatgaacatcaaagactatccaataaagcacaatgatatgtagagagaaataccacgttcataattagcaaatgaccaagtttattgtgatttgatctattcaacagccactaacatatcctaacaacaaatctattaaaaaacacgtcttgaaaataaattgcttctgtagttatctcaatcaactacatcatgtctgatccaagtactaaaaacagcttggagaaagatggtcataccattcagattctccatcaacaactatagtagtctacccctactagaaataatgtgttgccacatgtaacaattaaacaggaaactgcagaaagcaacatgcttgtttatacagatttaagtaagaaggccggtaattcaggttctccataaacaataatttatagtccattcccactagaaactagttcattatcaaatgtaacccaaacagtcatggtctcataggcttgacaagtagatttaaggatttcaatatcaataaagaactagaatagtaaggtctcgctggcacaagagatgtatgaaaggacctgttgtcgcatattgagtatgcacacacactacactaattgctagaatttcttccgttgtatgattaaattacactagacatttaaaacgagggattaaaccatactattaactaagaagctgagttatggagggaatgatgtagattgtgttatctcaaatgacaaatgagtaaaaggcattaagcattgttgaatttcaatgtttccaaattagtgtgtcagctcagccatccaataaaataaagacacacattaaatccaaattattctccaattctacacacacatccaattcagtatcacaaagaataagcacaaacaaaaacagaacactaaaaaacactttttgaaagatccagttgcttctgtcaaagatcaataaccagcagcaaatgccagtccccagactccccacttcaactaagtttgagcttaatcgaaggaagagactctagcacaatctggatgcaagcagtgttaatatggttgccagtaaatgtgatttgtgttgcgctagaattttcaatatagctgggctttgaaccattcatgttagaattaaatttccttaaaaaaataaaaattgaaaatgatatgtgcaggacaggagctaataaacatcctttccactatactattcagttcttgtcaaaatgcaaaataaattagtattttgacgttgacaaatcaaaacaaaatgaaaaaaaaaaattcaagagaaaggattttttctaaagcagaattgtctaagacaagtatgaggaagaggtaagatttgcagacattagtaatacattaataatttgaatgcccagaagtaatttaaaatatagcgttatcaataactgactaaaataacagacactaacaaaaaactgtccataaaatgaacgcaaataacatagctggcctacagagagataatcaagttttatccacatcctataacatccacaaagatgaagattgtaacgtcacaaccaaacgaattgatttcatagtcgataatcctatgtttcaaaataacaaatttatcatagtgaattctactgtctacatgcttgttcacaaaacaggttgtctaattcctatcagctataagaatttaggaactcttaaagctacatacaacttacttgcactttcgaagagtttgaactagctttctttgaaaagccactatccataccaaaatctgcaaaaaagcttgatgcttttggtggaagaacatgactaatgacatgggcaccactagaatttgtctcagcagatggaacactttctacatactcaaaccgagacgcaaaagatgatcctgcacctgcggtaggcgtgctgttacttgaagtggaaacaggagcaactactggctcttctggcttctgatcataaagattttcacttggctgcattgtaatataaatcttgtcaggccaaagtccaaacatcatctcaaaatagtctgcatacaaaaaaaatatctttagaaaaaaaaatgaaataacttaaacctttgtagtaagttttcgagcgccaagacccccagtcttcccagtttttctggcaccaagaggcttcttcacagtgctaacaactgtatgagaaacttttggtgaaacagaaacctcaggtggttcctgctttggtaaggagttcacttttggagcttcactagtcttaatgctggaaagtccattagatacttgtgctgattgagaagcaacaggcgatgaaggtaagcctgcctcatctgccatacttttagcaacttcttttgtaagtagctgtctgtataaatcagcagctcttgatgtatactttgcctcaatttttccaccatcagtccacccatgctgcttaaagaaaacatgtgcccgattgtttcctccaaacatcatcattttcaactgctcgggagtccatgagtctaaatttgttgacctacatatattgaacaaatgaaaatggtgaatctacatcttacatgaatattcaaataataggtctatcctcatattttcaaaatcaactcagttcctaacaaaaccacaaaataaaatacatatgccatatactctatttaattattaggggaactgcgaaggtatgagcaaacaagaacaatgtagagaataagcacccgattaattatgctgatgtcttagtctaaagatgataaacttcattaaagtcacaaaaaagaaaaccatcaatctatcagttccatgtaataaaaaataagatgggatcttaaaatacatttcccggataaataataaaatggagaaacacctccttccttacaaaatcagctcaatattgaaaacttccacgtgaattttaaataaattccaaaaatgagatcatagtccctgcattttgtgttcacgtgcagcgtaccgctaattttagcagacccctagctaattcaaccaaaattgtataatagaaattaaaaaaagaaaacagaccacaggttagccttttctgctggcattgtcttttggcatctcttttcttagtcaatataccttaatggttaaaaataatctaaagattcagtttaacaatcctcgaacaatgcaaaactatgcacattccataacttcaactaggttatacattgataaacaactacataacaaccactttaaaatcaacaactttcttaatggaatgcaaaactaattacatttccaccaaaacccaccaaaatatttcaaaatgctacacatttccacctttttgtatgtttaatggtaaagaaaatgcataaacaggcaacacccaatgtatacatagataattacatacagaaacacgaaaaatagatctattgttataagccacccaaggattctgatcagccactcaaattaaaattccaaacacccaaaatatgaaactcacctaacgaagctgatatgaacaccgagattccgatgagcagcggagcaatcaatgcagaggaatatcccataagtaaccgatgcccaagttgggttctttgcgttacaatcgaaacaaatctggaaaacccaagaaaaacaaaatcaaaaattacgataaccacgttcataatcaccagatctgaaccagatctcagaaacccaaatcgagcttcacgactataaaccaaaagtaacacaaaaacacaccaaaaaattacaaaaaagattgaaccttaccttgttatcagactttgatttcagctttttgaaaacagcattcttatcagtaaaagcatcggacgccatgagaaaaaactttgggtagagagaattaaggaaggtaagagaaaaatccgaagaggtgctaagaagaacacctcctcagaattattattatatatatggatggacagagaaatctgagtgaaaccgtagatttgattgatatttggttctctcttttattttctttgattttctttcttagtttgctaattttctcatactttattttctgaaaatcaaagcttttattagttgggattttgggaggaagatgatcggaaattacagaattaccctcctctggtttttgtatgatttgtatttattatttgtatttattttttaaattttgaattttgttgtttggtgttaaaagtcggtggtttgttgctatcttcatcaatcatcttcctaggtaggaataacattacttaaaaataaataaacaaataaataaataaatacttatcaaaaataaataaataaataaaatcttactaggtaggaaaacatatatatatataaaaaaaaaaaagcattttttttgtaaggtaaaaacaaaagtttaaatttgagtttttggcttaatgtatcatccaattatgtatatatattagtattacatgcgagacatgctattgttttatttcaggtttcttattatgagttttttaaaaaaatcaaaataaatgatgttttatgtagagtactttctgaaaaataaatttaaattaaattattatgtttactaatgttggtaaaatatattagaagcaacaataataaagttattatattgaaagtaaaataatgtataaagttttgataattgcttaaactttaaatattattaaataaaagatttattattttaaattttgaaagttaatataaataaaaatataaattgaaaggatatgataagttcaattaaactaagaatataacttaagaaaatctgaaaggaaatatttatgaagaatattttaacttttttattggtatagaagatagaatgataaaatatttgtatttcacactttttttttttttatctgcatataatgcagagtatttcattagttgtaatgcagtacaaaatattatgttcaccacaaatgaaaattaatatgaaactacaaaaattcgatattttcatatactcctctagaagtttaaatattttccaaacatgatcttccatattattattttttttttttttgaatttattatatttaaggtgatttattacatactcttatcttatgaaataagattgtaaaattatacaaaacaaaaaatgagtattatatattaaggtgatgtattatttactcatataaaataaaattgtaaaattatttaaatcaaaaattagcttcatataaagaacgagaagagcgttaaatggaggtttaaaaaaataagtgaaataataagtggtatgctatcatttagtccattataaagaatagttttataactttattttgttactaataactcttaaattgtcataaaatattctaatatatttgaaatcaaatttaaaaaataaaccaactacaaatattgaaaaaagaaaattaatatttttttaattaaaaaataaaaaacaaacaaacaatcagaattgaaactaaaaatcaaacagaaatgaccaaattttagaatatttagttcttttttattctaacaaaaaaaaaattaaactaaatgtcaaaagaaagaaaaaaaaaaaaaaaaaacctattcatattgaagaagaatacactatacattgttctaacaaattaataattataaaggaaaattattaaagaaacaattattttgtgagcaataagtcagactttagcttcatctttgttcttgcatatttgcccagtgcaacaacattttagaggtcttccaacaaatttaggtaataacttactatgaaaacatttgctgaactggacatatatatttggagaaattaattgaacaggacagataagaaaaaatgctgaaatacaagcaagcattcaccatttttttttggttgattatgacatataagtattcaagatacagtagaacctctattcaagaatagattttggaccaagcaaattatattctaattgag

SEQ ID NO: 42597 - DNA, 6884 bp, Cannabis sativa
actattggtcaacgggcaaaaatggtataatcacccaacgaactgggctggatatttttgggactgtatgtacggacatcaagattatgactattcacgaaatctcagctccacttctaagtaagacatttccccctcacttagtactctttacattttctcgcgtagattctcaccattcaaacacttttattgcaacttctcttcgtctacagttcagaacaacgaggaagcctcccaatacgatgcgacagttgattcaacactgccgccaccgccgggacctaattccgccgaagaaaactctccgatcgaggaggttgcgctcactgttcccgtcaccgacgatccttctctaccggccgtgacattcagaacatgggttttggggatattcgcttgcgttctcctatcgttcctcaaacaattcttctggtacaggaaggaacccctgtctcttacttcgatctcggctcagatcgcggttgttccgcttggtcatctgatggcctcagtgattaccgatcgggttttcttcaaggacaagaaatgggagtttacgctgaatccaggaccgtttaatgtgaaagagcatgttctgatcactatcttcgctaattcgggagctgggaatgtgtatgcaatccacatcgtcagcgctgtgaagatattttacaaaaaaaatctcacgttttttgtggccttgttagttgttctgacgacccaggttctcggattcggttgggccggggtttttcggcgctatttggtggagcccgccgctatgtggtggccccagaatctcgtccaggtttctctttttaggtaaaactttatttactgactcttgattgatcatttgatctcttatgttatggcgctgcccttggttgatctcctaagtcaaccatacatatataatgccaaaaatataaaagttagtttctttattcaaatcagtacatttgttgggtgtctactacggctctcacgtgaatagtaatttaacaaaattgatgagtttaatctttcatatgtgttacattacctacatgctacattttggtaattcgtataatagataactgttaaaacagcctcaatctggtatttcattactaataagattacaattctatagtatgaatttcttatacgttgtgatttatttggctgggtaatgaatcttaacaacgtgatcgatcgttaagttttgttatgtttttagatagtgatatcaatatggctaaatgatcgtatacctgattatttattattatttttttaaaagtgatttgataattatattaggaatagttattattattcattgtcattgatacccagcgtaagtaaaagtttatattgaccatttattcaagacaaatcggacacttgtggtctataataaaaaaagaagagacaaatattcttgttattactaacaattatttagcctgcaaccttatagatattagggagattatttatttttacactttaaacagattttttttatatttttacggaattctacgtaaaattcctattgcaactagctttgcaacctaaatcgcaacaataagtcgtatagcaacctacatagaaactaccaaaaaaaccactctagaaaacctaactgtaaatttgaaaaaaaaaaaaaattaaaaaaacagtacggagtaattcccctaattaaatattattccgcaaggaaaagaaaagattgtaatatttgaaaataaatttgtgagcagccaataatgtttgttctctgtagtaaatattaatgatgcaagaactaaactcaatgtttgattaactaccctttaatcattttttccttactgtcgtagttgtttgtcttagacgttattgtgttatttgcagggcattacatgagaaagagaagaggcccaaggggagcttaactcggaatcaattctttctaatagcttttatatgcagctttgcttactatgttgtcccaggttacttattctcgaggctaacgtctctctcctggttctgctggatattccccgcttccgtccttgcccatcagctgggttcaggacttcgtggcctcggaatcggtgctcttgggttcgattggtccagtatagcctcttacctcggaagcccacttgccagtccatggtttgctactgcaaatgtagccgttggttttgggcttgtactctatgtcattgtcccgatcgcttactggctcaatttctacaaagccaaaacattccccattttctcagatggccttttcacatctactggccagcgctacaatgtttccgctataactgactccaagttccaccttgacatggatgcatatgaacgccaaggccctcttcatatgagcactttgtttgctatcacctatggtttcaatttcgcatgcctcactgccactattgctcatgtttttctctttcatggaaggtatgccttccattttgttatagacctgtttaagttaagttaatatacttttttggaataaccacttcaacatctgcaagacaatggtcgaaaagttctatagaaaaacatataagctagttataatgtagcatgacgtgtaccacaaaacctgtcgttaatatatttactctgttatcttcaacgttatatagttcattttatcagtggggttagtttttggtcgcttgtagacaaatatgggagctaagcaagtctgcttttcaagaaaagaaaatggatgttcacacaagactcatgaggaagtataaacaagttcctgaatggtggttcatgtgcatcctttttgctaatatagcagcgaccatatatatatgccagtattacaacgatcaactccaactgaagtggtggggtgtcttgctcgcatgtggtatagcattttttttcactcttcctattggagttatcaaagccacaactaatcaggtttaactccatctcttattgttgattgaatatattaacaacctttgaaataatttcacctttggtacctaatcagacatatttttcattggttcacagttacccggcttgaatgtaatcacagagtacatcattggatatatatacccaggttaccctgttgctaacatgtgcttcaaggtttatggctatataagtatgaaacaggggatagcatttttagaagatttcaagctaggtcattacatgaagattcctcctagagcaatgttcatggcccaggttatcctcatgtcctgtttaactttccatcaaatctcttgatcacagtgacttgtaagaagttttctaatgattttaaagaacattttctcttcttatatcaggtagtgggaactgttgtatctgctcttgcacatttagtgacagcatggtggcttatggacacaatcccagacatatgtgacagggatttgcttccttcagatagtccatggacctgtcctggagaccatgtgttttatgatgcttctgtcatctggggcctaatcggacctcgtagaatctttggagatcttggcttttattcatccataaactggtttttcctagtgggtgttgtggcaactgtgttagtttggcttgcacacaaggcctatccagacaagcattggattgcactcatcaatatgcctgtgatcttaggatcaacaatcaacatgcccccagctacagcagtcaactacaccagttggattctaattggatttgcctctggatttattgcttacaggtactaccgtagctggtggagtcgccacaactatgtgctgtccggggctcttgatgctggattagccttcatgggggtgttgctgtacttgtgcctcgggatggaacatgtaagactcacatggtggggaaatggctcagaaggctgtcctttggcttcttgcccaactgaaccaggtattgtggttcatggttgctcagttctgtaaagcaagtgtgtgtgtgtgtgtgagtatactgtttttggtttgattctttccactctataagtttgtatatacagagctattctttgtaaaaggaattcaaataaatattttttgatacttcaatcaaattgcagcaaactttgtcaaatgcaattttggtaatgttaatgttgtgagattaccaatggatgaaaataagggtgcatgatttcaagattacttttaaataaattaagaaatcatatttaaaaattacagctcttatttcacgaaatgttatatttttttttttttttgaaagtaaaggaagctttattaataaacttctttcatgattacatcacgaatatcaggagtaaactcgttactcctaatgacacgatcagcaactcaagatgaagctcgagtaattgcatgagcaacaccattggcagaccgtttaacaaataaaatagacacatcattaacatcattctacaaagtcttacaatttgaaattacacttccaaagtaggaaaacataagaagagggctgcgaaaagcttgaaccacagtaaggcaatctgtttcaatggtaacccgattccaatctttcctctttagccagcttaaagcctctctcacgctcatagcctctgctaaatcaggagtaacagtgccttgtttgcagtaggaaatggcttccaaaacatgacccaattcatcccttgcaacacatgcgaagctatacccgtttgcatctgaaaaaagagttgcatctacatttattttaacttcccctgctgctggtttctgccacagttcagcaccatcagctgctgtaaaaaatgcaacagtcaaaacttgaaatttatcttgtgccttgctccattgttccaacatgcttttagccaaaagagtgacaactaccacattagcactcctctccttccaaacacaatcatttcttactttccatatagcccaacaagtcatggctataatctttctttgttccccctcaaaagttttaaaataagagtcaagccaacccgtaaaagctccagcataatccattctaactcggattcccattctatcccagcaagcatgagcaaaagaacaatccaccagttgatgcaatattgtctcactatctgaggaacacaaagggcaatcagagtcaatgtttacatgtttaagtcgcaattgaaccttagttggtagacaattcgaggcagctctccacagtaaattttttaccttcggaggaactttcaggcgccatagtttaccctagaaatcaaaccacaccagctgcaaatcaccttcctttctttgttgcaaatgtctatacatacttttcactgaaaaattcactgagctctcaaaagaccagaaccaaacatcatcaatacgacttgaatttaagggaatacttaagataagttgagtatccctggtattaaacaaatcacgcaccaagtcaacatcccagaccatcagtgaccataagagcagcaacattttgatttaaaagggcagggatgattcaaactgattctcagattcttaacacatggtagccaagggtctaaaacaatactaatttcgaaaccatttccaactcgcctacgtgcccccatccgcaccagctcggttgtttcaaagatacttcgccaaacgaaactcctttcccacataatatctagcctgaaacattcggccaacaagtgtatgaggcctacagatcaacctccatccttgcttactcaataaagagagattaaaatcatgaagatttctaaagcccatccctccttttgatttatgaaccgttaacttatcccaactattctaatgaatccccttattattctttgaagaggacttctactaatatttgcacattaattgctccaatctttcagtaactttgggagttgtccaccatatctccgtgaatctaagaacttttgcttaaattgtatcatttgatttatgctctgataacgttcgagattatgcaggattatacaagaaattacatttttttaaaaaattaacaaatactaaaaggcaccgatgtaagtattatttcgttattaatgcaactaaataagggatcccttgctttcaaataaataaataagggatcccacattttaattttaactattatagaatactgttaattatccacgaggcaccacgtgtacgtgatgatgctaggcaccacttatgccgtaagagcatctctaatggtggttgccaaaatacacatattattctaattttttttttctatttcatccacataagatttgatacatttttcttacaaaaattactccaatagtagacaactcccaaagttacccaccatagctccacataccacattataattaaattatataattatgtatattctcccataaaattgattggtgataaagtaatttttttcaaaaaataaataattaaataatgctacatgactattgtttattttggacaataatattcataaaattaatttaaaatgttgaccaaaatacacctgtagcaaaaaccactcatgagcaactctattggaaatgttctaacaacaatatttctttaaaattgcctcaaataaatcattatgatgaacatcacttcaataattttagatgataaaaatgataccaatgaaacgataattggaaacactataatgttatttaagatccttatatttagaggtcaaatctagttataagttatatgtttagtccattacggttgatcacatttgttttaaaattttgaataatttgatttaatttcatattaaaatgggattttttaaaccacttgtttattttatttgttatttttataatttaaaataaattataataataaatttattttatttgaaatacgattgttatctataaaaaaatatta

SEQ ID NO: 42598 - DNA, 3115 bp, Cannabis sativa
ttcactcaagttcttgctaatatgtgtttgttaatatagttctccacttgtgaatatgagtttgcaatgaagattattattctatggacttgtaacaatactcagttatttacctcttgctgaaattgtgaccttccttgagcagcatctggacgcagaactttgactgcaacaggtgtgtgatcgaggtaacacttaaagacaggaccatagcccccttcccctatctttcgagattctgcaaaatagtctgttgctaattcaatctcatctatagtatatctcctatatcttccatcactttgggctaaattatccaacattcttcgcatttcctttacttctttgagcgatactacttctgcacttgctctcttttgagattccaactcagcaatcctcttagcggcttctgctgattccatggctgctctgcacctggctttctctttctcagcaagtgccaatgcagcttcctcggccagtcgtgcctcttctagtttttgttcttcttcaagacgccagtgatgcaactctttttccttcattggacatcaaaattttcttataagaaacaaacttgatagacgagaataagagtattgaagaacgataattgagaacaaatgattatgacatattaataccttctgttttgcagttaatgcttctctgcaggctgcactatacatgtccattgtttgcttcagctcaagctttagcctcctcatctcagattcaacttcgtcctgtgtttcagtcaaatagaagtggattatgagaagatctttcagttgttagatgattaacatcaaagcctaaattttttagaacatttaatatctatgcatatgatcaaagtagtaatgaaatgattactcaaattttcacatattttggagcatatgatttattaatggtgttaacaaatacatgttgctagaaacttctaattcttgttgaaatgtttatacttctatcctgtatgattcaaaatctaagattcatatatgagaatactatcatacacaccagaccctgtgaggaaaatgagcatcctgtcatgtcactctccattgaaattgtggatacatcatgaagtgaactgaggtcacagaacttgggacctggacgaaacgaaccaaagctgttgtcggagctggtagaaactcttgagttcctacctggatctatataatcatagagtactgaagatggtcggtcagtactcggtctgtcagagctaacaaatgatatgtcagtgtctgattcatagaatgctccagcattataaattccattaagatttcttcttcttgcaaatggagacctgctggtttcagacatgtgatcgtggtgtaagttttcactctaagagattactcatttacatgacatgacataacataagtccttaccttattgcatgatcttcttgtaagctgcgaggcttgaaagattgcctatcgttcgctgcacagaaacgtcaactgaattgttaaaaatattaaaagtaaagctaacatcaaaaaccaaattggatttttcatagaattataattgagaagtactaacctcttacactaagtcttggtttagttgtctcaactggcttaagaatttctttggttgcagttaggttctgtatatggcttagtagtggagaagagtatggggctggacgagtagaatttcttgctgaagatacctttcctttggaaatgacataaacgctgcagaaatctggtgccccttttgatacagtgcttggaatacttgatcccttgaatctgaagaataaaagcactgaatttaaaggtggtcataattgtgatgaatgaatttgagaagaagataaggaattacctcatgaatccatgcttgcttggacttcccataatcatattctcaattgcagcataggaaatatactctgataatgcctttcctacatctgagtcttcaagtatgatatcaagacattgtatctgaacaaatgttggttataaaaaatgaaacagagaagtgagttatttttctaatcaatttaatatcggctttcacatattttattttagattaaaacatatataagacaaaggatggtttaagaagacatacatccttacgagtacaaaaacaatggtaagtaacaaaaagatccctggtttgtttttcaaggagctgcttgtgtggtgaacctgatgtattgttggtgtcacatattatggcattgcttcctccaactagaaacaaaaatcaaattaatttcaattcgatattagtttttttaatttctttaaaacaaatctaattaagaaaatgatctctattttcttacctgatggagaatgagaactttgcttttgaacaacatggataagaacaacaacttgaccctttgagagaatattctctgcagcccattttagagcagcttgactccctttgtccttgtctatagccacagctaccaatccatttccagatcctttctttagctcatgtcttttagttgcccacattttcttccaatattttctcaagtggatgatcaacccaagaaagaggactacaatataaaatcaaaaagaaaatcaaacttaattggtttgtctatcctgtgatcaaaattcatttgtcaaaaatagtagttagcattttgtttttagaataaaatactttttttttatttaaaaaaaattgaagcaattaagtgtttcttctttgttcttatgtatttatcaccattagaataatgttttctatttacatttgcacattccaaattttactctatatagaattaagattcaatgtataatgatagacttaaatttattttaaaaactgtttactcaatttaactgaggtgattgtttgtctatttcaaataatttttgataaaaaaaaagttaaaaatataattttttccttctaattcatgttgtcgaaaatgtttctaattaaatcaaaataaatgacaacaattaaaatttcattacgaatttcctaataaaattcaatcacacacatagcatttatttaattacaaaaaaaattgttttgttcttcatatgttcgtggttgtacaaactctttttttttttttttt

SEQ ID NO: 42599 - DNA, 2785 bp, Cannabis sativa
aaaaatctgttaaagtacatctttcagcagtccaggatagtatattataaaatgaaatacaatattattccctgataaacgttatgctactttattgtatgattagaacatgtgggtaatcagatcatataattttgggtatttatttactttgtttttgtgtttttatgcagtttccctgccattgaagatttaaaacagtgtctcgagtacactggacagcattctaagctggtggagtcattcatctctgcactacgatatcgcttgcttacagcaggggcctcaacaaatgacatattacatcaatatgtttcaactattaaggcactccgaacaatagatccagcaggtgttttccttgaagcagttggtgaaccaatcagggactatttaagaggaaggaaagacaccataaaatgcattgtgacaatgcttactgatggcactggcggcaattcaaacatttctggaaataccggtgatagccttcttgaagaattaaatagagatgaagaaagccaggagaacactggtcatgatgacgattttcacactgatgacaaacaagcatggattaatgccacacggtctggacaagaacacatcagaatagaataaaatttaataatgttatatgccagttataatggccaaactaaagtagtggtgcctatgtaatggtgaaaatgttccattttctgttttttcttctacatttcttatgtgtctttaatttctgtcattacagctgggagcctgaccccgtagaagctgaccctttgaagggtagcaggaatagaaggaaggttgacatacttgggatgattgttggtatagttggttcgaaagatcaactagtaaatgaatatcgtgttatgctcgctgaaaagcttctaaacaaatctggttatgacatagacacggagttacgtactcttgagctgctcaaggcaagtgttctgttgtataatttcaaggcttttaatgtttaagttatattatatatgtgtgtgttggtttagcttgtgctttgttaggaccattgctgtatattttcccctttaataataaattttgtttctcccaaagattgtaagttctgtgggatgactctatcaatatggaaaaaaagatcattctcacttgtagttttttccagatacattttggagaaagcagcatgcagaaatgtgaaattatgctaaatgatctgattgattccaagagaacaaattccaatattaaagcaactataaacaagttgtctcgaacaggtagatattttattattttttatgaaaagcgaaatccctgaggatgatttgagacaattctttcaccattattttctgctagatgtatttgtagagcctgagccagaggataatggtttagccatggatattcttgatgctacaatcttatcttctaatttctggcctcagatccaggtaaaaaattttcgccacatgtcacatcacaaatcttaataaccaattttaatatgcacatgaactgatactagacctagcccacagttatgaagcatctaaactttctcctttacgtgcaaatctactttgggatttacagtatcactatgtaaagtcactttgttatatgatttcttaggcatgtatttatttgacagctgggatataacttcctagagcttttaattttttttttgttgatcacaaattatgcatatgctgtttgttgagttccttgaggttattttttatcgtccttcgttgtattatttattatataagtacaaagagagaatacaaagtggtatctttttcgggaaaaagtaatggctgcttgctgagtagttctagtcattctgcatttctgcacaaagtatctaggttacaaaggtttgagtcaattaagatggaatgcattaacatagaaagtatgattcaatataattaatcttttgactttatctctagacgtctcagttaactgctctatcaccttttacactgccttctttctcagttacagctgtaaatgattaaccttagattattttcaggaagaatcccttattatacctcagtctgttgatcggctgctctcagattatgcaaagagattcaatgaaatcaagacccctcgaaagctaatgtggaagaagaaccttggtgcagtcaaggttaggtgctttactatgtttagaatgtactttgaatggtagtgatctttcatatactgaaaaatttatcttgtgatgatgtttcagttggaattgcaatttgaagataggcagatgcagtttacagtgactcctgtccacgcagcaataattatgaagtttcaagatcaagcttggtaagtaaaatcgggggattgattttgtaatgccttacatacatctaaatgtactcatagttgtatgttctactttcagttggacatctaaaagtcttgcagctgcaattggggttcccatagatgtacttaaccgcaggataaatttttggataagcaaggtatctttgttaaacacatccctcatcaggtttcatagctttcctggcttgtgcacgtgtatgtgattagacattgaatttaacttggctatccctgatcttgaggtgtatagtgatgtactgattgtcaatttatgaggaacataaaattttacaggattacttattctcgtagctttattttctcatgcatactctttctcttatccttgattatgatttgaccttttttttttcggttgtggcattacgatttgactttttaagctctatagttt

SEQ ID NO: 42600 - DNA, 6529 bp, Cannabis sativa
aaagtcaacgtcagggaacaggtggcattttattggttggccacaaaaactcaggccatgcacgcaacataatagaggccctttctaatcgtcattgattgctatattaattatgcatggttataattaagtgatatcacgtacgtatatataaatatatatatatatcaaagttatatatatgaatggggtcctcttcaaatatctcatgtcattagcttttgtacccatgcactcatggtcaatcgagttcatcaggccccttcctttatatatattaacaacattaataattataacatgatgaacaaattggctacactctatatttcatattttatatatatataaagagtagattttgtattaaaggaatgcattagtttaattatctcataaattgttggatcataattgagttgattcagcaattattaattatcgaaaaccagagtacattaaaccaaactacacaaacaaaatttgtatatatagtatatattaatgaatatatttttttattaaaagggacaagaatcttttccctatatatttatactcatcgacatagtaattgatctcatagtatatatcatccacaattttcccaattactaactatagatacatgaaaatcttctttttggttatatatcaaaatcttactataaactatacatgaaagtttcattgtaatcactgactgcattattagaaacaaattataatactgtgccttgtgattataattgattttattataaactaaagacaagtgctcatatagtttaaatatataatctcaactaatgtcgtcaccaaaatatttatttaagattggtctaaatgtatactcgtgaggaacatttgactgctaattaaatctttcaacagtgaatctacatagatatgttttatatgtataccactttaaaaagttgggtttggtataatattcttagaataatccttagtgtctattagctgtatgaaatgacaaatcctttctcttgagtaattattttttactttgacttaatcagttttattgagaaataaagtatactagattatatatatatgtctataattacttttgaatatacattttaattaactaattatattatatattatgttaaggatataaattcagaaaaataatgtgttttcacatgatagaaaattagaaatatgggagaaggtaaaaaccgagacagaatctagtcagacatataattatacattgcatataacaatgaataaagtaaaagggataaaaaaagtaagcatagtcgcaacgtaaatcgaatatacatatatgatgaccaagtgtttttcccctgcgccacttagattggtccaaagactaatacatgaactgtcaatatgcaatgaagatagtcgcatatgtttcgggctttaataataagaatggtcaaaattctgttctttttcatttatttaatttacaaatgttttttatttcatctatattgtaattatattgtgtgtaatgttcccatctgactggttatgtaattaaaagaacatttactttctatataaagagatatatgattcacacatcacaaacttttgcaaaaataaattaaataggttaagctcttactaaactattataatttttttatcttttaattacttcgcttttgcatatgcttgttgttcactttcaattatcattacttatcatattttgagtatttgttgttttttggtgaatactcgcataatattgatgttgtctatttttctaggtgattggcaaaattacaactttatgataagcagttagttactcaaataaagaaagtaaaatgcactataccttttttttcattcttacattcaaagtttatctaaattactttacatctataaaaccatgcataacagagattcgatttttaaagcattggcaaaagaaaaacccgacgttttttaagtatttataaacatcaaaaatacattttgatagtcaaaatataaattattatattggcaaagaattttattactatactataaacaggacttttggtgataattgtggtcgctaaaaatttcaaaaattgctgtgtagaagtttttatttttgcaatgctgttgtataaaagttattatgggtgtacatatatatcgacgttaattaatgtgtcttgattaaacaattattcttaatatatacacataaatatataatagagagagcgcagatgtataatctcctaattaataatatacagcattattattaccaatatacaatattatttctaaattacttgacagtaccagcttaatttactcaataataaaacaagaccgccagagatagtatcattcaaaaaaaaaaaaaaagagagagagagagatagtgtatatacaaatatatattataaagaaaaattggccacagagattcatgtctaacaactttctattggttcaattaagtatcgagtctcaatgtaataatttttaaaaaatattactaaccaatcacaagacgacatgccaagaggtgttgatgcctaataacaattaatactctgttataaaaattatgtacatacttgaaaaatgctaactgttgcctaatattcttctttgtattatatttttatttttattaatacaattaagtatgaagtgcatataacttaaaataataatttttaaaagatatggtttataaattatcaataataatacttggcaccacgggtgctaataataatactttatatatttatattaggggtcagcagtcatcgtcctcctatatatgccatatatgttttgagagtttggtgaatcaattgccaatcaatatcgtcgtggatatgctcattattttggcaatattccaatcaaccacactgttcattgtcctcctataattaatcaacctctataatattactattaaataggtactattaattaaacgagtacgtacaacataaatatgtgtattatatgatggacacgtcttgatataagataatatatctaccaaggttaaacactaattaagttcccgatcaaaaaaaattaatagctaatagcagcttcatgaagatcaattccctaatctatattatcatatcatatgatcatgatcgatcgatcaatcataattttaacaaattatataggtataaataataaataaagttggcagaaaaacttaatttggttcaatggattacgtagattaatactaatgaacataataataattaatttttagaacatgaaaggatcgatgtgatgtggaagttttgaccatggaggtatagagctaattaattaagttagacaagaagttggtgcggcaagcgctctaaattccaccccattttgaatctccaaagacatatatatttatatatatatatatatgatcttcgtttaattaccacatgatcatatatatatatatatatacatatataaatgaatatatatgatgaagaattcgtcaatggcatttgttgattctccttcgtccccttctcttttgtcttctttaattatgccaatatatataatcataattaattaattataattattttatattctatgtatcccccaattggaggagatggaggacacatcgattaatatttgttagagattgtgaaataagtcaattatataaatatatatagttatatatacataagaaaaatgacgaaattacatgaaacttttatgacaagttagccaaagtaaataaaagaataaaagtactaaattaataattagctgtatatataaatatacattacatgtttctaatttcctttctagttggcaagaaattcgttgacacttgatgtagcattactgttcacacacacacaaatggtatggaactgattaaataattaaataagatcatatatgagtgtattggtttctaattaaaaatacaaaatacgtatatatatatatatgtatatatatttgaaaatattatgatattttcatgtctgtgtgcacattttatatatataacctagacatgaacagtcttgttatcctacaatctttaatacgtaagttgaacattttaataatatattttaggatcaattgaaagaacagaatatatatatatatatatatatatatacacttatgtaaatgatcaaactggacgacgacgacgaatattctaaataatatgcatgcatgcatgtacatctaaatttctacgtgatattgaaaaatacattattaattaaagtcatctagatatattgattaaggttttgataataatgtttattatggccaaattaaaaattaaggaccactttcttggtttatccgagtttgttgcatttgcatatatatcaaacctaaactcgtagcaaagcatcacatcaatatatgtatatatatatatatatatataatatttatagccacgtacagtcaaactaaaaaacgacaaggagttgtgtccctatttttctatctctcacctcattttctcatgtcggtatgtatgcataattaagcttttttaacctcaaggaaaaagattctcaaatttagttagagaaaggaagaaaattttcacaacgttaacccatcttaaacgaaattaattatattaagatttatatatcatgatatattttttactggctcagatcgatataaagaaaactgtatataataattaactaataataagattgcttcttagactaactttccttgtgggggtggatcaacatatcacatcagaagagatggtttgataaataaaatatttatatttatataataaaactgtagggatcaaatgatgtcacgtatataatctcaaaacatggtgattgttcaaatattattttaatgaaaaaattagtaaaaaatatgaatcgtatgtttgtaagtagtatagctaaacaactgatttgcttgctatgataagtttctacccaatacatctaaactcagactttctacactttctcatgccacgtatatgattttatgtctgcccttgtttatagaaaaggaaacgcttcccctattatacttaactaatttaagttacacacttattatatatttgactgtcttaatcttctaattaagtagttaattaattttttgattaattatatagtttgaaataacagtattagtgtacaccactttcttatattgtatgaaatatagagacttattcttaagaagctagcagctagtaagttattattcttagaaaaattactgtagaaaaatatatctaatagtgatccagatcatgatctcaataaaaattataaaactttttagcaacaaacgtcaagattgcttgatagctagacataaaatttatctataagttgcattatttcatatactaaataatatgctacttcatttataatgcatcttttagaattattaaccttttcggtaacaaattttaatttggaagtgaataattgttgaacaatcaaaaattttgaatgagtaaataaataagtaattaaatataaaatctagctataagcttctgccttctggtggcaacttttttaatttttaaaatatatttggggttgttgggcagtggagatgggatggtgaaaaaggtgttaacctagttaggatgtctttttgtgttcatgtatacatatatatataaatatatatatatacatatatatataaacctctttcctgttgagtagttcatctaaaaaatcacaataataccaaacagtggttctacaatatatccatatatgatcatttcgatcctctatatagaattgttgtgcgttgttataatagacttgcttgtgagagcatggtcaataggcctttctcaatacatgaaatataataggacggttaaggtataaaataatttcatattattttttatgaaattgttaataattttaggtataaaaatataacccaaaacaaaatattgtgaatgtgtgtgtgatttgtaagatttattatttttctatatctttattgggattaaggcttagtataactatgagtgaaatatcccgctcacccatgaaaaatgggacaaaatacgaacaatattgttatttggtattttggtatcttaaggtgattaacactatatattgaagtaatagtacctactatataattaattagtaattttctatattatttattaactcgaaatgtgtgaaacctaatgttaaaataaaataataataatatgttatttcttgtggcaccttaaaatgcccttaacattttccgaaaaagcacattcacaattttcttatttgataaattttaatcacacaagtaatatgggacatatgtaaaaatgcataataaagtacagcattaatgtacactatatataaacgttcccaaatacaaataacacaaaaaatcttaaactcactaatcacttttacttttattttgtgaatgttttctatgtattaaaaataattaataattt

SEQ ID NO: 42601 - DNA, 5969 bp, Cannabis sativa
catcagatacaactgcatccaacaacctttcattttgttagtaaggactttagtgaacactttcactaatacattacaaagggatatcaacctcaaatcaccaaataatggttggatttttctttttcgatataagagccacatttgtcttgttcaacccatcttgcaaaattctttcattgaagaatgtctgcactataaccaccacatcacttccaacaaccacccaattcttctgaaaaaaaacattggggtcatactatcggaccaagagatttaaacaaagcttccttagtctcctcctctaaaattgacttcatgagttctaaattatgggctgccgtaattgagctaggaatataatctatcacctcttcccaattcatatgtgagtgactaaaaagatcatgaaaatactgagtaattaaagtagctaacccattatcctagtcaactcaatccccattcgaattctgaagcttatgaatatggttcgaacgcttacgaaaccttgcagtcttaatttgatctctagaattaagctatagttgtttctagtgttgcctccaaaagattatttcccattgatcaaaaatagcaaacaacaaattctttactttttgaaaccgttcaatattctgagacaaattattagtttttttcgtttttgttttaagaaatattaattgtcggcaaactatgtcttcttttagcaatttacaagttaaaatgtaacgatcaatatttcatcctattctatacataataaattcatatattttggaattaaaaagatggaaataactacgtacgtacgtagacgtagttaagcaagattcaatcaaatcaagaaaatattttttgttatagagaacaatctaaacaagtggttaagatgttcaaacactgtgaagaaaaaacgtcctagaaaaattaaccttatttattacaaaagaaaaaggggtagtagaacatgctgaatgaaacatgtcgtatcttggtggcttaaactaattcataataaaaaatggacgaccaagaaagaccttaaaaaaaacaagaaaaaaagtcagacgaaacctgagaggcctaaaaagacatgagatcgatattagtcaggtatttgtttggacgttagtggggaaggaagactcgtggtgagtgagtacgtgcatcataggcataggtgataggtggggaagtaaagcaaacccaatctttctttaacaaacacaaacacaaacacaaacacaaacaaccacttcacctgtgcttttgggggcttctcacttccatttcccgccttcactacggttccagttgcttctttctatatgggcaagagggatttcaattggacctccagctctattgtctctggctctcacagagctcctcttcttaacaaacatgttggtttattcttcttctaatacatgctctttgtttttcttcttttgaaatgattaacaaactgttctacatgcccagaaaagtatcatatttaatcttaatgttcgtgttgggttgtggtttttaatatggggaaaagattattgattaattgaaaacaaaggatgtttattttctttaatttgtgtagccaaagaggaatgaaaatgaagagggatcaactaatggtccagccacggaccttgaacatggagatgcggtagaggtattgttaatcgtgttttatttatagatctctctctctatacttgtctccttaatttgagtctgtttttcaagaattgttaattttgttctggaaaattcaggcagcaaatgttggatatcttcgaatattatcacttgtaagtgggcacttatctaatttcttttattactatttttattgttatagtaaaaggtcatgatgattaactttttgtttttgttttttttactcattgaataggcaaaacctgatgctggcaagttaactattgctactattgcactgctgattgcatccaccacaagtcttttgattgtatgtttcttcatctattgattattatgtgcttattctatctctatttctttccctattttgaggtgactggtgttgaaattttcttaatgtgccaatgataattagcaaagtttggcttacttggttcaaatttgaactggggtttttcatgatagatgcttcaatttattgagaaaaatctttctattgaaaactttccttcagcatatatcatagcttgattttcattttcttatctatcttgtattggagattctggagaatctattagacaaataacatctgaatcaatgtgtttttggcctcaggactcacctcaagattacattttctttaactgttgtcaattgaaatgtgaaatttcaagctttgatttactttttttctcttgcagccaaaatatggtggaatgataattgacattgtatcacaagaaataagaactcctgaagagcaaactgaagctttgaacgctgttaaaaataccattttagaaataattataatagttgcagttgggtaagttataattttgcatttcactgtcttttaatatgttacctacatagatgtttctaccagtacatatcttttaataagttataatagttgcagtatttttctctttctcaatttttttgtcagtgatttgatttttaacttgtctatagtgtttcctattgtccttgtttgaagttctgtatgcacagcacttcgagcatggttgttttcttctgctagtgaaagggtagttgctcgtttaagaaaaagcttatttagtcaccttattgaccaggtaacatcatttaaagactagctctatataatcaactccattgcttatcatttccctttggtattcaagaataatctggataagtttctcatgtttgatgctacaatatccaacaggagatagcgttctatgatgtgactcggacaggggaacttcttagcaggctatctgaagacacacagatcataaaaaatgctgcaactaccaatctttctgaggcacttcgtaatgtaacaactgcaattattggtgttttcttcatgttctcgtcttcttggaagttaacatgtaagttaatttcattttgagctgacttttttctcccataaaaagactccttttgttagggagaaatcatattcattgcaattcattttgttttcctcccctttagtgttggctttggtcgttgtaccaattatttctgttgctgtgaagaagtttggacgctatcttcgtgaactttcgcacacaacccaggctgcagctgcagtagctgcctcaattgcagaggtttgtaggggaaaaattatttgtatacgtatgtatattttgatctattatttttcacatctgtttcaaataccttttaaatcacaatgagataaaggagaagggtttgttttacttgaaatcctttaattactataactctttaaccagaccaaatctatcttgtctaaacaaaaaaagaatgaagtactgtttcctataaaaactccatattgttctacatacagaaggtttgatgattaagttatgtaaatgataattctaattgatattggggggattccattagcttatgttttctaagtaatattaatatttaggaatcatttggtgctattcgaactgttcggtcctttgctcaagaggaccatgcaatatcaagttactcagaaaaggttgatgagacgctaaaccttggactcagacaagctgtgagttttcttgttaatattttctcacacaaaatttcttaaagtaatgtagtagtttctgatcttgaagttactctttttggcttcagaaagtagttggtctatttttcggagggctaaatgcagcgtccatgttctccgttattgtagtggttatttatggagcatacttgacaattacaggctccctaactgcaggagcccttacatctttcattctttatagccttacaggtactttcctactgtatactgccaccactttctaatttctacctcatttagtcaaacataaaagaatgtctgaataaagattttcaaactcaactcgcgctatcatattttgtttagcttcttttcttaattgaaccatccaaaacactagcatgtttggttgcttgttatgtctcatgaaatctctttcaacagttggtggatcagtatcctccttgtcagggttgtacacaacagcaatgaaagctgctggagcaagtagaagagttttccagctactagatcgtgtctcagtcatgccaaaagcaggagataagtgccccacagggtcagtttcactatgcctttggtgtcctggtgtcatgcaaatttcaaattccccacagggtcagtttcacctaaatgtacactaatgcttgttttatgttctcacttgtgatgttgtgtcttcgatggcagcgaccctgatggagatgtggaattagatgatgtctggtttgcctatccttctcgcccaagtcatatgattctcaaggttataatatggttatttagtctaataaaatcagctttgtaacattcttggaaggtgttcataagttttgacagttttttttttttgtattctgacaagtatgcttaaaccgcagggtataactttgaaattgagtcctggttctaagatcgctctggttggtcctagtggtggtggaaaggtaatattttgatctctttaaaattgctttcctcattctctgctggagctgcctgtttctcttgtatcatctttcaatagatagctcattttgattgaaatctcactcttgatttgactgcagacaaccattgcaaatttaattgagagattttatgaccctgttaaaggaagaattttactaaatggagttccattagtcgaaatatcccatgagtatcttcataaaaaggtaagcttttatttctctctttcatatcaaagctaaaatatttgttgtttgttggcctttttatcaagaagccaatagaatgactttgaaacagtcttcatgttatcatgattttcaaactacaggttagtatagtgagccaggaacctgttcttttcaattgctcggtggaagagaacattgcatacggatttaatggaaaagctagcttgactgaaatagaaaatgcttctgtaagttccaattataaagtttgtaactctattgaaatgaaagcttaaagctttcccctggtttccatgctgataaagatgattgatctcagaaaatggctaatgcacatgacttcattgacaaatttcctgaaaaatatcaaactgttgtgggagaacgtggattgaggctgtcaggaggccaaaaacagagaatagcaattgcaagagcactattaatgaacccaagagttttgctacttgatgaagccacaagcgctctggatgccgagagtgaattccttgttcaggtaaatagacatccttactttagatgcttttattgtttatattttacatttatatgcacatacaagtcaatataccaaacataatataaaattaatatattatacagtacaagtaataatacacctaggcttgaatcccactgctgtgtaataactggagactatgattgatcatctgctataatcctaaggtcacttttggagagtattagactagatatgattggatagtttttacaatgtaattttgttatcaaattagagagaaatagaaaaattaaacccaacaaccctacataattcacctatattaggatttaacttaaaccattcaaaaatttagataatttttcctatccaatcctcatctttatgtagttctttggtaattaaaaaagttaacaactttgtattttttaatccaatccaatccaatggtattcaatctcgctatccaaacatgaccgattggtaatacatatattgcttcagaaaatgatacaaacttccatatagttattagctt

SEQ ID NO: 42602 - DNA, 2926 bp, Cannabis sativa
atcttgggttaattgttaatttatctaacagtataaacaaccaaagatagttcaaataatgatttgataatttttgaccaatatcatatcatatgtatagtctccaaacttttagcttacaaaactcttagggataacagctgtgctaaaacttcaggaacgactccactgaggttgttgttggataaatccctgaaattaaatgataataagtacatttcttaatttatttttttggtagttatttttaagagtcatcacacaaaattttacttttacttgacaatcaaatatttttgaataaaaaaaaaaattgtaattaattataaattattatttttatgttgtgacttataagattgatcgtatttgtcacaaaaattgtaatttgttataactaaatgtatttttaatcacaatactgagtaaaaataaaatagtactgacaatattgtatcaaaatgttatattgtaatcacaagtaattttttattgtaattaaaaattacattgatttaatcataaaaaatttatgttgtaactaaaaaattatgagtaaattatattgagtattgttattattatattatagacaaccataaaagtactgtttttttacaaagaattttatcatgtcatcgtacgaagaatatttgtgatactaattaataagagagagtgtgtacataatatatatagacccaaaaatttacaatttgttgctacttaaaatatgtttttattcataataatattttaatttatcttcgtatatataataagtgtgcctgaaaaatttgtatagtaattaactaaacacagtattaagtaaacatttacacaggcaaaatttttatgtacttacaattgctgtaacgaagtgagttcggcaatagatggtgcaatttctccttttaagccccttgacgataaattcctggtagttgcatatcagagaagcaaaatgtcatgagtcatatatatatgttaatatatttgtacatacataatattttatcatataaaatttaataaaagacatacaaggaaacaattctagaggaatgattagcactgtaattacagctcagacagtcccacatgtaatcctccgggccacaaggatctccctgccactcaatatttttcaattcgtacaccgctttcacctcggagatggcttccactaatataatgaattattttattattttctttaagaaaaaaaaaattataacaaaaatatacatatatatatatatgatcataccatcattttgatttgtttcttgtcccaatagattatgtaccctataaatctcgagggcatttataaggggtggtgaagttgaattgggggtgctgtaaagagaaattttctgttttcctggttgaatttcctcggcatagctgtatatagtgaaatcggataagtaaaggggagagaaaagtgaatccaatagttttccattgaggaaggtgttgaactgtctagattgatttggttggagattttctagttccgtatagtgaaagtagaatttgtatttgccgccctctaagctttcccaagtgatacccaaagaacgataatctttatcaaccacatgtgcagtgttcattactgagaagggtaatccgaatttgttcttttttatagagctttcatctgtagagggacctttaatatatggttcccaaccaagttgtctccataaacgatcatacacatcatctttgaatctgcatattatatatttatattatatctaaaataaattagactaaacatatttaattaatagataataaagtataaataattgaacctcctgatttggcctgcagggaatgaagagaaagcataacgaccatggagtaggagtgatgaaccaatttcaggaatataattaacttcattatttataggccttagttctaaggctgatatgaatggagttccgtctcctgtgtttactagacaaacatagatgtgatctgaaagagaaacgtgtatcatttccaaattcaatgtactacttgcatcttcaattttcactgtttcccacagattaactccgatgtgtaaatcaaattttgggatttcgtttttgtcatcatagtttccatacaagaaccttgctcggatcaaatacttgtgacctttgcctagttcaggtttcaaggtgtaacagtttcttttttcttcaggaaaataccttagattccagagttgttgatcatggattgtcactttgtaagcggctgatatctcattgttttccccactttcgatgaacttttcgtctgaagagtaagagatacttgttttttcatctgtgtagcttgaatctgatatcccacaatctatactaatgaaacctgaaaattaagatattaacttacagaaactgataataatatgaatatgcaaatatttaatagtttaatgatggtaaatgagttgcgatattaattttttgtgttagtttgctttacagagaataaatgataatatgagtgtatggaagtagagtgtgttggagaatggagagtagcatagatatatgtaacattttagaggtatgttataattgattattttattttgtgaattgataatgagaagaaatatcttcaatgagatgaatatgatgaattatcatggaatttggagttctacgataaaagcagtgaaaaattctaaattttagatgctcaacacgctccgtttgtgatcgaatatcaagtttacagcgctttaacaggtaatatatgtttttttaacaggtaatacgtgcggttatttagagaagtgtcagtgcaacgaaagtcctatattttggctaaaaatgaaaaggatcactgctttataaagatgaacaatatctatgagacatttttcactagtacaaaaatagttttt

SEQ ID NO: 42603 - DNA, 7025 bp, Cannabis sativa
tatcatcaaatttttaactaaaagaacattttgttaatttttttaaaaaatgaacatttaataacttaattgttaaatttatggccattttgtatctgttggcccttaaataaaagggcatatataaacgttaaattaaacaaattttacttggtcaccaaactctgactcatctatttctttttttttttaaaagaaaaactcatctagtttattgaaaaagaaaaacaaaaagctgaataatcttagggagccgtattagcaaaaaaaaaaaaaaagatcattatttacattgagtccttggctctcattcattttttttcttcaataaatagcaaagaaattgagtcttttgcccatgtcttgttttataaaacaacccagataaaaccttacacacaaaaatttaaataaatcaaaaatcaatttttgaaataaataattgaagaatcgaaatgacttaaacaaaaaactaactgcgacataattaaacaaaattgattccataataaaataattaaaaataaataatacacaataactcataaactagttataaattataattaaaaaaaataaaaaagtgattttataaggagtttttacaaaaatactgaattttaagaaaaaatttacaattttactgccacatagatttttttacaaaaataatatctttttataaaacaacctaaaacaacaaaacatgacacttaaaaataactatagaataactaaaaacaaaaccgtggaaacagtgaaaatttaacacaatacacagcataaaacttatacagtatttttaaaaagaaattcgcgcacaataaaaaaaagttaaaaatttcagtatgcagtgtaaaaatcccttttataaatacaatttttatttttggctctttatatatatgtgacttatgagtatttcttttctaaattatcatttaatttagaatatacatttaaaaatgaaaattattgttaaaaaaaactaaacagaaaaagaagatgaaaatcatttcattagaatatgttttttattgatgacttaattgagagactcttttttattatttttatatacaaataaaatatgttagactaagctcttgatgtggttaattcaaggtatttaagtttgttcacaatttataatttatttatcaaagctaaatgaaggacaaaactaaagaaaaatgaaatttacattttctatttttcttttcccacttgttatatttactatatttcgttaaatttttgcttttaaatttaaaatatattttttatttttattttatgatttctgaaaaaaataaaaaattatttggtaaactttaatcataattatatttgatgtttgaaatgttatttatgaaacatttcataaacttggtataaaactttaattatgggccacgcacaacccgttatttcataggcccaagagaagcccaaattaatgaaagaagcccaattaaggcaatcccatcctcattccctttctttccttccaaagccaaaatttctgtaattcaaattcaaattcactactctagcaacgccatggcaatggaagtggaacaatcacagctagccttcccctactggaaaccccttcttagaaaattcgatcccgactctcctttcttcgctgctggaaacattgaaagggaacttctcgccaaacaggtatatgaattatctttcaatcacagtaattgcaaaccctaaaaatatgatttttttttttacctctacatatttatgtgtgcttttatagttggattaaaccaaaatttaatctttccgttttgggtgttgtttcatttccatggaggaaccaaaatcaagctataagttggtttagctgaagttgtatatggttttgtttaagtcttgtaatgacattcaatcgatatgcttaccatactagtttttgcaggttgcccttgatttaactgaagatgagaaacattatgttaggagttgggtagatgaagatagcaggtaaagaacctatttaatgaatatgatgatgaattgaggaatgattttttttttatttgagcagcatcagaaagcttaaatcttaaatggtatttgttgaactgtattttcggattgtttcaagtcattagtgactgaatacattgaattgagacaaaatgtaaaatgtgcaagttctttggtttagttaactgatgataaatgtgtgataagataatataatctctaatgagccttttttctatatatttgtatttgctttccctaactattgaagtcactcaaatctaatggattgtacaggagtgtttcatgccccattgctggttgtggtgcacatctgacttcattggatgatttcgaagatcattacaatgcaagacatactgcatcatgttcagtgtgctctagagtctaccctacatcacgacttctcagtatacacatatctgaagcacatgactctttcttccaggccaaagttgcacgaggctatgccatggtatgtttgtttacttttatcttgttcaaatattaaatgatctccactttgtcatcattggtatttaattctgaagctttatttgctggtgtttagtatgaatgccttgttgaaagctgcactctaaagtttaagaattacaaaagtcggcatcagcatttggtggacaagcacaagttccccacttcatttgagtttttcaaaaagtctcatgcatccaaaaagctgaggcagaaacagcaacgcaaacaagctattcataagaagacagatacttcgaacatggaagttgaaaatgaaacgattgataatcttgtttctgctgtatccaaactaagtacttcagattcatctccttcatccatcagctttggccgccgcaacactcgtggtttaacttttgtccctcgagctgttcaacgtgacaagagaccaggctcatcgtcaactgaaacaaagacatagcagctagaaaacatacatactattcaattcaatttttgtatccatgtgtgtcttctccaccaaaccatctgcgttgacatatcttggggctgtagttcatgacattgtcctgtgctttgtagaaagatcatattaacccattagagtaaaaagctcgttctggtttaggcacactcattccttgcttataatgtctgtagcaagcatattagattgctttaattgtattatggcatttgattaagtgaatggaattcattttgcccttattatactttgctctgcagattttaccatctagaagttatttatgttccatttactttgaaagttgaaaaaagaaaaggatacactgaagaacctgtaagaacaatttaacttagacgagaacacaagcttcattaaattttgttaaattttctaatgtacaaggaagagtcataccatcatagagcaatttatgttcttgaactctaatgatctttctttaccaaatcctccatagaagcatcagaagcttttccatctttgaagtgttaatgttatgcaatatttctagattgaaactatagaaaagaacattacttggattagcaagatttaccttcatagaagcaaaattatttaataaaaaagtcataaattaaaaataaaagctttagatattaagaaagaataaatatatttaattaattcatctttctatgaaaaatttaataaatttttattgaagctttattattattatttttttttttaaaaaaaataagaaatccctagaactaattttaaaaagggggttataacaccctataaaataataagtacactctattattaaaaaaaaaaaaaataaataatttttaaaaattactcttaatatttttttaatttttttcctcacataattctatgttaattttaatacttattttgattttattttcatatatattttttttttttgaatcatgtatatttttttctaaaaaaattttgtatatttttttattttaattttgtggtcataatatttaaaatataatttatttttatttaatagatatatttttaagtatatgatttggaaaaaaaaaaagttaaaaaaatttaatacaattaaagttataaattttatataaaataaaaattattaaaatagaatgtctttataaatttttagaggtgtaaaaaaaaacaaacaatttaattttttgaaattttgagaaaacatttttgtgctctcatattgtttttaacaaaaaaaaaaaaagaatggtaacattaacatatcctaaatttccttcttaacccttattttatctttgctaattaggattttttttcctcaaattttgacgtgtaccaaatcatgtctctgaactttttttgccgttaaaaattcccctaaactattgagattgttagatttaagacttttgacatgtaccaaataatgccccatgcccctgaactttgacatgtactaaaattaaaaaaaatccttaaatctaacaatctgaataatttaggaaatttttttacggcaaaaaaagttcaagagacataatttaatacatttagagttcgagaaaaaaaaattctaattagtcttgatctttttggttaatcagatgagaagaaaaagtctccttttgggttaagtggtcgaaagtaagaaaaaaattgaaagcagggttatatatgtaaataaaaaaagattgtcctaatatatacgaggggtaacccccgttgattactattcatcgccatattttcagagatctaatattttctagagagagagaatggatgccattgactcagttttcgatcctctgagagaattctctaaggatagcatacgtctcgttaagcgctgccacaagcccgatcgcaaaggtaaattcttttctctgttcgattcataattttctgcttctcagattacttccttctttcgtttaattaatttaattttgggaatttcagaattctccaaggttgcactccgtacggcgattgggtttgtggtgatgggattcgtgggcttctttgtgaagctaatcttcatccccatcaacaatatcatcgttggatctggttaggtatgctctgcatgccgttctttctttcgtttttctccgccgattgtaatctttaattctacctatttttttttgggcttcggtctccgattttgagatgaaacaagttacctgaaaaaaaaaaattgatcttgattctgagaactaagattataaggtagatttcaaaattatctgtatattgcttaagattctggacaatttaggtttataattggataattaatattgacttgtttttgtctataaccaattacaaaaacaatacatacatgggtgttcatagaatgccattgtgatacacaatattttcttcaattgatttgttttttgatcacgtggttataattaagtttgatccttaatctgttcttaattattagttagtgggatgcaaaagctgagtgttttttcttttctttttgttaattgcagtggcctttttgttaggtgcaagaaaggaaggaattgtcaagaaacacgactacattgatcaaagatcttagctacattttcatgttaactgattaaactagttgcttgtttgtatggtggttctttactttcttttaggagagtacttgttttgtttggtactttgtaatgtgaatttttgttttgtaacacagaccttctaatcttttgacattaaacataggagttattttgacttttgagtaactaattcctcaatagagaggaagtttatcttttcctttctccttcataaacctcaaaatttgacaggaggggttgatatttctctgttgaaaatcagagtgatcacccccgaaaaataataacaataataacagttgggattgtcttgatctttatgttcttatggagttcgcttaatttgagttgaaacttttgtaagagagattagaatgcattagagggaaccttgtgaatggtgtacttgatttaagggaattacatttgttcaacttaccaaaaaaccataccaagttccatttttaacaataaagaaatagaacatcagcttgtgataaacataattgatacacaaaaacaaagagttgaaaatatatctcagttgggactatatgagaaaagagaaacaaaggaatggaaccaactgaactctccctatctgcgccttctgattacaatataacccaaaaagagttggtagtagaattagcttctaagaatcagcaaactggatttttatcggcagcatcttcttcagcagaagcaagcactagctgaggttgaggaacatagccttcccttcgggccttcttgcgttcccgttggagcctgaagttctctctctttctagctctgtagctgttagggttctcaggcaccacttctcttggatatacactcacctatcaattacaaaatacacacaccattgttatcagtttagaaatctaatcgactataagtaagtttcaccagcattataagagataagaaccttcttcctgtcaggtccaaacttctcaaattttacaagtccatcaatcaatgagaatattgtatggtctttcccaaggcctacattctttcctgcatggaactgaatattcaaccagagcaatttagctatcataaaataaaatcatttcattttcataaaaattccagaatcaaagcacctcaagcaatggcctcatttcacaaacagttaaagataaattgttcatatgagcatgtaaattccaaccataaaaattccagaatcaaaccacaaaatgtcagtgatgtggttggcttggctgaccccgaaacttcatttctaaagttgatttaacataaaagatacatttaaatgaggcgagggagagagaagtagattatactagttttatatatcaatgattaatatatgccaacttgaatttgaactgtgcaattccatcagtatttttgaaaccccataaggataaacaatccctgtcaaaaaa

SEQ ID NO: 42604 - DNA, 4373 bp, Cannabis sativa
  modified_base (88)..(88): a, c, t, g, unknown or other
acatgaaccaaatgacacacatatcggtgatgaaaatacttctgtttctttattgatatttaaaggataaagattacattgaaattgngttttatttagggcataaattccaacagtttaaccttattatcgggtctaagatttgtataacataagcaaccaaacaccttaagggaagagtaatatggtttgacattgaaaagaacttttagaggagagaaattgttgagaagtggagagggcattctattgatgagaaatgcagcagacctgcctcatcccagaatttaagaggcatactagcctaagctagaagagttaatccactctcaacaatgttcctatgttttctctccacaactgcattttgttcatgtgagtgagggaaagagattttgtgaacaatattagattgttgcagaaattgggtaaatgattagtattctcctccccattcagattgtattttcttaatgggtaagcctagttgaagctcaactttgtttttaaaagtaatgaatgtagatagggcttcatttttggttctcaacatgtatatccatgtgtgcctagagaaagaatcaagaaaactaatgtatatctatacctagatgaagaattaatagggacaagaccctataaaccagaatacaacagttgcaatggctgagtatagacaattgtggatgtagggaatagaagtttgtgaagcttcccaaggcaacatgcagtgcaaagttgagtaaaagattcattatttatattgctaagtttgatattacaagagttaagtacttgttgaacaattctagaatgagcgtggccatgtcttttatgccacaaagaaaaaatgctattttgttcaaacaaggtacttgaattacattgagtgctatcaagagtagacttgatgttggtggattgaggcagagaggtctgcttgtgagtgttgagaaaattcagttgatttgaatcaaattagtagagacctttttcaagcttcccaacaagcaaagtcttcaaagtaacccgatccttgacaagacagtgaaaggggtgaaacttaaagaaaaccccattatcttgggaaaactgagacatactaagaaggttttaggttatatcaagaacatgcaataaattattgagcacaagattatgagagtgataaggggaagtaaatgaagaaatgaccaatgttttgaatacacaaacctgctccattgcccatgtgagcctgctgatcaccattataggtactgctagaggtaagattctattcatttggaataaggtgatgtgtagctcctgaatctgggtaccagttaggatcattgaccacttctggtgtagcatagtaggcttgcatctcaggtatgttggcagtggcatttctagcaatgttttgaaaagattcatgccttgaaaacgacttatcaaagtggtaaacattgttgaatagtgcatccaagcttgtggcacaactgacattgtggtttttgaccccaaactgtagtaaggccatgaccaccaaagaaacctcctctaaaatttccaaattggcctcctgatggtggcatagaacttctggatgcggaagcaaagtgaccaggtggggtggactgcatcatggcaaaggttgcaccattgccttttgacatagaaccaaatctagaagaaaatggagaaaaaggttgagaacattgacctcaacctatttgattcttggtgagagccatatttgcttcaactttagcaatatcaagttcttttgcagctttgtccaactgaacttcttgagccattaacagtgcctcaatcacaacaacattatatgcatctgttctagtattgacagagataatgaaaacattgtattcagttggtaaaccattgatgatcgcttcaatgtgatcttgtgatgtagttggatgacctatagatgcaagagtatcaatgatactcttgatcttgagaagaaaatcactcaatggagactgttatttagtgttgcaaagtagagttttgtattgatcgatcttggcacgattgagagaagtgtaatattctcgaagatcgatccaaatctgagctgtagaaatagatcctaccattcttaggagcactttctcaaacatggatgagagaagccatggcacgagaatgttgtcctgttgctcctgatcttcatattttggactcagtctatttgcacaccgatcttcttctgtgagatactgcagtggagtaaggttaagatcaagaaacttttgtagtcgactccccttaatggcggcaagaacctgatgcttccatggcaggtagttgaactcatcgagtcgaacagagaacgagtgagagaaagagacaagactactcttaggaagattagtagtgttgtgaggtaaacccgtttgttgacacaaacttggaggaatcgacgaacctccattgttgattgctgaggtctactccattaagaagataatagaagctctgataccatgttaatgtcgaaagcaaaagaacaatttagaagaatgctctgttttcattactgttcagaaaagaagatacaagagtatatatacacattgaatgagttgaaaactcatcaacaactaacagaaagtcagttgacactaactaaaaaccaaaaaagaaaaggctaacaacttgtaactgtttaactaactaaaccaatcataaaccaggtacccttaacatctccttattatacagtccattactattaaaccaaacatctccttcttattacagtccattactattaaatgaaacatctccttcttattacagtccattactattctcgttaccattccaattataatacaatgaactaaacaccaccacaataacacttaaaaaagaaaataaaaaaatttaaagccaagaggcttttatattcataataggacatcactattcatttcattgtccacacttttattatatacacaaccaatacacaaaaaccacgttggatcatttcatgattcagtattaaataaggttagaactctccatatattttcacaaaatatataaaaatataaataaaatcatgcatatatgtgaatgtgacttcttcttcttcatttttttctttaataaaaaaatatagctaagccaagagccaaaagtctttgtgtcgttttgtggtgatcaagtagcctcctacacgtctgttttttctcctcacggctaaggccatgcaagtggcattctgaatgcaatactccacaacaccgccccccacgccgcctcggccactgttcccagctgaccacatcatcagaagtcgccatgtcgtcgacctcttcttttggcccaaaaccaacatatcaacgctttgcttttttgcttcttccaatatcattgggcccttttctttgccctctatcacagtaacatcaatttccacctgtcaaggaccaaccgtgtgattaaattcaacaacacttttatttttcctcataaataataattaattaactacacagtcgtcattcattcaaagtaatcaagtaactagagtcaacatgacctttaaatcacacattaaaaaatccaacaaaatttgagattttagttagacaaattaactgtaaagtgatacatacgtatatatataaagctcaagaaggtgataacacagaattattgatgaacattaatcaacaaactataattatgataactatactaaaaggaagtgcatagcattattgattatattatttacccacctcggtcttctttgattgacacatattcttaagagcttgaacaagttcaaaagccttcggagctttctcctcgctcaattgctcccctgttcctgttcctgctaattaaaataaatctgatttagttattctcaatttttcacaaacttaataatctacggagaaaaattatgaaggaatataaagtagtaataagctcaaaaaccttttctagataccggtttgataacatggaggagaactagcttatcctggttgggaatagaatgagagagagcccattgaagagctcctttagcttcgaagctagaatcgaccacaaccatgatcttccttccaattcccaaactgggtttcatttcattttctgtggttttttgatcatccccagcaatgccatcagagccttgatcatcatgtttttgagcagccgctttaagagacttctcttgaaacttttgttgaataggtggagatcgaactcgaaccagaggcctaatcctgctgaggcagaagctcggcaactttggacctgatcttctacccatatcttgagactcctacggagctagagaaagagagagagaaccagaccagtta

SEQ ID NO: 42605 - DNA, 3680 bp, Cannabis sativa
ggaagaagcggggtagaggaattgatgccatcaatgatactcttcaagtatctctgggattactttttcagtcatattactgaattttaatattcttgaactttcttattatatcctttgaatctttcatgggctttacttatattcatttagtgggcctttcctatttttctagcatcatgggcctctcgttgacccaccaaattttcgtcccaaacaaagattattggagaacaaaatcttggaagtatatttatttttatatcaatactctaagattgaatgtttgatctttgaatactaaaaagcattaattatgttgatcatagtatattaaatttaacaataaatataatataaataaacagtgtttctatattatacgtgaacagtcaatgctctaccacttcagtagaacgtattattatcgatcaatgacaaaattgtcatgataacattactcagaactgattttttgttttgctaactcaaacaaataaaatcataaacaacacccaagctgagctactacgtacttgctccccccatcaaaacccaataatatagatcaaattacacaaaagaaatatctatagaaacaccttttatttttttctaaaatcaatttttagatttagacagttcatcagccccctccttgatcaacttccacgcggcaatgacgtggcactcctcagtaagtgtggcccccaaagcaaacctcaacatgtataccccacccactattgtgtgcgtcatatatagctttcccgtcgagttgacccaatcaagcagcttacggttcaacacctcggcatgacccggctcatctagcgggttcggattcaaccgaaagcacaccaacgcaaaacgcctgggcacaacgatttcgaatctcgggtcggaccttacgaaccactcgaactgtttcgccatcctaatatcggacctgatatggttctgaagattttctacgccgtagcagcgcagaacgagccataaccggatcgacttgaacctccgacccgtacccacttgccagtctttaaaatccaccaccgagtcggactcactgagtttgtttctcaagtactcgggatttgtactcaaagctttcaccaacacatcagacctcttaacccataagcaacaacagtctaaataagtgagtagccacttatgcgggctcatactcagtgagtcaactcgctctattccgttcaaatagtgtctgaactcgggacaaatgcatgcactgccaccgtaagcagcgtccacgtggaaccacatcgaataatctctcgccacgtcagctaaaagctccagtggatcaactgcagttgtagaagtcgttcctaccgtagcgcacagatacagagggaccaacccttttgccacgtcatcctccacgacccgccggagcttttccgggcacagggagaaacctccgtcaagattcgtttggattgttcttatgttggaaggggaaattcccgcaagcttggaggctttactgaacatcgaatgggtctggtcggagctgtagacgacgagctttcgcatgtggtcggcgccgccgattctgtcgagcgtttggtcacgtgccgcaatgagggtcacgaggatcgattcgctcgttgtattctgtataacgccgccaccatttccgttttcagaaaagaagaaagaattgggaagacagagaatgttggcgagccagtccatgacgaccatttcgagctccgtcacggctggagatgccaaccagttgaatccgacggcgttaaaaccagtgcagagcatttcgccaatgaaggcggcggtactgaacgtggctggaaaaaaggcgaagaaatttgggctgagccaatgggtcataccggggattatgatgctgttaatgtctttataaatggcttcgagagattcggatcgtgatggggccgtacggggcaaccgggtccgaatataaccgggttgtacttgactgagtactgggtaggattcaattttggtgtagtaatcggctatgaagtcgaccatttggtgggcttgtttgcgaaattcttctacgtctaatattggtttgaaatcgtttgaagaagagtcgtgatcacttaggctacccatcttttcaagaaaaaactaaaaatacggtcacggggacacttctagctactcctattttttgagatttatagagcttaatatgggaacttggattttggaatctatgaaaatggtccactgaaaatgacaatatatatatatatatatatatatatactatatattctagtttcagtggtatatataaatatttagtgtttcataatatattttttttagtagatggaaggtatgtataatatagtatacaacacagcttacaaattatgaataatatataagatgaatagattaaagtttaaacaagagttttaaacgtgtatataaatatgaaaagaaaaatcataagggaaccgtgcaattcaatatgaaattttaccaattttaattatataaacaatttaaaacaattgatgttattaaaaatattatttcacatattttaaatttcctaaaaatttatattgatttttatgtaatttatattatttttaaatgtggtttttattggtgttagatagtcttttctaatacctattattttttgtgttatttttttagtttacatagaatttcagtagtaaaagtcgaaactttagttcttttggtaggattcaattgggctcatttttgtagaatatcaattagctagagaaatctattcaatttcattttttttttttactatttgagtatagctttagtgttttaatttttaattatagtagttttgtttaatgtggctcgcgataaaaattttgcagctcataatttgttaaagcataccattcggttgaacgatgagctattctaattcgaagatgtttcaccaccaattataaatagcagcattattaattcaggagtaattttatttacaatatcaaaatatatatattggtctatctaatatgaatgaatataacatcatgaatgttataattattattttattaatttatgtttttatattttgtgtgaattagaagtaaatgttgccaccattgaagatactaattcttcctaattagtcaaaattgcatttacatcactcaccttctacacgtcacattttctacacatgtaataataaacaaaaatttgacattatttaaaaaatattaacaagtatgttagtaatttttacaacaacctccttagcaacctaatctagcagtaaccacattaactttgttaacaacccttgcaacaactatataagaaacctaattttatacaattactatgttagcaacctttatagcaatctaatcttagaaacctttatagcaacctttatagtaaaacaacaacaactataaaaaaaatataaataaacaatacataaacaaacaagaactaagaacaaataaataaacaaattataaacttaaagaaaacaataatagggaaaaaaaaccatagagtatatgcatttgtattttaaaatagaaaataaaactaacaacatcaaagaaacaataaataaacaaaatataaacagaaaaacctaaatatcaacaaataatcaaataaaatataattcaaca

SEQ ID NO: 42606 - DNA, 4780 bp, Cannabis sativa
ttcttaacaccacccctcaaacgatggggtgaagcaatcacaccaagtttggaaatgaagaattgaaaccttgagggagacagggccttggttaggcaatcagcgatctgatccgaggatggaatgtatctcacttcaagttctttcttcaagattttgtctcggacaaaatgaatgtcaagttcgatgtgtttggtccgagcatgatacactggattagaagcaagagcgcttgcactcaagttgtcacaccaggttatagaagttccaggcagtggaaagctcaattcatttagtagagactcaatccaagtgatctcggctgtaacaagagctaaagctctatattccgactccgtactggatcttgagacaacagcctgcttcttagacgaccacgagacaagggtgtctccaagatatacacaataaccgccaactgaccttctgtcatcaacgcaacacgcccagtcggcgtctgaaaaaccagcaatgtttaacttgtcactgcagctgatgtgaagaccatgatcaatcgtacccttgagatatctcaagattctttttgctgcaccccagtgaactgttgttggtgctttgagatattggcttaacttgttgacagcaaaacaaatatcgggtctggtgttgcacaaatattgtaggcctccaattaagctgcgataaaccgtggggttttcgagtttttccccatcattaatggacatgtttttccctgttgcaattggtgtggggcacggcttgagattttccatgttatttttcttcaagagctcctcaatgtattttctttgaacaagatataatcctgtcgcatctcgaatcacttcaatgccgagaaaataatgaagatgacccaaatctttgagtgcaaagagcttgttaagttgctggataaagccttgaagttttgagctgtcattccctgtaaccacaatatcatcaacgtagatgagaactaggatagtcactttaccatgcttgtaatgaaatagtgaagtatcagccctggagttcttgaagttccattccactaatgtgttcttcaacttatcaaaccaagctctaggtgcttgttttagaccgtagagtgatttgtgtagcttgcacacatgatttggttttgtaggatcctcgaatccctctggttgatgcatgtagacatcttcttcgaggttcccattcaagaaggcgttgttgatgtccaactgacgaatttcccaattataggagacagcaatagtgaggacaattcggatcgttgaggctttgacaactgggctgaaagtttcactaaaatcgagtcccggtctttggtgatacccttttgcaacaagccgtgctttgaatctttgagtggaaccatcggcatttctttttattttgtacacccacttgcaacctacaacattgtactcatcggaataaggaaccagagtgtaggttttcttagccttgagagcaacaacttcattattcatagctccattccaaccgggatgacttagagcttcagcaacacttctaggttcttctctttctggatcccacttagttttactgaaatagactttaggcttgaaaattccactcttggaacgggttatcatagggtgtgtaggctgaggttcagcttgacaatcggatttattggagctggcagcagagttggtttcagtaacagggaggttagccgtatgtgaggaggctgtttgttcacctggtgtatgtatttctggtacaacatgaaagtggtcagtgttcaaagatgagtgagtggagcgatttacctgacttttgtctggtgtagacatggccgacagtgaaggtgctgctgttgggatttcttgtctttgtgttgttctttcaatgacagggacctgaggcagattgttaacaggaaaatgcatattggggagctgagaccaggctgaattgtgtatgatgacagagttttcaggagcatagttgttaagaaaaccatgcttaaatggaaactcttgttcattgaaaacaacatgtctagatatataaactctacctgtagaacttagacatttgtagcctttgaaggactcactatacccaaggttcacacatttgagagagtgaaactgaaacttgtgcgtttgatatggcctcaagcatggaaagcatgctgccccaaaggttttcagcaagctataatcgggtttcttcctatagacaacttcaaaaggtgacttgtcatgaagtattggtgttgggagtctatttatgagatagacggatgtttgaaaagcatcgacccaatattttaagggcatacttgcttgagcaagcaaggttaagcccatttcaactatatgacgatgttttctctcagcccttccgttttgggctgaggtgtgaggacaagaatgttggaagtggattccatgttcttgaaccaaactctcaaaagcttgatactctccaccataatcactccgtattgacttaatctttgtttcaaattggttttcagcaaggttcttaaactgaacaaaggcttgaagtgcatcagacttgtgctttagagggtatagccaagtgaacctgctataatcgtcaatgaagtgaatgtaaaatttaaagtttgtgttggaagatataggagatggaccccatatatccgtgtggattagatctagcattttgacagccctattattggagtttttaaaaggcaatgcatgagattttccatattgacaagcatcacaaaagtttgtctttaattcatgagaaacggttacattgctagatttcagggctaacctgagaactctaagagatgggtgacctaaacgtctatgccacacatcattcttggaatttaaactagaactatgctgaacaacattgacagacctcacagaattatttaaaacacacaaagactggttttgatgactggtaggctcgggagagattggagagagttgatagaggccatctttaagtatccctttgagcagcaccttccttgtggctttgtccttcacaaaacaaaattcagagtcaaattcaataagtatatcattatctgtaacaagtttggacacacttatgagatttttagctatctcaggaacaagcaacacatcctttagaattagagatttagaactatcagttgtgggaatatggctataaccaacatgagaaatagttatttgatgaccatcacccacaaccaacttatccttaccaccatagtcagacttttggctcatattgctgccatcggatgtcacatggctgctagctccgctatccgcataccacacatcgctgtccacgatttcaggagttgcagtgaaggcagatggtgggtttttcgactgaggttggctgagatttgggtcagaacccatgaaagcatcattgtatctattatagcaaacagccgccgagtgcccaaacttgccacacacctgacaagtgggtctattgttgttgttgcttgaccggcctctcccccttccacgatggccagtgccacggttgttaccagagtagttcgagcgtccaggattatggttgtgagaagcattgttgccacggcctctactggtgttatcagatctgttagccatgttggctgttggtgtagcaaggtgttttgggttttcattgagggtgtgtagacgctcgatcttgctgtcaaaactcaataaaagttcctgtaattcttgccaagtggtacttggcctagcctcaatttgcaaaacgattggtaaataactagcatcaagacccgacaacacattagaaatcaaatgagcttcggggtaaggatcccctgctagagtaagaacatcagaccaagctttcttttgtcgaagataatcaaccatagaagtgttacctttccttgttgtctgaatggctgtgcgagtatcgtccattttggacttggaatgagctccatagaggttttcgagagccttccaaagagcagcagcagttgtgcaccccataacctcggttgcgatggcttcggtcatggaactgtatagccaccccattagaagttggtcactcacaacccagtgttcgtattgaggattgagctgcactccaaacccgacttgcccttcttgtgcttctgcaggaatgaactccggaggacacacacgggtgccttgaacaaaaccgtcaagccgatgaccccttattatggtcgaaaccattgtcttccaaagggagtaattatttctatcgagtttgagagggaacggctggtttagtgtgctgaagggttgggtataatttgcaacatagctcgactgagcttgtgttgtgttggtggtgacccctgcttgactcgatgcagggatggggctgttgttggcagcatcgttggctgcagagggagtctgagggaggccagtcgacattggcgtgtgcctgggttggctctgataccaagagaaagtttgtataatacagtaaataggaaaaaactcagctcgaaggaggctgaggcatttcattcaatatataggtagggatacaaagcaataggccactgtgatagggacaagtggcaactaacaataggaaaaaggaataacagaaaagattctacaaggacaattaatgattacaatgattggcacaaatcggatgggaatattcttgatctatgctgacacagcagtgcagagtaatcctctgaggtaaggagcagagaagagaaatgttcatcaattcttaacaccacccctcaaac

SEQ ID NO: 42607 - DNA, 4020 bp, Cannabis sativa
tttaatgtatacacatttggagatccattgggactgtggtatgataatctgatatataaattctttcgttggtacctaatttagtaccataaaactaataattagtatcagagcagtttcatgaatatatatacattaaatgttgtgtgagttttatttatttatatatgtgatatgtatgtgaatggatggttgtatttttgtgaatgtatgagaggtaataaatcgttaattatatgattaaattaggtgtaggtttcgttattatttttttttttttagaaaataatgtaggtcaatattgaagcataagaatttttatgtaattttattttatgaaattatttttacgtaaaaattatatgatgtaatgtatattgcatgtgagctcgttttctaatcttgaaactcggctatacacgtcaaaatcacattacatgcgagctctggttcatggaggaaccccggccatgaaagaccacccaagtggttctcaagtttcgtgcccttcttccatgtgatgccgtttagcttataaatccgatctaactaggaacggtagtctcgtcgatcttcggtctgtttcagctttgggctcacaggttggttcaaacattgactatcaacgttgcaggtggtttaaacattgattgttaatgctgtaggtggtttgaacaccacctgatcgttcatgtgaagcacgataacctgcatgggactttagtcgtgaccatgtacgaaaggccgttaattatccaaatgttaaccaccgtgaaggtgctacttcacctatgaatctcagtccatactttcccaacatgaagagactcataagggtcatagggtccttcggacctacctattattgctcctcggaccctcttcatctgacttccatgcccaccgtggccatgctggctcatggagccataaaaaatggtgggctgttgtggccgactcttttttgctcgtacccgactatattaatatatatatgtgtatatttttgagtgtatatatatgtatatactgtatatatattgtatatatactttaaattatcatttaattatttaatgtaaataattaattattattttatatatttatttagttttaaattcaaaataaatattaaggtaattaatttggacttcaaattcaagttataattatcttaattattttgtattaaataataacattattttattatttttcataattaagataaaataatataattttgtgggatatttattttaggtttgaaattcaaattcaaatctataatcatatatattaagacaaaagctgtcttaaccccaattaaaatataaatgttattatttcaaaacaaaactaatatgataataaagttgtcttaaatataaatgttattatttcataaaacctattaattgtaacaataagctgcagaatggccatatcaaccacacagttgacatgtgggtttcggtccattatatcgacctcttctgccttttccacctattcttcctctattgcttatgttgttaccattgttgtgaccacctttgcaattttcaaaatgttttgagccacgactagatctagggttattttctttatttgcataattttcatttggggaaaatagaccactaggttgctttgagtttttagagtgtagtgagtctctccatcttggtgtcacaattcaagagcatatcctgaagcgtttgccaagttttagctagttttgactcaatgagaagcacaaaaggcatatattatgtatctaaaccaaataattaactaattgagattcatggtaggattcacctattcacatgcaaattgtctcttttgtcttaggtattccaccattgtatcagatatcttcctgtgtgtttggatattggtcttatactcatctgtcttagccttggagtgatcattataaagaccctttagtgcatgccatagctcagcaaaggattgataacctattacatcagtggctatgccttctattatagactcatataaccaacccatcaagtgtttgtcatgaacaatctattgtgcaaactatatatatatatatggattcacttcactgttggttgcagactgaccattagctgaaataggaaatggtataaactcttggggcctggcctagtacttatgaagaaaccatccaatttataaaacctagcaataggttagaccatagttttccatagagagagagattatttttgtctaatatgagagtaaatgattgattcaatgtgttcccaaactgagggacaacaacactagaagtatgtccttgagagaaatttgttgttatttcaacagaggcttattgcttgctgaccaccagagctgatctatctccctgagcagctacactaggagtttattcaccaatcgacatttccagtcaatggctctgataccaagtaagattttacacaaataaaaaatgaataaatttagctcaatgagcttttgtaattttattgagacttatagtggataacaagagcattgtaaaatagagacacctcattgcacaaaaaataatgcacaacaataaaatggaatattcctaaaaagttaataacagaaagatgccctttgctatactcagaatgtgtgactgctcaataacgagctttcaattgccacttcatattcaattagccgctgaactggattggtgacttgtcactggttaccatttcaatccttaacattttctacttcgattattttttaaattatttaattaaataaaatataatattttgggtgaacttttaactgtgactcccctaaaacttttgtttgttttagtaccgaaagtatgcccctaccaatatatttttgtatgtaaagagagagaacaatatataattaagtcgaactagttgctatttcttaactatatatttatattttatatatatttttagcaatattagttaactatattgatcatatctaaacatatataaatatacatatatgtcatttaagttcaatttcttattaagatgaaaaagttgaatacgattttactcgaagctgtttgaatatatgataaaaaaaaattgatctatagttctacttctaaataatgatatgcgctgactaaaaatagcttgaccttttctctgaaattgaagtttattagtcgataatgctaatttaaaaacacgtatatacgtatatattatattattaaacaagtagcagtacttataattaacaaatgtatacatttccatatttaaaattataacagggatttggatgtaactaaagagtgaactatataaatatacaaataggtggatgcatcatgcatgtataaatatatatatatatatatatatatacatatattctgggttggagatattgatcgagatcgagttagtaactggccaggttcatctgattatatacatccacctcttaaaaataataatactagctacattatatatgggttcatgaatctataaatatagtgtgaaaggaatcgaatataagcacataaaaaccattcttttaattacttggctccaattttatgtgataacataggggtactaatactaccaaacggtatagtccagtactagtactgtttacgcttttgtttttttggctgattatataaaaaacacacatacatattattttttttcatatataacatagtatatatgaatgtagatgaggcaggtatatttagatactgtagtctcaaaaagaactagtatattatattacaggagctacattatatgaatatatatatctttgatttttaaaaagattgtgttaaagtcaaatgataattaactttttcaaccacagttattagtataagtggcattgtgtgttaatttgatgaagtgaataagtatatactataagtttttaataattgttgtttgaagaaaggaaccaagttattatataaatgtatttcttttgcttcctcaataattg

SEQ ID NO: 42608 - DNA, 3367 bp, Cannabis sativa
ctctagccattgcttcagctgcttcaatttcaagccactggccagattcatgctttttcttccataactccttaaatcttttacaagcatccctggtacattgacaaaattaataataatacaacgaaagtctcttattggtaaaaaaatatcttatgggagattgtgctcactttaaacgtgaggctccaaagctttcagagaatgacaccattgggggaatatcatcaatgttaaaaccagctgctacagcacgtgcaaaagccatgccttgctctttctgcagcacagttttgcgagtttccaggactttcaaaagctgaactctataatgaatacaataaagacaaggaattaccattaactgtattacaattcaaataaattttgacagcctgaacacacaaggacaatcaaaatcaccattgagtttacttggaattgttcatttttatatcctaatatctagtaaaccaaataagtatgtcttagctattgcatgtgaaccaaaacaaagaggatctatgccatacttacacacagcaatctaacactctatcatattgaacacaagttgacgtacgtaatagtacagagctcaagtgtacagcattccttgtctacaatgactataaattagcaaacagttaaaagatgtgaggcttctttgatgaatatgacgctatatgtgatcatcgatttgctcacccattaaaagacaatccttattactctaatgatttagcctatgctgtaacttttatcattatagcaaatttataatcagatacatcagaagtttgcatgaatgaaatagtatgtatgtacttcgaattcccctcttttgcagtcgatccattcgattgtggctgtactccaggctgaaaaatcacacacaaaaaaactagattagaaacagtactcaccttgtaaagaatgactgcttttagttaatactcaccttgtaaagaatgattgctttctcgtcattgatatctggcaaggttctgctacctgtccaatatcattggaagctatttaagccaatagaaaataaacaatacacaggaaagagttaacaatatgctaggagcaaacccaaattccaaattcctacttttcttacaaaataccttctatgctttccgcaggttttgacagatgttcttctacctgccacacaaaaaataacccgaaactgaactttctcattctgtaataatacaagacaaggaagctaattttcctcagaaataacataggtacttacaacattaagagttgttgtgtcattgtttccctgaattgcaattgcctcctcaatctgtaatatctcagattccaaggtgtacacccgttccaaaacctctggagttcggacaaagcgaacaaacctagagatatacattacacattagcttcgaaagcaaatgaatatagagaatgaaatcaaaagaataaacagtttttgcaacacaaactccataactagctcctcagtaagatataattgcttatgaaaaaggttatctttttatattacattcatgttgatatatatagtagttctcatgagttaagacaaattttaatatataagtaaaagcaatacagacctttcaactgtacccttggtgaaccaccaagcatcacttgatggatctggctcaaggataattgaataaccccccttggccatttgttcttgggcagttttcaagtgagcaagaaatggattcagtaaacctgaatctatcttctctgtctttccatttgcagatataaccaaatcatacctacaacaagttaaaaaaagaaacacaaaaatattaaggttgtcaatctcatggtagaatgtcaatgtttacaaatcacataaaagtaaaacattaaaaatgacttcacctaccaactctgaattacatttttataatttcatccttaaaagccaagaaaataaaatcagtgttgcttgtcaactaaaattcttactaaagattaacaattgaagactaaatgaactagaaagcaatgctatgagacccagaaaagtaatataactttactttactaaaacgaataaaacaaaaatcatttctttataaatcttagctttcaataaaaccctcaaagatccatagccaaaaacgtaacgaaaataaattcagatcttttaagaaacaataaacagtttccatctcagtcattactatcaacaaattcttcgttccaagattgcatggtaaaaaatctaatcaataatcatttgggaaatcaaacataaaaagaaacaactcagtagtctctgaaaccccaaaagaagtagatcagattcttacctagtccgagtgggtgtgagttgaaagacaaccgagtcaagcagagctgaatgcttcattttcaaaagaggaatctttttctcacccaaaaaatgcttccgctttaggagctttaaacgaaaatggcagtgaaaagtgggatcatggagacatggggggagaaaagggtaagtcaggaaatcaaaagaaaatgggattgagtctaaagatacacgagtttcagagaaaacccagaaaggaaagtttcaatctttagctattaaaaagaataaaaaactgaactttaagagagggagagagaaagggggatcaagattgtggaagaaacccaaaaagaaagaagagcttcccacccacctaggatacccagtgtttaagcagagactgaaaaagttggctgtgaatagagagagagagatgtagatattgagccgttgaataaaggaaacgtgagaggggtataatgggaaataaagcatgagaaaaatcggtacttaagcgaaaaggacaaagttcttatttttctctttaaagcatagttttagtagttggagatgttcgtgtatgaaattacgaaaaagccctctgaggtcattttccacaataaaacaaccgttgaacacaaactatttacgaatattaactctttttaaagacaaagtcttgactctaacatcacatcaaaccctacgttactacaattttgtctaaactctaaaactattacaagtaaatactaaataaataccatgaaaatctacatattttatttgtttagtagttgaccatcaaacccgtacgtagattactacaactttgtctaaactctaaaataatttacatgtaaatgctaaatatccccaagtatattagaattaatctaaattatcagtgtctaataccgtaaaagataatatattgttattggttcaatatgaaattttacataattttatttaataaataaaataaaaaattattaactgcttactcttagtcatatcctgtagaagctaaaccagcaaaac

SEQ ID NO: 42609 - DNA, 5428 bp, Cannabis sativa
gtcagcatgaaataaatccatacggctcgaacagtttccaaacaacaagaaccagaagcacaattaacataattcctagcttgccatgacacaacaaactgaccaataacgctaataatgccttccaaaatgaatacatttcttggccaagaaatttccaataataaaaatatttccaatgcaagataatatatgtgatgaaacttcaccataccactggtttgcttgctctcagccccattattcccttgagttttgtcagcctacatgatgaagaatacgataactttaaagttcatgatttggtcacaaaaatcaccaaatacaaaatatatacatatataaatatatatatatagatacatgtgtgtgagtgtatgtgaaagaataataaaaatgtagaatccatacatcagaatttccataacttccggctgtctgaccatccaattcacgttcaagtctgcaaacaacataaaatcagcattagtatgattaaaattaagaaagttaattagttgggagcttctgaagaaggtatatattatctaaacttggggataaagaatacagagcactgctcacttcaagcttcccaaattaatactcttcctcccctatatctcttttttctccaaggaaaagaacaagaagaatattggtagaagaataatctttgtgttaacataccttggtaattctttaaggactggcactggaagtccatctgacccttttaacttttttgttaggctttgctcctccatttgctcaaaagttcttcagtacatgaaaaattcaccagaagctcactgtcactacagaaaacataaatttcttcttatagctactaatttactgtttctcccaacaataaattgactaaaacaaaggaaggagctaaagaaggggaaaatgaaattgttaagaaccaatatgcttcataaagtaatatcttcacgaatccaaaatctaaaccaaaagtagaggcttatatattcattacgaaatcataaatatatattatgagcgggcaaggatgtcaaacttttgtatcaagttacaaactttccatcccaaaagtgattgtaggttcatgcaagagtaccaaagctttgggttttaattctcaaaattcattcagcttcagttatgatgttttttttaacataaaaacttcaaaattgatcataaaagaattgcagaagaactggagaactaccacttgagtaaactcatctccacaaggagcttaaccctagagctattaataaaggttagtaattgatcattgcttgatctcaaatcttaaataattcaaccttagacccttctgtaaaagtcaaagctggccttttaggagagtaaatcattgcatacatgcatacccaccattggtgtttcctcaaaatttatggaaaatcagtattctccctaacatagtcgatttcttaacacacattcaatgaaaaaattctaagttttatcagaataaaccctcaatttcgacagttcttcaagcttcgattcatttcagaatgtctatagccaaaattctaatacctcaaaatcaatttctaggaaaaaataataataaaaaaaataatttctattattcaccctcaaacatcaataaattcaaaatcagatcgagccacagtttcaaacatacctaaaaaaaaattggaatcacattcgaaagagcacagaaaccgtaatcctagctcaattttcgtaaaaaaaaaaaaaattgattcagctgtggactgccccgaccgacgagaaggagagaaggccgattcaggcggcggcgcgtgggtggagggaagaggaaagggatttttgtttgtttgtttgtatggtatgatatgttataagctgattggctcagatttggtagttctggttgtccacgtgtcgagatttggtggggttggactacaattaggggaataagctcatcattacccgatctttcctcctcacgcggcttcggttgggcccaaacaactaacccacgtgtaaatgtaaattggaggctaagttgaaaaaatacttttttttttttttatttatttatcaaaaatacactcatattaattttttattaaaatatactcattcattttttaagtggactgcttaatatactttcactctctacttaagtctagcatataatttacataacttaaggggtctaagacatcatccggtatatctaaaaaaaatatgaaaatagaggtaaaaattaaaacaagtaaaacaaagtgggtatacaatgtaatttcctctgtaaatcggtcctaaaggagtccatcaatacacactctatttgttttgtcatttaggaagaacaaaattcacaataatttacaatagcaatagttaaacaatttacaagtgttatacctataacatactctattttagataatattttaaataattataacgtacacaattataactataaaaaataaattaaatttgatttttaaatgttaaaataaataaaagtacatcgatatactttttctagaggtacattttagaattttcacctactttaataggtttttttttttttttttgactaaatttaccatggaaatatgagtgtagtacactccctaaaattattttagtttcaaaagagttgattttcacaaattaaacaataaaaaaaccttagaatgtgtcatcctaaaaattcacgacaacgtttagttagaaagaacgaaagaaaataaatatatacatatataaaaagaaaaaaggaatacaaataaaatcaaatttaaaacacagaaaaaattgataaaaaaaattattaatttttttttttttcaaatcttacattaaaatttagaatggtccttccattttaaaataaaatagtgattctaccaaaataataaaatagtggtactattgaaataaaattctaatactttaaaaccaaacaaactaataaaataaacaccaaccaaagccaccaagcttaatcattcatattagatgaagattacctttttttatggaacacattagcattactttgggtggggttgtgaagaaagttattatgtagaaagccatacaatagacaatcaccccaaaatcaaatgactattaatatctattatctacattactatatgcccctacatgagccatgagattcaaactgccccaaaatacaagaatcaaaccattccaacaaggatgagaaacagttttacaaaagggactatgggagaccaaggtcagagattggggtgggtgaaacattggggactaaaaggatctccgaggacgaaaaaaagatatgatcccctaaatttggagaagcttttaaaaaattcccaaaacacaactttatctaggttgagaaaacttcctctgtatgaacaaaaccactgtctttgaatctgctgaaagccgactataacctgaacaactcgcaaaaaccgggatcagaaaacaattgtgttttctgtagaggagacatgtaattgtgttttcaacaaaattttgcatgtaagatcttgtcaccacgcatttgcacatattgctcctgaaaaatgaaatgacatcatagagaataaagaagtgtttttgaaatgggatataaacaaattatctgagatgagaaatataaaactctacatattacacatagcaataagtttggccatttgaggtgatctcttgttccaagttgctatagatcttttgtttttgcattcacgtgtggctgcgttttcatgatttttttctttcccggatccacttagaaacttaatggctcaatatcttctatttggttactttttattttctctaatgactaaccttcagactgagatgagcagcacatcttctgttcatctatatggtcgatgtcaagcccgagaaaccatgatccaacactgacagcatcacaagcatatgtacgaagaatagacctaatcaaacaagggaagacagtctctgagtcctaccatcagtgcttgcataatacataatgtcaaccaaaaaagaaatggaaatgggatagaaaattacctgtttattgatacatactgagccaaatgtctagaaatggcatatatctcaccagaggcatgtctaaaatatctgtatcataaggcaaaaacaaatgcaattatgagccaattcaaaaatactctaagccttggtcgttacttactagaatgcttgaacaaatatccagaggaagaacacttaaacatgaagcttaacgataaaacaggaagctagttaagttaattactcacgaatttgcatcaccaaacttccaccagtctggctcgtaccatttgttggtcctgcattatcaaaacaaactctgagctattcagcattgaaaaatttgacaggctcatttagcaactaaaagttatgtcatctaaactcacggctcagtcaagacgtggcctgatttcatacacccaagataggtatcttgtttgtccaaatgagtatttaagatcgcttccagagcatctgcagttttgaataaaaggaaaatcaataatcagcacatacttaatactaattactttaggtctacagactttttaattgacataaataaaacagccaagatttcttcgtttggtctacaatgaccatagagaacatatttgagcaaccatgttggtaagaagagaaaaagagatacttctgctacttgggatttgcctatccacccacatagcaactattctcagtagttatttgtagaagaattagctcaaacattgggttcatatacactatttactttgtgaatattaacactttacatgcttggatcaaaataataataagcaaatcatcctgtatcatgcggttgacatttagagtgtcattgaacagtaatgggttagatcacaaattgaaacctaagaaaaggaactaaatggtccctgaaatttccaagtaatagtttgtggctatggagttttcaaatgagcaacagttctagtgtgagtgagtgtgtgctttgtctatataaaatagccaatagaatgaaacagattaagtgaggaaaggattctccattgttcgttactactactagaaaattattttacaagggctacataccaatattaacaaaaacatcatcattgaccttaacaaaaaatttggcgttccatttctgtacagcatgaatgaggaatgactttatctttctgggacgctccttaggtgattccacttgatcatcctaaacaaaaaggtagaacaagaatctgatatttatgcactaaatatgttacagatttgcagcaatcttttgacaaaatgtttgacgtccaattttggattttagaattgttagacaaataaagttcagttagattttgagttgtgcattttctagtacctaatg

SEQ ID NO: 42610 - DNA, 3907 bp, Cannabis sativa
atgactctgctcttagagggcctccaggcgctcgggcaaatctactctacttttagctctggcagggaaacttgacagcaacttaaaggttagtatacttgtttacttattgttcacaggcaccacatggtttagatgtacccctaatcctttagcgtagtcaatttttcttctactttgtttttttttaggttgttttgattgaaacaatattgtatgtttaacaaagcggcattggaaattttgcttaattattgaggctttcaatgattgggttaggttaattttttgtcaacaatgttgtgaaaggtctaggcctttttcctctttgagaagaggtgtaagccttaaattttaaagatctgaaattcataaaagttgtggcaaacagagcactacttaatcctgaagatacataattcaatcatttcaaaaaaaaaaaaaaaagaagatacataattcaatattagacttgtaaataagaatgctacacttttttttcaaatagtccatttaatacttgatttttgatatcagaaatctgggaaaatcacttacaatggacatgaacttaatgaattctgtgtccaaaggacttctgcctacattggccaaacagaaaaccatatagcagaattgactgtcagagagactttggacttcgcagctaggtgtcaaggtgcaagtgaaggatttggaggtttgttctcccattgttaacctttcctatttaacattaatgcaataattttatgaatatgcagtttctgcaatttactcgtatcttgttatgcctcaaaagtactctggttctgcttttttatgatcgttaataattgagaattaattacacttgctccatttcttcttctttcacttccttcaatcttttagcgtacatggaggatttggctcgtttagaaaaggagaggagcattcgtccaagtcctgagatagatgcatttatgaaggttatcaattgaaatttgaatctcgtacttatataactaggatttcttttttggaatctttaacattaagtgcttacattattattccttttctaatagtcttcaatttaaattaacttttctgagcaggcagcatctgttggtggaaaaaagcacagtgtgtcaacagattatataatgaaagtgcttggcctagacatatgtgctgatacgcttgttggtagtgacatgctcagaggtatatcaggtggacagagaaaaagagtcactacaggtctttctctccctcttttctccccataaaatttcacttctagtaattaggatatgcaattaagaggaaaacaatcttgataaaagtcattactattatactgtattataacattgctcactgtggaatctggaacacatgagctttcattttgttttgcatattggtctcttgaatattttggtttacttgaatgcaggagaaatgattgtagggccaaggaaaaccttatttatggatgaaatctctaccgggttagatagctctactacatttcaaattgtaaaatgtattggaaactttgttcatcacatggaagcaactgtactactagctcttcttcagcctgctcctgagacatttgatttgtttgacgatcttgtggtattatcagaaggatatattgtataccaaggtcctagggaagatgttttagagttttttgagtcattgggtttccgactaccaccaagaaagggtgtagcagattttctacaagaggtatttcttaaaaggttcatcttttgtgttgtcttttgttgatcacctaactattttttgttatgaatattatctatatatgtattttcaggtgacatccaaaagggatcaagctcagtactgggcagatcactccaagccatacgtgtttattcccgtttcagaaattgctagagccttcaaagaatccagaattggaaggtctctgcagtctcatctttctacgccatatgacaaatctaatagtcatccatcagctttatcaaaatcaagatacgcagcttcaaaatgggaactgtttaaagcatgctatgcacgggaaatactgttgatcagcaggcaccgttttctttacatatttaggacatgtcaggtaattatcatgttgtcttgttaattacatattgtcgactactctgttttttttttcttccaaactactcaaattaaaattaagtgcgtaattccgcaatgtgtatcatcttctatattcaaagtcttaatagtttgctttgttttaatttatactggttaaaggtagcatgtgttgggttcgtcacctgcacaatgtttcttcgaacaagattacaccctgtagatgagatagagggcaatctttacctggcttgcctcttcttcggtctggttcacatgatgttcaatggattttctgagctacctcttatgatatctcgtcttccagtgttttacaaacaaagagacaatttgtttcatcctgcatgggcatggtccgtgtgtagttggcttctaagggttccttactctgttattgaagccgttgtctggtcttgtgttgtatactacactgttggtttcgcccctggctttgggaggtaaatctgattaccgtcgtggatgtaatgctttgcattttttatgttgtttatccttacatagattcgtttatgcttctttgttacagatttttgcgcttcatgattttactcttttctgtgcaccaaatggcattgggtcttttccggatgatggcatcccttgctcgagatatgatcattgccaacacatttggatcggctgcactgctagttattttcttgttgggtggattcatccttcctaagggtatgagtataattgttttatttaacaatatgctatgaattatcagcagttacgtgactttattttttatttttgaacaattaagtgactttatttagtttaactttctttcagaaatgattaagccatggtgggaatgggctttttggctgtctccactttcttatggacaacgtgcaatttccgtaaacgaatttacagccactaggtggatggaggtgagctttgttggcttatgagaaaattttcgctcaatttttaacttgcttctccatatacattaacgacatgttcattaaatcatgtacttgcatatttatttcctcccgaaactataattttgcagaagtcagttcttgctaacaacacagttgggtataatgttctccactcacatagcttaccaacgggtgattattggtactggctaggagttggagttttattggtttatgcgttgcttttcaacaacattgtgactttggccttgacctaccttaatcgtaagtctaaaataaactttggtgctagttgctttcattgtttttctttagtaacttgtcttttcaccttcgttgtttttatattatgtttgtcacagcacttacaaaaccccagacagtcattccaactgaagtagataaagacaatcattcagcaaatggtggttagtcatctttatgattcacactaatagttaacatactattacatcgttgcccatttcattagatcaagatagctctgattttctcaccttttgctattgctacttgattatgcagagtgtgagaatggagtcgaactaaaagcatccgctatagatgacaacaaaaagaagggaatgattcttccatttaaaccattgacaatgacgttcaataatgtcaattacttcgttgatatgccaaaggtatggttcttaattttcataaatgtctgcatttttttttaatttttttaattattcacagaactcgtgttaaatattgtgtcaaacaaatcttgctgaatttttcaggaaatgaggtcggaaggtgtaccagaaactaggtta

SEQ ID NO: 42611 - DNA, 2199 bp, Cannabis sativa
tcaaactccaacatatcagggaattgttgatctatcctaactccaactagaactctagggtagttcaacctttccctctcttttgtgacattatccaccataaccggagtccctacttgtccaactattttgaacaaagatctttgtccccaatatttcaagtccaagtcttcaagttgaatccatattggaacctttttatcatcttcctttttaaaattcacattttgatcccaagccttcatgatgacaggccttcgattgaaaaatatgtagccaccattcaaaacttgatctctgtccttcaaagagttgaatcgaatagtgaatattccatatgacagcagtttcactctgtctaccttatccttccacactcgatttgcaaagccctccagtatatgtaatggtgggttcgcaccaaatacataacacactatggaggcttgccaaaattgaacttcttcctcaatatcatcaagagttatttttactttgtttacagtctcagattgctttcgaacaataccagatcgtacaacaggaggaattggggatttatcttttcaatctaaatactattgatttaaaaaaatttatataacttttcacaataatttatcaaactttttagtttggccaaataatttaatttaattaatagtaattcaattaaatatttttatacataatcaaatacttattatattctctaattacaataattttattatttactttattatcaaattattttaagtacaattattatatgtgctctaatctaattaaatatttttatgcataaccaaatatatttataaatttacagccacacacttttataataaataattatattattatttttattattcagaatattttgagtataatcattatggttgtctaattaaatatttttgtgcataaccaaaaggaaatttgacattatatgcttaaaaaaagcataaggtatttttatatgcatcttaaagtaatataaaattttaatcccaacaatacccttcccatttgaaactcccactctccctctaactctcattctctcgtttctctctctttctctaactccccaaacccagaccaactcgattgccaccatcagacgcatcaacgaaacccagcgagcccaacaaaaccaccacctccgacgaaacacgaaaccccaaacccacatccaaatcgagaaactccaaacccacatttgaaatcgtaaaaaaaggtatttgtctaaacttttattttattattttaagtgggttttttgttgtttgtgcttcattgtaaagaaatctgtttagtttaggttcaatttttatgttttcgtttgaatttcattgatgcctgtttgaattcttgttttttaaacaattagcgacatatcacgacattgttcgcgactttttgcaatttcatcttaaaatgttgttagttttgtttttattggcgatgttttcacgacatgttagttgtttaacgatgtatttagcgatgtatcacgatatatgtagctttcgtatcatgaaatatcgcagaacactaggctacgtatctacaattctgtttcgtgatgattcacgacatattacaatttatgttacgatattcattttatggatttttaacaaaaattcttacaatttagcagatgactcctgaacttaaacttctagtttcccagtatttcacaagacgtcttacctatcggggtacaaataggtttagatatatcaaggccaagtttacaaagcttgatttgattgatacggctaaggctagctctttcggacacttctgggaagctggagagttgactttctttggcgctttggtccacaacctcctcttataaaaaatgaaagtagatactgaaaaggaagatgaggtttggtttcatgtacggaaaaatgacatgagattcgaacggataaagtttggacttattactggcttacctatgggtagtacccctacagaggaggaaatagaagttaagtccaacgaccatttagtcgaacgtattttgaagggaagagttctgtgtagttggattcacttatgctccaacttgagaggtgcgaagtaaaagatgatgcctacaagcttggactgatcgctttcatttaaggtgtattaatatcaaaagagggaaatgtataagtttggcatgacatg

SEQ ID NO: 42612 - DNA, 5350 bp, Cannabis sativa
caaaaaaagttcagggggcacaatttagtacatatcaaagttcgagggaaaaaaaattattaattagcctaatatatattgtttatgaaccaacaaacttcacattcatacctttcagaaaattagaatagaataacataccacaacaattaaaacacaatatagccctcttcccaaattagcattaccttttacgtactttttttcttttttggtaagggtgaccccttacatacttttgtgagcccactagtttgagatggacaaatttaatctactactacattagccattagtgatgtcctaataaagtaacaatttgcactaattaatgattatattaatatatattcatcaaaatcattataattggattatctttgcactgtttatcacgtatgtattatttgggacctaaatatagtatcaaattaacacacaaatcataatcaatcgggtcaaaagcaagccaagcaaaacaaaatagatcgagttaggttgatttgagttgggttgggtcatgcttgctgaaaaagactgcttactgtcactttagcattactcctccttccaaggggacatgatggccattataaagaaaataccaggataataattagtaagagtattgttgttaattaaacactagtggtatctaagaaatgctatggtgaattttaaaggtgttaaacagtacacaaattaattttataaatgatataaaaaaatcattaatcaattaattacaaagtattacataattatcatattgaacacttatatagctaccaaataacaatattcaatattattataagataactttcataacaattagttaacgatattttataataattattaaaatactactaagtatcaatagtacctatgatactaccatgagttaacgctttaaaagtgactagcaatttttataatacaaatattaaattaatatatataagatctcatgttaaattatattaataatatattattttatgataatgttaattattactaataccttttagaattctttaaattagaatatgtaaaatactcaatatttaatttcatcaataatacgacatcattaagtggtatttagcatgggggtggaaaaataaatttcgacatacacaaacaagacacaaatatacgagttagaatcgaaaaaattaggcacaggtagacacgattgacatgaaataaaaacgggtcaaacacgacatgctaaacacgaacttttgaaaaaaatttataaataaaataaaataaaaaattattaataataatataactatgtaaaaatatacatttagagattagttatgactaaaaatatttaaatttaattttctttaaaaaaaattgaaaacattttaaaaaatctagtttttattatgctatatatataaactatacatacacaaatatatatttttgaatagaatcctaaatctttttatctacaaccccaatttcactaatagaaaaatgagttaaaagcgagtcaacatgaatgcgatacaattttttacgtattgagttagggttgataaaattagatgtaagtgaaaaatagctcgacacgatgacacatttatagcactactcaattaacaattttagtagtaatcttttttggggcttttgaaggaacattaaatttaggggaagtgctatatggcattttcaatttttttttctttactttacttattttttatatttatttcatttttataaaaactgttgttattttgaggttatattatttttatataaaggttataatgtttctattttataaaaaatatttttattttaatgttatattatatttttataaatgaataaaaaactaattataaaaataaaaatgaataaaaagctaattataaaagtataaatgaaaaagttttttaaatttattttttttaaagaaaaaaaatatattttttataaagcattgtaattaagcatcaatagatcaacttttagcaattcttacacctataaagatgagtgataccattttgcaattctcattcctaaaagggaaactgcagtgtacgtattgggagttccacgcgtcagtgatctatagggttgacggtggtatgaataaaaagttgaaattctctgagctcctcattggtggaaataatccaaaaccagtagtggtttttctacgcctaaaataaaggcggtttcataaaccgggatacgctttccttatatagcctctgctgatgtgattttcttcagtacggccaaaaatttaaatacaaaaaaaaaaaaagactctcaccattttttttttggttcaatttcgcaagcctccgttggtctccatttgttgaaaaagctctgtctatcttctcctctcctccaagtaagtctctctctctctctctctcttcgtttcttcttgtgcgattatttttgttgttcttaatttcttctgtacaatttttctaatttgaaacgagacaaagaaaaatgatatatataactgttgattttgaaatgataaatagtagcattaagaaattgttttgattttgaaaaaaaaaatgcattgattgatatatatataggtatatcggaagtaaaaaagggggtatatatgggaaggggtaagattgtaataaggaggatcgataattcaacgagcaggcaagtgactttctcgaagaggaggaatggcttgttgaagaaggcgaaggagcttgcgatcctatgcgatgcggaggttggagttatgatattctctagcactggaaagctctatgatttttcaagcaccaggtcattcatcctcatcctcatcatctccatacatatatattattattaattaattatgctcttttgttttaattaattaacttatatggtactaataataattgatgacaataatattattctctctaaatgcatgcgcggtacatgtttgtggtatttactttataaattaattcgtatatatatatatatatattacagtcccgagattcttgcttgcttgcatgtatgtatgtatatgtaagtaattgttgaaatttgaaatccaaacttctataacttgataattgttaactttaacttctctctctttgatgttttaattttcgatatgcgtgtatcatgaattaattacattataaaacattttgttgatcgattgatgaagcattcatgtgaattcccaatggagttctcatcatgtaatgctattagaaaatgagcactaattgtagtgatattaagtacatttttgaaaacaaactcacaggactagaaaaagagacctttgggaatgggagcagatgtagtgccgcttttggactgattttgtttcatttttgagtaatatatttatacagcatcactaatgcaaatgaaatgtaatattattactaaattatatatatatatatatatatttgactgcattataaattactactctataatggaatacgagaccgctaaaaaagaggtttacatccaaaacatgtatatgtgtgtgcggattatcgacgaaatgtccaaagactataatttgtaatgcatatactgatggcattattaacttaattttgatttttggggtatatatactatgcctagctctcacatgaacatgatcatatcaaaatagggaaaatattatatacagttccaaaaataggtttttttttatgtttaagtgaccaaacagtgttactgatttatgttgtagcttgctagccgttttaatctcttgggtcatagctcatataccatacagtatagcaaattcttagaatttttgctcaggatgatcacattagctaggtacgtttcatgtatcattggtgtctctaattaattaattattgacataagtgaacgcaaacttttgcaccaaaatattcagtgataggatgtacatatgagcaattagagaaataaaattttaagacctaataagtagaacttaaatatcgatcttatacacataaattaatagcccaatctataatatctcctataatgttacaaatataggcaaaaattgttttattttgtataaacatttaaccctctttttatttgttatatgcacattagcacatatgaattaatatgtgcacttgtttgtattgaacatttataagtgaaattttattaataatatcttattaaacaaaatatacaatgtaatggtgtaatttattacttaaatgctaaagatttaggtgtcaattcgcaaaattagcatctatcactaccaaaaatactatttttagtgaatataaattttttgtgattaaatattacttttagtcacaacaaatatttaatcatataaattgttacgaatttagttttagtcacagtaagtgttgtggctaaaaacacatttgttaataaatttttattatattttttgtgattaatatttttaggtacgcactttttaataataatataggaatgataattttatgtttagtcacaatatttttttacttttagtcacaaattttattgtgattaaaagtaaaaaaatttatagtgtatactatattaatgcggcttaggtaacaaattggcattataaagtactaacttatattgaaaacttttgacataaataactatcttttgtgtcacttattaacccaccatggattataattttttggcaaatattagtcgttgttaaaagtgctaaccaacatataaacaaaaatgaaaaaaaaaaagaaaaatcttctaaaataaaatgagaaaaacttaaaaataaaaatataattgaagatcgatcgagcaacaaacccctctgtagtcttcaaaccgtgcaagttctcatgatcaccacacttgcagaagagagattgcaggcccatgctgtctctaccaacgtcgtgccatgtgatatctatcgtcgctagctactacaaaagaaggagaaggagaatgaggatcaaacgaaaacatcagatatatgagaaagaaaagttaatactgtaacgtaagagttagagaatgagaaaaaaaaaattcggcttcacctagccttttaaaaatgcattaaattaaaatataaataaaaccatgtttactaatcggtactgatggctatataacaagaaacaacggtagaattacttttaggaaaattatagtaaatggccggacacaaatcatagaattatgttagtatatattctaattttaaaaaattataacaaatgatcctaataaatcataggattatgttagtaaatgtcctcatttcaaaatcattaatttttttttattattttttagaattagaagcaaa

SEQ ID NO: 42613 - DNA, 4819 bp, Cannabis sativa
ttttttttttttttttcttgagaagaaaaggttagagagaacaattagaaaccctcccttttatttttcttatttcctttttttccttgaccaacaaaaaccctaaattcagctttaatctacatatagtaaaaagagaaaagaaaacccatcaattcaaaaccaaagagggttttctttttcttccctttcatcctatcaatttcattgaactctgttctctcccttttaaaaaaatactagtacccttttgctctaatccaaaaaataagccaaacccattatagatatcccagttaccgatcagaaaaattgcttttttaagatttatatttatttagttatatatatggctagtactttctgatcattgttctccttcgagaaaccctctgttttttttttggggttatctttttctctctcttctttctctgatcataataaatgagtctgtttgtgtaagcaaatctctctgaaacttcatatatatctctgtctagctaagctaagttctattccacgtcttaccaattctttcctttgtttttcgcttctctctctctgttttccagaagcaatggactctggtaacagtgggagtatgcaatcctcgagcggtggagacgaagagtacgactcacgcgccgaatcgatctctgcccttttgagctccaaccctcaaggccatatgggcagccaccacgcgccgcaacagcagcacacccaccaccagcagcagtcctccatgttcgaccctttatccaacttcttcgatccggcaacagtctcttcccgatctccgctcaatcttgacatggcatggcccagaaccttacgatccgacccgaattcaatcgatcttggatccgggttgatgtcttcgtcgtcagcccagaaccaaagccacccatttttcacaaatagccaatacggacaaggacaaaacagaggcagtggattcggaatcagcggagtcggaggtggagtgggcttagccggcggcgtgggcggcggaggaggagtcgggcttggctcgagtcacacttttcagggaattcagatcccactcgagaataataatagtaataataataatggtccaagaggtacaaacccaggtgcgatttctggaacttcagctcaaaacgacgggaacaacaatgtcgttcgaaatccgaagaagcggtcaagggcttctaggcgtgcacccaccacagttttgaccactgacaccaccaatttccgagccatggttcaggaattcaccgggatcccggccccacctttcacctcctcacctttcccgagaagcacaagattggatctctttggcacagggggaggagccggttcttccatgatgagatcaggaccgttggattcaccgccgccatatattttaagaccttttgctcaaaaggttcaggctccccagcaacacccaacgacgtcgttcattcctccaatctcatcttcaagtagtgcttccatggcttcaacttcaactgccattaactaccaacaaccaccaccgggaggcggaagcggtagcggaaatggaggacagaatcctctcttgatgcaaaacccagttctgaatttccattccttgcttcaatctcagcctaaattctcattatccaaacctcagacgttaggacagttggatcatcagatttctcatcacgggcttgaagactttgggctgagccaccatgggctcagtgggcttcccaatctcatgtcgtccgatcacttaccaccgaggagcgacggtaaccatccaaccacgacgtcgtctccgccaacgacaactgctacacccaactggggtgatgaggtcggaatgggtttaaacgacaccaacaataataacaatcgcggaaacgacaacaacacaacgtagagatatcatcatcatcatcatcttctcatgaggtcaatcaatggcggtcctactacgagtaatagtaatggtagagggccagagaatgtaacaaccagaactgaaggtatggtggaatcatggatttgctcttcagattaaatacttagtcatcacatatatataaaccaaattatatatcaaaaaaaaaaaaaagagtatgaagcatggtgattgattatatatgatgatgatgcatgatagagaatcttttgtctcttctccatctaaaaccatggcgctataccaacatgatgatatatatgatcaaacacttttttttttcttggtttaaatttttttcttcttttttattacatatattaatatatgtaaataaccaacatcgtatttctttcttatgatatcctttcagattttgttatatatataccaaaaaaaaaaaaattcttgctgcatcaaatatttattatgtcattaacttattcggaatagtaaaatatttggttataatctgcttgtttgaccagtggtggtactgtataagcagaccaatacagacaaataattaacctgctatatataatacgcgttttcctcgtacattacacttctatggataaacttcattttatctaattaatataaatgattattacagcgaatggccaagattaagtagtagtactgtctaattgcttttatcattaatatttaatcctctcaaatgtcttgtattttttttttgtaatttttattttcttgtataagtctcgaatattttgtatgatgtctaggagtgattggtggcgagatttggggtgtagctagccgccgcaatctcgtaatatacaattcaaatatatacatattcttttatcatgtgtttgtttatgtttttaagctatacttcctccactccacttaacattattttttttaatctaacaggttatattctttctttttattttatattagaatagatagatatgtgtaatatatataaagcttagatgataattaatgccaagtgagtccattagtataaatttcaacagttattatataataatcattaggcattggttggctttcgttacgtatgaacgaatcttcatgcaaacgtgcttccctagctagtttcaaaaactaaaaccctttaacattaaggtacaatgccccaaaattttgtttttgttcattttctcaaattttaacatggaaattagtgtatacaaatttctctgtttagttgtttgtttttaatggctaaatattttttctggtgaagtcactgaatatatatgactatcttttataacatttttcttctccatatttactcataccattgatttttctttttgagtaccatttatgaatatttggtgatgttatactcatgaaattattttctttgttattaccataattttttttgagtcatgacgtcatgtttgctaatgtatatctctaaaatccaattaaaacgcactattatgagttttttttttttcatttattatagtttatcttatgagttattaggcacaaataaatattcgtacaaccacgcagtttttattctctattttgtctttcgtactacaaagttgattatttgtattcgcataataagaaaatgaatccctgccaatctcatgaccatgaagaatgcgaatcacctctcccaaacagctatatatttatatatattatatggtacaacttttttgattaaccttagtttttattcaataatattctgatattaaactaaaataatctacctgttgccttaattatagttcttgacgagaatgtatttatcctcattcctcccctatttcttaatatttatttaagtagggtttcatgaacgtgacaatgttcaatgttcatacatacttattacatgtatgatatatatatatagctagttagtatatgcatatcaggtaaagtttattatatttgtggaatatgcattaataaactcggcaggtgtgtatgatttgttttttttttttcatgtgcaatggcactcttttgtttatattgctcttaattagtttatataagtacctgtgcaactagatttatattcacgatattatatattaattctaagattatcagtactgctaattataaatagatatatttatttacaatggacacaatatatataacaatattccataattatcatcagactaaaaagaaattaaggtgatggctttagttatatttggttgtcctcatcaattacttcctttgaatgagtaagacaaagttcattagaatatataggttaaaaagagagaagtaataaactttgcagttctttttctctgtgtacacaagtacatatatgcatgcgtgtattaaaactatcttcttttcttagtgtggaaattctcttggaaagagctgtatcctatctagtcgtaaggaaggactgtcgtatctgttataattcaaacaatatcacagacaataatataaattgaaagtgatgactaagtctaataccacaattatactgagacatattgtgactttttctgttaaaaaaataaatcaaaaatgaaattaacccacatggctcattattattttgtctctgtcaagtgtatcattattagaccttccttaacttacatataatagaatagaattatgcaacgtttatataagatgatagcaataaataggagattatatataaatataatatatatatatataatatgcaacatgcgtactttttgtcttaacgttatctataaaaattgatcttgcttttccctccaaaatctcccacatgacaaccactcactaaaatgtttcaattttcaaaactacgaaataggaaaaaagaaaagaaaacgaaagaagaacatc

SEQ ID NO: 42614 - DNA, 5208 bp, Cannabis sativa
aaattaaaaaaatagtatatggggtaattccccaaaaatatttttgcacaagaaaaactaatttggatgatggttgctaagttgtcaagtctttagtggctgagatgtaatgtttttaagtgaagttctcaaatacttatattttcaatggttggctggctacgggtccttgttagattagcttataagtactcagattaagtgttatgaaggccatggattgattttgtgattttttagagtaagaggtttctcagggagttttgcaaagtttctcggataacatggagttttggtaccgttcttttggctcctatcaataaaataggcttccatagctctttcaagaagcgaactgttccattgatgtccttgatattgtagttttttataattataaattaatgcttgagatgttgaatgtcaatttttttgaaatggctgtttaatcatattcctttctcttgtaagcacgcttttgctttgggtatactttttattttaatttttgcaaatagcccattgtcttaagagagtattcagaaagtgatttcttagaaaagtgtccgctagagggcttagttgatccatgatttatgtttcgtcttttgtttatttcaagaaatatatctatcaattctggttctttatttttctattaattcttttctaattgagatgtatgaactttattccatgatatttacttgagattcctctttattctgattcagaatggtaaaatgattcaacccaattattgaaagatgatttatagcattaaaaatgaatgagctcttcttttttccctccatctcttttggatgcaatggaacactatcacattgtattactatgtgtaggaaaatgctagtttctctccactcatttcatgttttcagagtttatggctttagtattttcagaacaaaattctcttgtggtataagcttccctttggtttcaagatatttgtaactacctcattttaagtaaaactgctggtttggttcaggttttcggatctaacaggaactgactatagtgatggagcaattgaccttgctcgaaggcttgctcagcgtgatggatttgttaatattaatttcttggtatgatcatactcctagaaaattatgcaattataagcttttgtctttctttctagaatgatatatatctatgccatgatgtagttgtgtgtgcatttcaatcttttctgctggaagtaatatgacttgttccttgacatgtttttactgtgaagtttattattttgtggatctgcttagtaatatgatccattctttggcaagtttttaatgtgaagtttatgtattctgtggatctgctcttagtatttattggatttttaatcatgaggaaaatggaaaactgacatcatatagaccttgttagatctgtcaaaggtcttgtcttttggagacaaagattatgtagactgtaatttggtgactagagtgccaatggttcatgctggcttttgttttttgttaaagaaattgattactgatttaagtatgattggtaatagttattgagggttgataccattgcccaatggttaaaccaacagctgtggggctaagaagctgattcatcacaaatataattgctagcatactcatagtccaaaacatagtctataaattacaaatgcaccaagtttttagtgaaatttattattactaaagtttatgtcgttatgtgtatgtatagccattgtatctaaatatgctttctttgtgtgtgtttatgcatgtgtctatatcatcattgtttaaatgtatgcacatgtttgttggaatgtaagtagttatgcatatttatggctatttagatttgtttaagaaaatggaggaagaaactattgcttgtttttcaaaaacttcggaaacaatttgttaattttctacatcaaaactaatttttgtctgctaaacattatttgctaatttaatagaggcaatggctttcaaaaaactttatttgataatcacttgttctaactttaatgagtttacattttatagacgtgatatattgtgttgagattttcccctttttatttttatcagggtatattggtaaataaattatgcatagctttatcctgaataggatactgggaatgtgattaaagagaaggcctagtgaattagaatctcttattcaagaattccataaccgattttcatagcttcttgttcttcagtctattgtaagtaaacacataaatttcaatatattttctacaaattatgtttgaagtattaacttatcactgtctttagtaatatcgttttctctagaattgtcttagatgcacacttggattctaatttagtatgggaaacagtatcaaatctcttttcagtttcttaaagtttgaatcaaactctcaaaattttcactcttttgtgtccttttcttaactgatgtctaaaggtgtagaaatgtttaaatacatctcaaataattcattattattattattattatttggcaccaatgtgtatcagtgaccatactcatagaaatctgcatcaattgattatttgttggttgcttttccccttccaattgtttgaacctgtgtatcgacagactctgcataaacagttatgttctataatttaaattttcatgtttgtatgtttatgatatacctattatcatatcttgtttatttctttattttttccaaggatcttatcttgtttatttgtgttcttttggtttaattgcgtcaatggtttcatttgtttaaggttgatgatgttcttgacacgaagctgggccgacagtttcaacttgtgatggataaaggaactttagatgccattggactgcatccagatgggcctattaaaaggtaacggtttcaatatcatcatccaatgcagaaacatgtatagaagccatttgagtcgtgctgctgcatgttgcaattgattggtccacatctcagaaaatcctggcatttgcttaggacttttgagcatttcataacatttggctctattactacctcttattattttgatcttaaaagaaagtattcatatcaaacacttgagggatttcaggcctcaattataaatgatttaacaattttaatcacatctgaggactaatggattttgtatcattttacatcttcaggatgatgtattgggactcggtttcaagattagttgctaaaggaggattattggtaacatatttactttatcttaacaattgtgactgaatttctacccccttgttagtgtttcttgtgtggctattaatttatagatgtagatagatactccaagaggatcttttttcttataaaaggaagcaggaagtatgttaattttatcatcctaatgtttggagccaaagtcatttctcatcaaagattttccactgtttcttacactttggtggtgcttgtaggtgatcacgtcctgcaacaacacaaaagatgaattggtagaagaagttgaaagtttcaacaaaagaagcatcggtatctcccaggaagctgaagaatccaacaaggaccaggaagcgagcaaggtggtgcctccatttcagtattttagtcatgttcgcacctatccaactttcgagtttggtggttctgtaggatcacgggttgccacagttgcatttatccgtaattagtgtgaatttctagtttttgttgttgttataatgtactggtttgatacattccaaaacatttatgcatgtgagaaagattggatttactggacttctcatattcgttggtaagcagccctgaaatctgttgattcattcgaaaggttcaaatgacttcttcctacctttttctttaaccctcctcttcactttactatttgatttctgatgtactcaaccctcctaagggggagtgattagcaatttgctattacactttacaatcatttattactaccatgtgaaagatatataattatcattttgttttcaaattttaaatgagttcttctaagctccggatctgttcttcatattttgtaacatagatctttcttatacgttcatttatttatttttgaagtcttaaaaatgaattaagtaatgtaaaggtaagcacaacagaaaccttgtatttgaaactgaaaattatatgtctagatttctgagaggcttaactctccctaaagacagctcaattacacagaataccttttttctttactaaaaaaggcacaattatcttcccaatttcaaggcctaaccgaaaagtatacgacaaaccccaaaatacccatgccaaaaacaaaagcagcgaaaatccaagtaaataaggtaattaactctagctgtgtaggcgatcttgtccgagatccaagaaactggtaattctctaaagtagcttcaaaaggtggcaagttcttccacttaattaaataatccaatgtttcatgcgcctcaggctttggacgcacatctatgagagactcgggctcaaccaacatctcaaactggtcaatgagttgtggaggtactaccaaggacgaagaatgagaccggcctttagctcatcacagctgtaatatgtaaaaaaaacgaagaccatctctagatgcgtaaaagttattccatatttgataaaaaaaaataattttatgttataaaataatatagagtaatatctttatatattaaaactactaatctaacggcaattcttggtttaacgggaattcttggtttaacgatttttttttttttaacgccaaaaaaataatttttattttttttaaacgggttcttttaacgccgttaccttttttcttataaaaaaatatataaaagaaaaaacattcatctcaatcgtttcagacttttcactcttctcaaagagacaaccatggttaaaacttaaaactgttcaatcctatcctcattgaggttgagaccaaccatggcatcagccaaaccagtgctcgtttccacaagcacatggggatcattgtaatgcctaacagcctgagttatgcctctcacacgcttatacggatcagaagaattgaaaatctccaaacccacaaaaacaccgtcgcatcccaattgcatcatcagtgccgcatcggccggtgtcacaatccctccggcggcaaattgaactacgggaagacgacccatttgcttggtctgagcaac

SEQ ID NO: 42615 - DNA, 3938 bp, Cannabis sativa
ttaacgggagatcaaacctaatcgttaaatttaacagaattaagaatacaattaagaatttatcatctcaaataaaattgtaataattttttataacggtgatatcacttaagattaatcaattaaaatcaaactataattaatattatttttgttagtttaattacaactattttttctatcttttcatcttttatataaacacattaataattttataacgaatttaataaaattttctctcttcttttaacatacatatttttcttctcttttttattattttaatatagtatcacagcttcaacaatcatcaacaacaaagaacaacacaattattcaataaaattttacaacaattttataaattaaataataagaataatttactttttttttctttgtttaaaagaaaaaaaaaatttactttttacttagaataaaaaatgattataataatgtaacaatacatgaatgaaaatagtcaaagaagaaggggagtatgggtgtaatttcaatttttaaattctaacacaaagtctttgaatcactgtcaccgtcatccacagaaaaacaatatttacagtttgacccctaaacagaattttttatttcagatataccctcaagcgtctcattcatttccccgacaataccaaaagtctaaatcccacccttattttctctctctatatcttttcaactctctcataacttcttcactctctctctctaactttctctctctacatcgccgttgccggagaagaagatatatatatatattaagtaataatctttagaatggaagccaagcttcctccggcaaagcctccatcgccgacggacatggtgattgaccagatgtcggagaccccaaagcgtgggtcgcatcacaggcgagctcactccgacacttcctttcgtttccctaatctcgatgaccttctcctcttcgacccatctgacctcgacctaagcgccttcccttctccttctccatctccttccccttctccctcccctacacccgccgcacgcgcctcagccgccgcggcttcctccaccgccgtgaccttcgattcctccgacgagtcctgcggtccaatcggggctcccaggtctagacccagaccctcaggtaccccttcccatattcggagtctgtctgtggactctgacttctttgagggtttgggtttcggtggtggagactcgtcgaaagaggcggttggggttgagaagagggctggtcgtcatgggtatagtaactccatggatgggtttggttcggcttcgtttgagtctgactcggctggtcttggcgttgatggtattaagaaagctatggctcctgatagactcgctgagcttgctctgattgaccccaaaagagctaaaaggtttgttttttatcgttttttctcaactgggtcatcctctatctatgtttttctatgtgcttttttctttttccccttattttctttgtggggtttcttaaaaaagcattctttttctttgcattaacgatctgatcatgggacatgttcaaatttctaatgttgtttcattttttttttcagaattcttgctaatagacaatctgctgcgcggtctaaagagagaaagattcgttataccaatgagctggagaggaaggtccagacgcttcagactgaagccactactctttctgcgcaggttacattgctccaggtaagacaatgaccttgactttttcttattagctatggagaaatgtttggttggtatgatgtcactttagtctattctttctgcattcatagaatttttaatatatctttttccttatggaatggaaattattcttaatataaattaccgtttagtttgtggatatgtatgggatactttgtttacttgttacttagacacaacatgtgtttacaccaatcgatcagttggctgattaatagagcatcaattactgtataccatgtggacatgttttaattaatccaattattggattgtaacggtttagatgtgcagttctattcatcaccatacaccagagttttcggttattcgacatatactgttattttagttagaaactccttattctctgcctttgaaagttttcgattcgttggttgttttactaatattactactatgcaaagatgttaccattttgttgcagaacttgtgttctatgatgttgattgttttccatggacggtatgaacaaacaattctgtgtttcgatactaaaattcatatttgctttttgatgtgatgcagagagatactactgggttaactgctgagaataaggagctcaaactgcggttacaggccatggagcaacaagcacaactcagagaaggtatggttttatcaaaaagcctttaatggaaaatggatatttttcttttttgttggttctagctattaacaatttcagaccaaattctcctctatggtttcggcttttctaaggaataaatacatgttgctcttttctatttctcatttacagctctgaacgaaaaattgagggaagaagttcagcgccttaagatagcaaccgggcaagttccttctgtcaacggcaatatgttcaaccgaggacttgctcctcaattctcctcacaccagcccggcatgcatcactttggtagccaccaaactcagcagcagcagcatcaacaacagcaacaacagcaacaacagcttcatatgcctcagtcatccaacaataaccagaatcacaataacgggcagcctcatcttagcttcttggactacaatcaaagggtgtagaatcgaatttttaacccgaaaaaaaaagagaaacttttgtgttgcgccatcaaacaggataataacccatctcaggtagcttctgtacatatagttaaaatatgtatgtactctgcaggtatgtataagttgttgtgatggactggttttggtaagatcagtcttttatatcagttcttttataggtattatggctatataagctatcattattattttctaggaataggattttactcagaaaatgttgttgtaaagcaaaatccttcattgttggaccaattatgggcaacaactgtttattgtcatttgcaatctttacctctggcttacacaaaataagaatctagtttatagaggttaatatccaaatggaagttattgaatgttttgagtcatattttggatggatattagtgggtttgttttgtttatttattattattattattattattatatacatattttggtaatgagataacgtggaagttggaggtgatgatcaaggccatgtggtagtccattttattatcattattattgtagtaacaaagacccgaaattatgtttgtaacaattgattatattatatgccccaaaaagctgacatgtagcacaatatatataatcttgatatgttgaatgaaagtatcatcgtcactataatgatgggttttttttttttttattctttgtattaacaaataattaagacagcaaacaacaagtggcataatcaaattcctgttctattagttaggtgtttatgctgtaagccttgttcttctttgcttaaaggaatataaataaggggattttacattaatatacataattttaaaattatttacaatattaaccttacataaataattaacacaaattcacgttccacatcaccgaaaataccgtacggtaaatgttgtctactccataatcacaacaagtacttaaaaatcaaactttggtaaaacacatgcattccttgcatgttttctctttgttttttttttaacattattttttaaacaaaatcaggactatttatttttatctctttaaagaaaaatattcatttttgtattttaataggatttttaaaaagaactctaactacacca

SEQ ID NO: 42616 - DNA, 4801 bp, Cannabis sativa
tagtgctaaaccttgaccagaatcactgtaaaattatgggtacatcacacattatcatcattctaactataatatgaggtaatgatcacgaaattatacttttcaaattagtaacctttctaatagttgtagtatatataagctcaaatattaggcaaaatagttagtttgataatggtgtatcttaaaatcttttgttcggcactaaaaaatattcaactcaactagctagctagctagctacataatacagcaataatgtacccagtttacaaatgtattatgaatctttattacactaaaatattctttaattactggaacctttgtgcaccaatatatatatatatatatatatatatattgaaaaatgggagatccatcgaatttcccatgcataacagcatattagaagaaggaatgattaattaattaaagagaaatttgacttaattaacccaccaaccaacctattacacagaatatatatcatgatcctcatggaatattacaatatacacattatgtagttttacatcataaaacaaaataaaagcaattagctacatctaattaatttctgtcccccttggccttagctacctagaaaaagtgtgtcaaaaatctaaaagacaaacaaagaagaaaaaaataacaaaaacaaaacaagactcgatcaaatcaaactcatcatcatcatgaagcatatttatatagaacaacatgaaatgattttcataattcttgaatcttgaaaataatccttctatcaacagattcaagaagtccaatgtcatcaatagaagtctgaacctgagtttcatcatcatcatcattatcatcaaaggaaatgttcaaatcaagggacacacaaggactaatcatagtctcttcaagtacttgattatcatcattattattatcattattattagaaccattctgatcatgatcttgttcttgttgatcatgatcggacgatgatgattccatatgcatcttatgcttgatgagggtaggagaacaagctcttgatgatcttgaactaaaactttcacagctcaaaatgacaatagcatccctaagatcaacctcttcaccactagagttacaaactcttcctctttcaatagctctcttaaaccccaattgagaacaaaaatctgcttgctcaacatcttcaaccaaaaacactctgtgtggattaaacgacaccgcttcaccaaacctctcgatgtaactacagctttgttcgtctctcgatctcttaccacctccgccgccgccggaataatcttcgctcgaatcggctcttgttaccgaagatgaaaaactgctgagagcaatcgaaacgaagtcgttttgagaaccaaacacgagcttagccaactctttagctatcttctccttagcgttcatgtcaaccccttgaaagaacaaccatgtttcttcttttaagtcattattattgtttttactattatgaccttttcttcttaccaagcctgatctacatttcaagatggttgaggctatttcgggtattatgtctttctgccaggggacttttttctccaaagcgttgcatagtgtcttgaggttctcggcgttgagttctttgaacctttgtgaatattctgtctccataacgacgtcgtttgaagaagccgaggtaggggtagagttggaattaatattattattattattggaagagctgaatagtaatgaagccttttggtttgggcttactactacttctgggataaacattctcaaactcggctgctgatcatgatgatgatgatgatgatgttgatgatcattatccacataattaggatgcctccatggatgttttgacacttctgatactgatggccatgatgattcgacattagggttttggttctgttgttgttgttgctgctgatgatgatgttgatgatcgtatgagaatccagaataagcaacagcagaggaagaagaagagaatgttataagggttttctctgaaatgttgttagaattcgaatactgacgatggtgatgagttgaatagcaaaatgagttccactttcggtaaaggtctgccattttggaacagttctatatagcaagaagaaaaaaatatatatataagtaataatgcatgtaaatatatatatatatcatataatgattaatatgaaaggtattgctaattaaaacctgctgatctttattattagatgtaagaagagctttggtatcgtttttgcattgttgtagccatggtggaaggttggagttatggtcggtggtggctcgcaagcttcgagcttcggcctcaaatttggctgagcactcggcgcagcaactcagttgttgtttttctccactttcaactctactcatcaagctgctttttgacgtaacagtcccattttttatgcttgactcgtcacttttcaattcactgatgaaaaaaaagaaacaaaagtagtgaagttgatcatatatatatatatatatattgatgatgatgatgatggtttaataagatgagtaaaggcaaagaacagaaggaaaataaggaaagcttcaataatgcttcaaattttagaaatattccctctttattaacaaattacaattggagaaaacaaactaaaaagaaaagggaaaaaaaaaaaagctaggcactgatattcatgcaactctcatttctacaggaaaaatacttattaattaagtagtgtgtctactgtcttcaatatatttgaaagttcaaataccttttctttttgcaacaaattataataatttctatatatatatatatactttgatctttatttatgaaaagagatcgaaaccaaaaattaaagaagaagtcactgttcctcatgatcaccagctagctaatttaaaaccttgattaatatatattaattaaggattttaattataaatattacctgtgatgagtagtagtgaggagactgaagcgcagactacctgctggaactgtaagaggatgaataccccaaatagtctccaaggatggatgacctgatttacatctcatgtaagtctgaaaagtggcaatccccataagccaaaatctaccaatatgttctccaatcccacataccaatttcccaagctccataataatatgttccactggacaataataccccctcccttgttgtaattggctattattattattattactagccctatactcagttgcccacttgagatctcccaagtacaaaatcacccctttcgccatacaactcctcaaaaggctcttaagctccacaaacttttgctcaacttcaactcttgaataattcccaaaagatgatgttgatgatgatgatgatgatgatgaaaagggtatgaatttaacctctcttaaaccctcaggaacatcatccttctcaactttttccatcactcctctaaccacaccttctatgctactaaggcactccccaacaactacaacactccttctcttgttgctcaccaagcactccaccacacttgccacgtcttccttttcgccactcgtcgtcaacggatccaataccgcctcgggtttgccgggtaattttgacccgttgatggaagaagatgaggacttgttaacattagtagtagtaatagtagtagaagaggaattattagtattaggaggaggaggagttgtttgagaacaaatctctaaagaaacagcttgttcaacattgcttttcactaaagtactcgagaaaccggcttctctcatgactctactcacacttggatcatccaagattgagataataagctgttccaactcaatcttcacggctaagagtggttgctgctgattctcaatcgaaccgcgcctttggtgggcctgagcccttttaaaggcggcgatcaaagcgttagaaatagaagggttttgagagtgatggtgatgatgatggtggtgatggtgatggcctcccaacatgggactcgaatttgaagctgggagacgattgagggccacattgaagcaaagctctaaagctttgcactgaagaggatgacactgagcctgagattgtagacaagcttgcctcaacaacccagttgaggcagccaacatagtgtgagccacgtgaagtggagtcacttgcgcgtggcctcggcgacgagctaaggccaccgcttgtttcactactccagcagcatcggccgtgaggccttgctgcaacgagcaaccgccagctctcatagttgttattttttttccttcaaaacagtttttgtcaatctctcttggtggaaaggaagaagacttgaaattcctaggtagggtggagtagaagagatttagtaagtatcatattttttggattggaaggaaattgataagaggttttcgggggtggaactctagtactagttattgtgttgtgtttggaaaatgataagtggttttctgtgtaggtttatttttcaagacttatggtatataataattctgttagtttttgtgtcaagcttgtttgttatctagtctagatcttggtgaggtagctatagttggagagagagagagagagagagagagagagagaaatatgggaaatatgggagtgggtctgaaatttatgcgaaggtgggctatgcttttcttgtaggtgaggtaaaatttggggtccaaagtcgattttgtagtggaaagtggactgcatgtgctgacaagcaggacgagttcaccagtatcaaaggcaactaagctttgcttactctctctctctctctctct

SEQ ID NO: 42617 - DNA, 3976 bp, Cannabis sativa
gtatattgtagtataacttataattttttttttttgctgaatatattgtattataatttataataatctgtacataaaagaaaatacaaagtcagaaatctggtctaatttagattagcaatgcccaacaatgcccaagactgcaaagcggatgtccttgttggctgaggctcaacgtgtgaagtctaaggcagagaagctcgagcagaagagaaagcccatttctaaggaggaagctgccgccatcaagtccgcaggaaaggcttggtaccaaactatgatctcagattctgactacaccgagtttgaagtgttcaccaaatggctcggtgtgtctcagtagttcaatatttgtgcgtttgaataccttgagactttgttttgttttgttttggtgttagttttgttttatttttttggacatttcaagtgtgagaatggaggctgggagttctgacttgttgtctgtaatcctcttctctttctcttattcccccttcaacaagagtttttattatctatagttatccctaaagtactattctaatttctacagacctacggttgaatattctttatttaataataaaaaaaatcaataacaataatgtaatttaataaaatatatacggctgaatagtctttttttttttaaataataataatttttttttaatttatttataatattcgaaaaacgtattaaaaaaaatccttagattgaaaaattcaaccatcacgctttcaataaaaagggttgaaattcttacaagtcctcagcctcttgttatgcataaattaggaccagttaatactttttaattaatttttatttttgaggaaaagtttatttttatttttaaaaaatcagatttcagttgaaaaaaataaaaaggatcaaatttacctattaattttaatacaatgtttttttccattaggaaatcgaatcttatcttaatccaaaaacatttttaagaaaattaattaacattttttaattttaattttaatttacaaaatacaaatgaagcgtttaatattttaagaaaataaataataataaaatatggccaacctcaacaatgcaatataagttgggaccaggccaatccacaaatccaaattaaatttcataatgaaaggggcattttaggaactttaacgtttatattttaacagcctacgtggtcgcgtccaattgaaaccacacgagcggagcagtatccaatcacaatacgccacgtgaagccaatgacaagtagagactacgtgtcactttttgattggaccacgtcaatattttgagccacgtgtgcacctaagaaccgcgaatggaaaaccacgcgagtcctcttcctcttataatagtccctcgtctcgttcgatagctcagttctcactcgttagctttgcttcatttctctctctctagctttctctctcatcgtttcagctatggcggtcggggttaggaaccctaattttctctgtttgatctctgttctatgccttctatctatcgcatctgctaaggttttcttcgaagagcgattcgagggtatatatctcttcatttctccttcattgtatttatttgcattttgtattttcgatttgtgtgattttcggtttcggtttgcatttctggtgaattaggttgtttttgaggctgtgcgtctgtcatttttgttaattgtatgtgttttgcgaaggatcggcagttttgtatgtctctttgttttgatctgatggttgttcgtgtttattttagcttcggtgttgatatgtgagcttacattgttgatttaaagtagatctgtgaatttgtgatctgtttgttggttttggctatggaaatggttttagctttcgtcgagataatgccatttagtgaagaagtattataattaaagtgatttagctttctcagtaacatttgcggtctggattcgatccccatgtgtaaaatctgtgagttcttttctgttataaggtgtaatataaaattaaaacttaaggttcgtatgatatggttctgatctgatcaatgtatagctcggcatagatcatttaaggcattggcgtttatcaggtcgggatggtttagtctttggattccacattgttatcatgtgagttctgaggtcttgattgttgattgttgaaccgcataatttatctcattcggaaggattaggattgtgtttgttttcagtctaacttactgtttggtatggaataggattgaagtggacatccattacactgttagaatcattgtgtgtattaaaaagctcttttaagtacatagctttgcctatacattttgtgtgaaaagtttgacatgactacttatatgtttaaagtcaaaaacttatgagaattccttcttgaatttacaatgcttcgtgattagtctactctcgaaggatggaagggtagttcgggtcaaatttgcctttgtggagtgtactatttatttctttgatgtatccactgttaaatacgaatttttactaatctatgtgatttgtttgctaatgtacttttcttctatactgaagatggatgggagaaccgttgggttaagtctgattggaagaaagatgagaacatggctggggagtggaactacacttctggtaaatggaacggagatgccaatgacaaaggtaccacaccttatcaaatgttgaataggatgctgttttgtgttttgtttttaatgtgcttgatgtactaaaaataaattaagcatttgctaatgagctgggacatgttttaattgatacaggtatccaaacaagtgaagattacagattctatgccatttcggctgagttccctgaattcagcaacaaggacaaaactttagtgttccagtttttggttaagcatgaacaaaagcttgactgtggtggtggatacatgaagttacttagtggtgatgtagatcagaagaaatttggcggtgataccccatacaggttgatactacctctccatatgatctgttactctcttttattgtaattggatatttatgtttaaaattctgatttgtacttggtgtttggtaatttgccagcattatgtttgggccagatatctgtggctacagcaccaagaaagttcatgccattcttacctacaacggaactaaccatttgatcaagaaggacgttccatgtgaaactgaccaactcagtcatgtttacacatttgtcctccgaccagatgcaacctacaccatccttattgataatgttgagaagcaaactggcagtctttacagtgattgggatcttcttcctcctaagaaaatcaaggatcccgaagctaagaaagtaagcacttatcaatgaatggtaggcgtcttatagatttcttccctgttttccagcttatattaattcgatcctctaatgtcgacagcctgaagattgggatgacaaggaatacattcccgaccccgaggacaagaagccagatgtatgtccccatagttttgattgtcttttatttaacgttttattgaacttattgaggaatgtattgatttcattttttgtcatttaaagggttatgatgatattccaaaggagatccccgatcctgaagcaaagaaggtatgcacaggcttctgttttttttttttcctttttctttattttctattatactttaatacaagtattgtagttactaattcagtttgtctttgcagcctgaagattgggatgagactgaagatggtgaatggactgcaccaacaattcccaaccccgagtacaacggtccatggagcccaaaggtatgtggagccctggaaaagttgaccttatttggcactaatttgcaacattgtcctcatggtttttctccctctttctgcagaaaattaagaaccccaactacagtggaaagtggaaggcaccactcattgacaaccctggtacattttctgtctgca

SEQ ID NO: 42618 - DNA, 4046 bp, Cannabis sativa
atagaaaagattacattgaaatagagttttatttagggcacaaagcgcaacaggacctatttgtaccacttttttaaaatacagggttcattttatcatttatcaaaacagatggtccaattggtaatttttgtaaaatacagggtccaaaatggtatttacccttttctcatgtggagattttattgatttttaggtgtgttatatatgttattgtttatcgaaattttcaaaaattaaatatttaagagctaaagaaataataatttgcataaataaagagatgaagattttttacgtggttcgagtattaataaaccttagttcacgagtcagtctattagcctcttagggcaattttgatgtgtttatagtattttcccaagaaaccctaactatttactctaagtttttcatgaagaaatagaagacctagagtaatattggcagagttttagctacgtaagttgtgatgcccccttcatatgagaattgaggggtatctatagactaagtggtaggtatggacatgccaactacccgcctaagatgtatgctaaaatctcactattggagtaaattacatgcaatatgaaagctaactaagtgatcccgtgggaaacactttgtccatccgtgcagcagctggataatgtggactattctgtactatatggacacgtgacatgcaaaggttcaatctttaaaagtagaggtcaagtgtcacctaaagcttgctcctttatgagtaaaggtctataatacccgtctagaaaaaagatagtgaaggtacgcacactaccatgcttggatgtaggagacaagatttgatcttcatcagaaaaagcataactgtcacttggtgatctggcgtgcataaaaggtcgacatccgtgacattacatgtaatatcccaataagcttaataattaataattagggtttatatttatattatgagttaaccaggtaataagtgggattatgatcctactaatctagttcagcataaaattttaaagttgctataagtggataaacaagtgtaatttttaaattacgaagatttatatagcatgcgtgaatataatatgaactatatatgaaataaaaatatcttcaggtttggcgatcttgaaaactcgatcgggggcgaaaattgtcataacatgcttaattaatagaattaatggaaatattgtgataagttaataatattggtatttgggtaattaggagtatgtaggatttaatgtagcgtcctagaagtaaaagtttcttagtaactaagaaatgataagataattattaataataaaacttttattaatattatattattatattattataataatattaacgttaaaaaagtaagtaaaacaagttatgttatataagaaatcagtagtagttgcgaaagtcttgtctatattgacatggtggatagtgtttgttattgattgttaatactgtacgtttgttggttgctgagtttttgctgaggtttcgtgagtatggatgaacaatatgcggcttttactatagaggataaggatgaggaaggactgttttttgaggcagggacggatgaactttccgagattgacgataggtggctgttagtgggtcgatttttgacgaatcgttctattgatttccaagcaatgcagaacaaaatggccactctatggcagctaggtcgtggcctttatgtcaaggaacttgatccgaacctatacctttttcagtttaccatgaagtcgacattgaaagggtggttgagggcagtccatggactttcgatcgggctcctctgattttcgaacgtgtgaaaccgggtaccaatcctcgacttgttccattaacaaggttagaattatgggttcaattacataacatgtctattggatttatgtctcaaagaatcattagcggaattggtaattatctcggtagcttcattaagtcggatccgaataatttttttggtgtttgacgggattacttacgtattcgggtgaaaataccagtcaatattccattgaagaagaagaaaaagcttaagatccaaggtggccgagtatgtcatgttatttttaaatatgaagacctccctactttttgcttcatctgtggagttttaggccactcagagaggttctgtgagaagctgttcgacactcaaagggataagattgtgaagaattatagtctagaaattaaggcggctccgagacgatgtaactacgctaatggttcgaggtggctgcgatcgggtctgctgaccaagcaggggtcgacttctcaaagcccggttgtcaactccgttaatgttccgatggttactccgactgttacggaggtagctggaggtagtagtcaaatggagaaaaatctgggatcatgtgttatgggacacaatcatgggatggttgattatgtgattgataacaatcaaaatgaatcccatgaaatcaggacggttgtgttggaaaaataattgaggaaagtgtggagaatgattcaaatattgggttgtcttttttagaagtgaaaagaaggagaatgggtcgtgagagtgttagtgggcttggaaataaagtggactctaatgacaaaaatgtcactttttttgaaaacatggaaattttggaaagtgaatatgaggtgaatggtgagacttcggaggttacaaaaaacttgtgtggggcaggtactggtttccaggcccgccaggaatcatgaatgtccttagttggaattgtcggggcttggaaccaacggagtgtccaattccttagagaaattgtttctcaaaagagacccaattgtatttttttatgtgaaaccaaatgtcttaaagcaagaattgagggtttggctagattattaaagcttgaaggtgtttttgtggtggaagccttgggctaagcgggtgggctagcccttttatggaagaataaagaagaagggactttgttgggctattcaaattaccatattgatattgtggtttattcccctcatgcaagtaattggagactcactgggctttatggggaacccgatcgtaatcaacgtcaacaaacttggaatcttcttagaacgttatctaaccaatctgagttaccttggtgtgttattggggatgtcaacaatatagtccgacaagaagataaacggggtggtagacgttatccgcaatggttgctaactggtttcaactctactcttcatcattgtaacctcactgatttggagcttcatggacactccttcacctgggagaaaggccgtggtactaaccattgggtggaagtgcgactagatagagcgttggttactcagtcttggcggttagcttttccagaagctactcttaccaaccttgaatactccactttagatcattctccaatcttcctagagccgaaggtacttaataatttttctccaagtgtctgtttccgttttgaaaatatatggctaaaagatcctatttgttttgagattgtgaatgattgttgggatcaaacccaattttgtgatttcccagctaagatttctttatgtgctaaaaaattggctctttgggggaaggagattacgggaactttgaaccatcagattaaatgttacaaatttgagttgaaacttctgcatcctcgacgggatagtgatttggtccagcggtactctgaaacaaaaaagaagctttacgaagctcttgataggcgggaaagctattggaaacaatgagcaaagcaacactggttaaaagagggtgattcgaatagtagctatttccataaagctgctacaaccagaaaaaggaacaatcaaattatccagttgcgaaatgaggctgatcagtggtgttcgtgggactcgggtctgccaggggtggtgtttcattatttttaggagattttccagacctcggacgtatcatgtagtgaagtagttgacagtgtggaaccgatttgttatagtgagatttctctcacctaaaaaactcgagaccagactcctctttaaaggac

SEQ ID NO: 42619 - DNA, 5092 bp, Cannabis sativa
gtaagtctaataacaactaacaactaattaaccgctaactgctaagtaaaatcttcagtaattagtgggttaacagcaacaatccatttaatatagaaagatcattattatcacaaaaacctcaccagtgcaaagtgaaacgatgcaccttaggaaagctgttagatgtaaaatggttgggtatatatgttatatctaattctagttacaaattgtacatagactcatcatggctcaaggaatttcactggacagttaacaagttatttatcattaatccttcaccaacaattggatattctggggataacttccactctccatccaccaagaacttgatttcatactttccaggtctcagcatcaatgtggtcgagaacttggtgtaagaacctgtatattctgatgacaaatattctccttggctccatccgtcaaagcttcccatcacttggacactctaataccaaaatcaagaatatgctttcactattttacaatcaacaatctactttcacaatacaaaacaagtactagctcacctctgccataccataccaaaataagggaacctccttgctttgtgcggcaccaatatccttgacctgctcctctaacttctcaagcacagcttcaaattgcaataaagacaaaacaaatattcaacgaaatttctaaagacttgagaatattaagacctactcaaccaaatgggaacattaagttataaatcataaacacttgctaacacatgcaattttctttgtaccaagaacattcagatataacgagatcattactatcactgaataacagaagaccatgaggacataatacgaacaatcataagaatacccaacatgtctataccttcaagtcgggaaagaaggtgagattgaatatattttccattgatttttctcgaaccctttggaatgccagacttggctatttcttctgcaagtttgactaatgcctgttcaaacaactcacaagattaaatatgtcccaacattattctacaaagtgtagccttagaaaagattttttaacaataaaatgcatgctgacagaagtctcgtggaattatatttatgttaaataatcaatttcttcaagtacttttggccaacacgtgcttgcagacattagtgtcaaaaattcaaaaacatacggtaaaataatttcttaagtcaaagtaatgtttgacttccttttcaaacgtgtcttagaaatgatgttcgaatgtcttcaacgcgaaacgatgtgtctagttaaatgatggtcgaactaccagggccaaaaaaagtgtctctgggacctagtgaaaatgaagagtatgacttgccaaggatataagattagtaagttcttgtaagattgatgtcacgtataaagagaacattacacttactctaccgctgtatctttttacaacaagaaactttgctcttcaaaaatgtaattatttaagctcatccaagtatccaaccagtccaaaatgtgttatctagatagttttacagaataattatgaattactaacagctctataatcaactactaactactgattcataaattatgcacgcaatctaatgactgaaatggtagacctcaaaaggtagcagttttggacacattgaaaatgtaaatgatctgatgagggcaggcattcatttttataggaattggctattcggtgtaatagctttaaatatgacatttgatggatatatgtggtaattatgggcataaaaacaatttcaaaactcctatgctatgaaatccagacattataggaacacacaaatgtgataataacgtagaccttggaattgctctggtgagaagagaacactgtactcatgcagaaaagtcagagaagagaagattgtggtggtacctgaatttcaagttcaattacagcaagttcacttttgaattccaccaaggcttcctcctttacatgcagctgcaatataacagatagacgattaaggtttataggcttttgttaacagtaaatttaaatttaaatgccctgattggatagtaaccaaaaacaaaaggatagaaaatggaatgtgtagtctttcattgaatgtgaaatagataggacctggactctcccaacaagaaagagcttgtacaattacaaaatagtgagatggtccacagtaacctcattcaactcccctcaaatacgccagctagagaataactaactatttattcaatttaggaaatccaccacagcccaaaaagtctctttcccactatacccttgtcccacatatacttctaagcatatttctttgtcgtaaaccttacaggagcccttatcattacccccaagttgcatcagaagatggcagatcctccattgaataagaactttaggaaaacagtgagtatgatgtcctgattcatcattttttaaaacgggggaagatcgtaagctatgtcctccatcacgatgtcgaatgaaactatccatggaatcatgtgccgtgtgaaatgtagatcatcgccattcttaactaagctggacacaatccaagaattgcagcagattcagcaactagctccagatcaacattttactgcagagtggaagcataggaaaagagtctaaaagactgaaacccagcagccttgtaaagctgtgaaacatggaaaatgggatgcacagttgaagcctaaatgcttctgctagagtattttctatctatccaatgcaccaatcagacctcgttaccctataagcctcactttcccactttactcttgtccaacacatacctctaaacatatttctttctcctagcataagtaaaccttatagaaggcctatctaaaatgttaaattctaaacaggggtgttttatatggactgaactcaactaatactatccttatccttttagattttctcccaggagcacatctctttcaccacatcaagaatacatgatagtacagaatttcattgtgacatacattactgaaaataaaagtaaacatccagagtttcctcagtagattagtttatatcaaaaattgggtgagctatttaagtgccaaaatttcaagcatatgcaaaacacggggcttcggatatcaagttcaatgttcttttctcttaagctcaccatttcaaaagcttgacaaagtaaaaaagcttatgcatattatttatttttttaccattcacccatcctctttttttttattaaaaaaactagcctccatgcctaaccctacaatatttgtttaccaagaaactatagcaattgcaggtacctagcagagacttgaacctcagaccttgtggaagcaaaccacatgcctgagaatttgaggtaaccctcttaggtaaatccatcttctctttcaacctccatttcaaatgtaacatccaggccttcaagctatattttctccacaactaagaaacatgttaaactaagcttcaaaacttaatattgggttgctaataatcacatatttttcactatcatgtgatcataataagtatgaacagaacccaaccaaatcaatgtgcacattagtagaagacaaaaagacaatgtaagctggtgaactactgcatgaattgtacctgccgcttgaggaacctgttttgttgattggcttcacttaattttctaagaaggttcgccctctcagagtcagcaagcagagccttcagctgtgatttcaacatagctttacattacattaggaactaaagaacagacaaatcaataagacttcattacatccaatctaatgataaaacaaaggttccaatcaggttgatgtggcagcaatgcgcatacctcgttactgcttattggttgagcaagaaactcctctggtgaatccttagatgtcgactcttcatcatttggactaaattctgattctagagatgaagactcctcaacgttaataggcatacaatacaacctctgacacacataactcaaatgatgcctagcttgagactgattcaacctctgatggcccatcttcaaattacaggaagccatgttatatggcaaatggtgaaatttttccttacaaaatgttcttgtattccgggaaaaacatggtgcttgttttacaagacagcacctagaccaattacaagaaagtacgataagctcatcgaaacaatgtcgaatcaagttattcttaaaattcttgaaccaaaaactgacagaagaatcatagccaaagcataattctcaccaacaaagaacctaaatgtcaaaatacaccatagcttgtattggaaatatttaccatgaagaagagacaactaagcaatgcattcaggaaacattgataagacctaccttgttgaacccatctccatcttggaaatcccaactgaaaatagaaataaattattaataataataataataataataataaattaataagagccctatttcttgaacacaagaaagtaagttagaaaaaagcatttgaaatcaaacctgtgtacaaaatgaagttcacgaacagaaatcaaacgttgaccactgtgacaaacaagtccgagaaagcatttgagctgcgaaacataacgattatacctctgctcaatgataatggaatccaaaactcagatttctaatttataaagatatagcagaaacattgtgctctgtttattaacctcatttcgtttttgacgaaagcgtttcacattcagttcaggttagtgagacatggattggggatattgataaggtgtactaggtaccaccaaataccaagccaaaataaatattgattaatatataaattaattagactaatgtcattttatgatcttaaattatttctaatttttgcactaaaaaaattagacaatatacattttttttttgggtaactaataaaagttaaaataactaaagtacaaaagttacacaaaaagtggggatttcttccatccaaaaaaagtttattatctattttaaaagatgcttgaagaaagctaaaaaataaaactttaatatgagataatcttcaattcattcatgtacatgactaaactcctagtataagt

SEQ ID NO: 42620 - DNA, 4180 bp, Cannabis sativa
  modified_base (2473)..(2478): a, c, t, g, unknown or other
  modified_base (2545)..(2556): a, c, t, g, unknown or other
ttgaagcttgtaaaggccattattgagagtaccctttagaagaacttgcctcgttgtcttgtccttgataagacaacaaacatcattaaattcaagagtgaaattattatctttagtaaattgtgaaatactcaacagatttttggtggcatttgggacatgtaaaatatctttgagaatgagaaattgatttgggagattggaactaattgaatttgaaccaattcgaaaaataggcatagaattaccattaccaaccactactttagcttttcccttgtagtccattgggttctgtaggttgtgtgaattcgtggtcatgtggtgagtagccccggtgtcgagaaaccaagctccagaaatatcactagttgaaggggtttcaacaagatttgcttgaggattttcagcatttgtttcattgcttgagttgcttgaagatgtaggtccagtataggttatatcaaacctatgatagcacttttgtgcagtgtgtccagctttgccacacagttgacaaattggtctattgcctctgccccctcgattgcttgaatagcctcttccccctctattgttgaatctttggccacggccattgtatccacccccattattattgcttgttgacatatttgccaaatttgcttgaacatttgagagggtttcagtagtgtgttggtgtagtctgagttcatgactatgaagcatgaactgaacctcttgtaaactgaggggattctctcgagaagtgaggttaacaatggcagcctcatattcctggcccaaacctcctaagatgtacaagattagatcatcatccgaaatctgttgatcagcagcagcaagagcatcaggaaagctcttcatcttcaaggtgtattcttcaatggttgatgatcctttcttggtggcttgaagaagaccacggatttgcagaatacggactctggatcttgaggcaaagagttgggcaaagaagttccatacctcagaggaggattggcaattgatgacatgaccaagcatttgttcagaaatggagttcatcaaccagtgaattaaaaattggtcaaatcgttgccattgaagaaaatcagggttgggaatattacctttaagaatctggggaggaggagggatagttccaaggatgtatccttctaggttgtatgctctggtagctgcaagaaccagggacctccagaaggtgtagttggattggtccaatcgcaagttaaggggaagaagattgttatttagaagagcgacttgttgaacttcttgcgctcgatggatcgattgtgcagcgttcagaggagctccattgccgtcgatttgtccaccattgttggatgagttagctccaatcaacgccattaatgctctgataccatgtgggaaatgtataagaatgatgcagagagaaaatagagaagaaatggtaaaatgactcttaatctcctattcatattgaattcaatattaagatgagtagttacaaaggctggccacagcttagcacaagaaagcaagattgttataacagaaaacagaaaagctaactaacataacaaactatagtaactaacttatcctaatatagataaacattatgcacctttattagctcaattttttagccatgttaaccaaggaattaaaatcaacattttcaattaatatttatttgatggtttttaagtttttaggataatgatcctcttaagctaacatgtctttttttcgtaaaaaatcgatgatatattcccaaatatccatagatatcaaatattcatgcaaaaaatttctatatttttaaaatatccgtaatttttttttttttgaatatattaactaattttattgctgaaaatcaaataatatattttttattaaacaaggagaaaatttcttctaaccaaaaaaaacctagttttccatctatagtgcataatctcacatgttttgcggtattactattttgtattacatgttgaaaatatacacatgcagagacagatagcaaggacctaatagaactaaatattctttatttgttaaaaacaacatgtgaattgaagtaataaatgtagagaataaaatcgtttaactaataatttgaaaccttagagaagttaattttggtgacaatattttcttattgagtgtgttaaatattatcatattcatttttgtatgatgaagtaatttaaaggatatcataaatctaaataatacatgcatttattattaaaatgtatgaattagtatgattattcaaatttattagtattttataagttttatcattaattttcatatttctacacaaatatctataagatatgtcagaaaacaacacaaacttagttagtttaaaagatcaaaacaattaagagattatttcataaatacacaaaagcaataaagaaattataaaatacggcttcacggaattttaaatattttnnnnnnttttttgattttatttacaaaaatacgatctttttatattgtattcttgttaattttttgttatttnnnnnnnnnnnnttattgttgttttgatgttatttaaaaattatttgcatattacttttatgtaatttttttgttgttttcataaaaaactgtaaaaatataaaacaaaagtatttaaacgtaaaattgtaatttttttacgaaaatataatacctcatgtaattattccaacaattaaactatcaagcacaaactttgtcctgggtcagccttgaaatcaaggcctaatccaactctggccatccccacaaaaagtttctatgctataatcaataagattacaagcaccaattgagttgtgtacaccacttaaatacaacacaaacaaaaacaatagtgctctccattttgagaaagaatttattttgtaaatattataatacaaactaatacagatttgtaaatattataatataaattaatgtttatgtattaaataatacaatttaaattatattaaaatttataatcgtaataattaatataatataatattttatcaaaacataatattacttattatttaatacatacaatatttatggggcctattaaacgagtgagcatatatattctttgatagtatgtgatattaaaattgcagtttacgactggccattgagaaattatatgccttgacgttatctattattcattttagaagtttacatagagatagtaaagatttttatagagcaaaatatagaaagtgtttatatgagagtgttcacttttatagtggaagaatggtgactcatttttgagtctacactagctataaattatacatttgaaacttatgctttctcaataatgtaacaccaagtgaccttgaaaaaaataaatgctttcaaggattgtcttgactttgatttcaagaatgaaattctttcgtgggaggttgtttctagtcattttcaacttatgcaacacaaaataggaatcagacattattgattttgatatgaaacaaaaaatacttgacactagtgattttttaatttttttctcaaattaagcaatttggcaatttaaggccgaaagtcacgagaataggaaaaaggacagtggtgttattattggattgcacaatattcgagtcaaaaataactagctatcctttctttcaaatgagttttgcctttgggacaattgaaagtagcttctataggaggatgacataaataaagtaattttttttctaagtataaaaatgtttctttcccttaaaaccaatgtttatcttttcctattaatggaaagatcatattatatgaaatcaactgaagattaattacatataaaatcaattgaagcaatcaactttaaatgttattaatgataatttgaacaatcataaatcaccttctactacatcatttatgttggaaaatttgtgaaaagaatttgtttactctttttctttgttggttgattattaaagacaaatttttgtgttgtaacagattttttcacaaaaataaataataaattatgctccaagaagttgttgggggattggctttgaccaaattcttttcaattgcttcttgagtggatccaaggaaaaagaccgaggagtttattaatggaaatctcctatgctacacttgttagtgaacctatcttacagag

SEQ ID NO: 42621 - DNA, 2976 bp, Cannabis sativa
ttaaatatttattagtaaatataatttttttctaataaattttaatattctatttaataatagttttaataattaaataaaaataattgaaattataaaaaacacatcattttagtattatttcattaattataaaaataaaatataaaaagttaaaatatgaatttaagttcgtataaaaaaaacaagctagtttgagtatatatgatacgaatcagaacatgatacgattcgtatttttttgtagcacaacatgatataatatatttattttataacacgacacgatacaattcatattttattataacacgacaaaacacggctcatatttataccagaacaaatatttacattactatttgtgggccccaacgagaagggagtggttcggtggatttaggtgtaggaaaatgatccaggtggccgccattgatgaatagtgaatgattacaaaaaagctatattttaggtgggaatgcattaatcaaagttgctatcatttaaaattttctttgatgtaataaagcttaacgagctaatataattaattattgcgttacacagtcacaattttactgtcccctacgcaaactcccaaaaatacaaaaacaaaataccaacaaaatgtattagattttgattttatatatattaaccaaagtcaaataaaaatacaaaaagggattgtttttgtttaataatctttccttggctttggagattgagctaaaatgtggggtttttcttaagccaactgacttaagatattgcttgaatttgtgggttattttggatttgtactcttggaataataacctaaaccatgtgaagtgagctctcttatttgtcttaagcctaaaggcaaattaggtaaagttttcatttaattttttttggaaagggaggtgttaagtatctattaatagtgattagctggaaaattaagaaaggttaattaatatgaaaagagaggtgaggtttgttgttaggtaagcattagaaccagctcacataactgcccttagttagatgattatatttagataatgcattcacaattttatacccacccacttgatcagtcacaattttttttggcttagttaatatctccatgtgagatcattacaagggtaggtctgagaaaatggaatgttagttaattgtttggtttattttcttctctttaaagattacagtacatgattattagagtagtagattagcttagctttgatgacttcttccaatatagtactcaattgctcttaaaattttatggcattttaaagccgttgactaatacttatcactttgagtggacattttactttacacataaataaagcatgttctaccattagttttcataattttggttttgactatatgcatattttttttcactcacaaggtcaaaatggatgaacttgttgtttctagtgcactacttactaatgtcttttggggaaaaaaaaaaaaaaaagaaaaatccttgtatgatagcatctacctgcactcacttgagaaacaccatagctcctcaccctcagtctaactaaaatctttgggcatttatatggttgagtacttgggtgtgtcctttgccttagagggtagcaaggattctcatttggtatttgaataaattataatttatttattttttatttgagggttatttgtggaaaacccttttatgtttaatttttttacacttaagttccttatttattttttttagcgaaactctcttacatttattttttatttttgcaaatttgaggtattagctgaatattaccgttaaataccaactagattattattatattgatttcaaagttttactttcacgtatacataagtgtacacaatgatcatccaattaatatttaacagtgatatttaactgacacctcaaattcgcataaaaaagtaaacttatagaaagttttaccaaaaaaaaaaaccaagagagtaaatgtataaaaattaaaatataagagagtttcgccgttaattactctttatttaacactttgtaattatttaacatatatatcacactaatttttgtaaaattataaataatttatagtatcaaataatccaaaataatttattttaggagcatataaaacaggttgattttgatttgttgtcatcacagtttggattacaaactgtttgtttgttgttctataagtctttgattgctgttatgttcatttgatcttgttcttgagagagtgattcttatcactacatataccattttataaaataatttagattataattttctaggtagcaaaaacatacacacttcgaaagtaaggataaccttaattaaaaaaaattccaatttctttttaatgtaaacacatggtaaataaatattattaaatatcatatttgatctcaagtcagaccgcaacctctgagcttcatcaatctaaaaagacaaagaagtgtcggtagggatggaatgttatggcttcctgtgactaaaatattgttaagtttttttattttattaatttttttttttggtaaattagtttccaaaatagtttttaatttaatgtaaatgtttattgagaaataaatatatttttcttgtattattttgctttttttttttggggaaactttaattaatagctgtttttatgggtgaggactcacacacttaacccaccacatgcgcacgttcgtccgagctgggttggtgtgggtgacactctattatttttacagaaaaattatttaataaaataattattttttatttttaatttaaataagaaacgtgtttaattagaattgattacttagtcgtatcagttaatgagacacatttaagcaactcactatacgattcagaaaacgttcttctccccgttatgatttttcaatccatttgtctatataatgcaattgaaatgatgggaagaatacatctttttc

SEQ ID NO: 42622 - DNA, 4946 bp, Cannabis sativa
atatatctcacatatatacatatataattatgttgtaatcttaaaactatacacaataaaactaaactatgcataagttcttagagtctttttttaaggatttctttaataaagtgtaataggatccatgaaaaattaataaacaaccataaaatggcatttgaatattattttattatttataaataaatataatattctttttaatgtatattatatgtaattggattggatcggtttttaattagattttaaaagtatcctataataacagattcaattcaattagaatcgaacaatttacctctaatctaatttttcataattgaattagattgattcggtctaattagattaatttgaaaattgcccacccattataattaaacataaataagtacatagattttttcaatgaaaaaagtgggtggctatataatatttttggtggtatgattattatgaatttacgatgttttattattacaagattattgtgcctaagaaaacctaatccttattaatgcatacataataagtcagaggctgcaatctaaaccgaaaatgtctccacagttcagagaacactctgaactctctctactcacttctccaaaaaaaaaagttgaaacatatggtttaaccactcaaagattgctgaccaaaataacatgtaattttcatgataaaattcataaataatttacatttaccaataataaaaaaaaaattataagcacaaaatcttgttataagagtccatctatctaataatctagccagccaatgacaccaaaatcaattccaacactcacaccctttttcttcccctgtttttattgcattaaattatgtgagttactaaaaaatcccacatcggcaaagaagtctgatcaacggagtcaaataaagagagttcccgccatcttagccgttggtgggtaagtatgaaacttacctctctaaaaggtggcaaaaagagagcctttttggtcatcaaaacaaatctctcctataaatctcactattctaattcacctaatcctcatcttatttcatcaatcttcttttacatccaaaccccaccttcctttctttctttctttcttttctcttcataaccaaccaaactaaactaaacccatctcttatattttagaactcagttagtttacttgcttttttcactttgtgttttagctaaactcttcaaactaagtcaagcccaatttttatctaaatcacataaagtttgtcacccttattttctttttttccttttttcttttttctttttttttttccttttctttcttcataaacttttttttcctacttcactcccacttagttttatgatcatgggagctttgttcctcaactcttcttcttccatttctcctgttgttcttgcaagagtccccgaaaagcgcggctgcagcctctcaaggaggaacaatttcagcttggtgcgttgccaaggtggtgggaatgtcataaagactattggatcattctcttctgttttgagtccaagagcagctgcagcagctgcctcttctgcaatgagcactgatcatggagctgctgtggttgtggaaaatgggagcttggttttgtctcccaatgggaaaactcaggcagagaatggcattgcagtcaaggaattggtcccatatggaggatcacaatcaaactcttcattggaaatgcatgatggtattggaattgtaagttttctcagaggaaaaagcttttttgtaactggtgcaactgggtttcttgctaaaggtacatttctacattatacttccatgttatatatattattcttatatgaaaggtttgtgatccttgttaaaatattgcagtactagtagaaaaaatactaaggacagtgcctgatgttggtaagatatatctgttgatcaaagccaagaacaaggaagctgctatgggaaggttgaaaaatgaagtatgtctttttatttgtttggttttggggaatgatgtgtcttcaaaaccagcttcaccaatgaataattgattttgtttgcttagtgttatactcttttggctctaaaagcttagttctaatttattattgcactttagatcataaacacagagctgttcaagagactccagaaaacttatggaaaatcctatcagtcattcatgttgagcaaactagttcctgtagtaggcaatgtatgtgaatctgatctgggattaagtggcgatatagccgaaactattgcgaaagaagtagatgtcattgtgaattctgcagcaaatacaacatttgatgaaaggttatgccttttctttgatttttgtttccctttgagacaagttatggtgctcataagaaaatttcaaggctaacaagttggaattgtaagtactaactacttttctttgttagatatgatgttgctttggctataaacacaaaagggccttgtcaccttatgaacttttctaagaattgtaagaaactaaagctattcatgcaagtatcaacaggtacatataaatgtttttttgttatggcctcttcaaatgtttactagacagcaaaattgaatgagttttttttcttcttcttcttcttcttcacatacacagcttatgtaaatggacaaagacaaggaaagattatggaaaagccatttcgtataggagaaaccatttcaggggagaactttgtttctgaaaccccaccaggattacttcccatacttgatattgaaaaagaaatagagctggcttttaactcaaaggaagatctagaaaacaatgctttgacacaaaagatgaaagggttgggtttagaaaggtaatgactaatgagtttttctctttttattaccacacaagaccttagagttgtataatagttggccattataatcagggctcaacaatatggatggcaagatacttatgtgtttacaaaagccatgggagaaatgatgattgatagtatgaggggagatgtaccagtagtcataatgagacctagtgtcattgaaagtactttcaaagagccattccctggatggatggagggaaataggtacattcccataattgcaaaattgcatttattttcttctaagttttgagataaggccctcataaactcatctcttcttataggatgatggatccaataattttgtactatggaaaaggacaactgtcaggtttcctagtggaccccaatggagtacttgatgtggtaattaaattgttcattcatatgtttttttagatcctttttctgttttgagataagctaagaatgtactaaggatcatctttttcttaacttggctattggcaggtaccagctgacatggttgttaatgcaaccttggcagccatggcaaagcatggattggctcaaaaaccagatatcaatgtttaccaaatcgcttcttcggttgtgaaccctctagtgtttcatgaccttgctagactactgtatgaacactataacaactcaccatgtgttgatcctaatggtaggccaatccatgttccttccatgaagctattcaactcaaaggaagatttctctgaacacctttggagagatactgtccaacgaaatgggttattaactatggcttcctcaaataaaaagctgtctcagaaacttgaaatcatttgcagaaagtcagtggagcaagcaaagcacttagctaacatttatgagccatacactttctataatggaaggtaagatgattacatttacaattacaaccacattaatcatatcatatggatagattttgatactaagaactgtacttgtatccaggtttgataacagcaatacacaaagactaatggatatcatgtcagaggaagaaaggaggaagtttgggtttgacgtggagagcattgattggtcagattacatcacaaatgtccatattcctggtctaagaaggcatgtcatgaagggtagagggatgcctagctagcttctttgaatcacatatcaagtcctgcaaatgtcataaatgaatgttgcttctttctttttattaaatattttcttttacttttctttttttcttcttcttcttcttcacatcacacctataaaggtataaaaggcaaaagaaaaagtggttgcctttacttatgtgtaatttatatatatcttatcaaacttctgtgatcatggtgctccttcagttcttgtaaatcttattgaggatctggggagttgtttggatttctataaacaataacaagttctcctctatatgtgtactaaaggaaagtaaatatattacatgtttgtgtgtttggtcaatttttacaactactctcatacacactatatatatataactggcctaagaaaatagtgttatgtaatccattaatatagttgttacaatattacataatataagatcttccaaataatgccttttatgtcttttttttttcaatgaagtttgattttggtagttgtgatttaaatcaagttacacgcccccaacaaaattgttattgttaaattagtgctagattgacataaatgaaaatttaaacttaaagggataaaatttataatttaggactgtaaaaattattatatagagatgtttgtagcacttgaaatgcttaactgaactaatttgacgacaaaactccccataattaacaagtgttttagttggacattgttgttattggtgaaattgctttagagcatcccaatttccaatgcatggttaaatagctagttgggcccaattttaatgttttttttttttgggtagtttaataaatatagaaaaaaagtagaaataaataatgtaaaaaaatataaaaataaataaacaaaaattaaaatatgagaaattaaataaaagaacataaataaagttataaaatttataataactattact

SEQ ID NO: 42623 - DNA, 7559 bp, Cannabis sativa
  modified_base (1729)..(1729): a, c, t, g, unknown or other
catcacttttaagggggcaatgtaaattttttatatactactttatcaaattatcgaaattttatcataaagttaaagtttgatagtaattttttggtttaatctttaaaacattaaaatttgtggtctaacttttttgaaagtatttttgttttcatcttagtcttaacttgagtttataaatccacaaagcatactttttagataagtgttaaagtaaatttttattaaccaataaataagtttttatataataattaaactctaagatattaatgaataataataatttatataaaaagcaggaaattttttaacgtagttttgaagttaattcttcacactcgacaagttcatattatttttggtattttacgaagtgtatataaaatgcagaatcaatatattatttgtgagttctcttttgctttttttttttctaaaattggtcgtcctttgttcattgggttctccccttgggaatctttgcaattttcatgaatcgtcacgtttcacatgggataataatgataaataattgctatagttgctatttgtttttatttataaacggttatgctgattacacctctctttcttgcaatacaaatgatcatcttaagatgctttgttttgaaagtaacttttgcttataagtataatctgggacatgttcctcacgtgtttttgtaaatgttgggagaggcgaacgcgagacactaccatgatgtaataactctaatatgcattatactgggtatatttcttttagtctttcaacataatcacgagtatgtaggttaattgtacactcttaaagaatttattatttaccatttccattacactatcattatattatgtcctctgtagatttcgaggtaggttaatcttataaaacggtaattattatttatggctcgtccttatttttaaaaaaaaaattaaatatttctactaatcatattatcggagacgaattattaaacttatttattattttgtaattattttctaatttctttatacttgtctcaactatattgtttgctttttatttattttgccacataaaaaaagtcacaccatacttcttttaatacgtcatacataggaaccagaaaacctttttcattcgatgaaacatttaattttcttttcaaaatactttaaattattataatacacaacatgttactttcattatttttatgtataacttttaattttgtcgcacacagtttattatcataacaaatataataataatgttaagcaaaaaacaatataataataataataaaaaaacaatagtgatagagatcaaataaagtgagtacaataatttcaaggcaagtcgacaaagttcatgattagtttatttttattttctaaattatcatataccacataataatttaaataaataaatgaataataataaaaaatattagcagtaaaattccattaatatttataattattatacattcaattttaattaaaaataattataaaattaatttattgtatttttattagagtcgtaccattttttaattattaaatgttaactcaaaaacattacatatttagagttaattgatacttaacagcaaaaaaaatatatataactataaatctataataaaattgtaagaaaaaatacttttaaaagtcattttttttattaaatatgtataataattacaaataataataataatantaataataataataataactcaaagacaccgtctatatccctaataataataatatataaataataaaaataataactcaaagacaacgtctataatttgtgtcacatgcatggcacgtgtcattttccgctctggttttgcatttatttagcaaattaattattaataaattaaataaataaataaaaatagaaattattattacaaacaaaatcccaaaccccaaatggatcaaaatcattcatcatcatcatcaacaacatcaattttctttattattagatctctttctctcaaaccagactgtacggattactgcaaaacccatctcagtgagtcttatcaacaaccctaactaatcctattcatctctttgttgttttgtttttttatttatatatttttttatatcatacaattatgtaatatatagaagtactctgcttgttgaaatcgatcaaagtttcatttttttttttgcttttttaatttgtttatactcagtggtaaaatttagatgacaaagcttctgttttttttttcgattactttgttgtttgaattttttatttttttactgtaattaatttggttttcaattttattattggcgacgaaatttgaagtttggtttttttacaattgggatctaaagaaaagctttatgctgatgagttgtgaaaatttgaatatgctgtggcggttgttttgttttgttattgattgggtttgctttgttttgatttgatttgattgtgttcttagttagttatgggaatctatctcagttctccaaaaactgataaatcctcagaagatggagagaatgaaagacttcgatttggggtgtcttctatgcaaggatggcgggcatccatggaagatgctgtaagcgttcttcatcattacatatttagttcactgactgtcatagtttctaattcaacactttccactttaaagaatcatgctcaattgctttttcatttgaattgttactttatgattactatataactcattgtatgcatagtgaattatatgatgccccactttctaatcgaattctctaatgcagttagtttaatccaattaaatgatgtcatctctgactactttgaagacaaaagaaaaatttgggattgctgtagaaataatttttcaagaagggaaagggaaatttctattatagggtgaagctttaaatggttacaaagagtcatcttgatagagaattcaatttggactcatttgattttttatggtactttattgtgttgcagcattctgctcacccagatttggacacttcaacgtctctttttggtgtttatgacggtcatggaggttagaaacatattatacctcctagtcaaagcgttagagtttttggtctctgcaaattaatcctaataagtctatacatgcagaatttgtcttgctatatgttattcggtttccttagaaagttttactatgttggtgctaattttgattttttccactaacttgcaggtaaagcagttgcaaagttctgtgccaagtatcttcaccaacaggtgctcaagcatgaagattacatggctggagatataggctccgctttacagaaatgctttctaaggttatttaatgacttttgattagtttcatttttctttgtcaactggtctttgttaatctttagcctgagcatcgggaatctttgttaatgccaagaagtttcatcttctaagcagcttcttattcactaatcattgggtttgcagaatggatgagatgatgcgtggccaaaaagggtggagggaattggcgatcttaggcgataatttagacaaggtttctggtgtgatagaagggttaatatggtctcctagaggtgggcaagctaagagaggcgaattaagtaaccatgttgaagattggccttctgaagaggtatttttcagtacacatttatgcttgatgcacctaagaattgcactttactttcaagccttttgcaatatcaatattatatataaatataaatttcatgctttggttatgctttacatgtttgatacgaaaaggtctcgaaatgttgttgtatgggattggacaattagaatggctaagatcacctcgcttgcattgcatattttatttcattatttattggggtgacattgattttgcctcctaactgtgatattttgcagataatgtgaacaagtagtacagtagtacttctttagacttggtagaaatatggacattattaaacccaattttaacttttttcatacaaatgtagctaataagtaataagtattgcagaagaattatgggttcactttttaaattatagtttcatatttgaagccaatgcaatagactactcatccatgatactttctctgggtgctgaaatagttatgtttcattccctactgcttcaattagtatcgattatatatttgagaaaataaaatgttgtaagtttttcgtctcaaccagggacctcactcagattttgatggaccgaattgtggtagcacagcttgtgttgcagtcattcggaacaaacaacttgttgtagcaaatgccggtgattctcgttgtgtgatatccaggaagggtcaggtgattctcccactttatcctgtatcaactccttgcacttcatcaagttaactttgttgaagtttaagggagagtttaatctacattcgcttctttaaatttacacttctgtaaaaaatgtactattgatgtggaatgacttgtgttagaaaagtcgtatcgaacaagaaaagggcataattaagttctttaacaagtttcaaactggattatattaattttttactatgatgtattatatttggtcaaaatagaaaagaaatgaatgtagtccccagatgacatgaaatcgatatttacactctttactatttgttgcagttggttaagtagttaggaaaatttgccatactacttctgatgtgtggcaaagaatttttcatatcttgttttaataaaggttttattcaggcatataatttgtcgaaagatcataagcccgacttagaagttgagaaagataggattctgaaagccggtggatatatccaagttggtcggatcaatggaagtttgaacttgacaagagctataggtatgtatgttttgttgctgaaaatagagataggagattgagtgatgatcttttttatctattgattgattaaaatgtggtggttgcaggagacgtggaattcaaacaaaacaaacatttgactgctgaaaaacagattgtaaccgctaatccagacataaatactgtatgtatttttacttccatattacatttatgtaggttagcttaagaactatgaaattgtgtattctgcagttcatgtcaattaattaggattattttgtaaagggaaaaatgcggttgtgattgagattttactatatatgttgttttagattttgagattgttatgccttttcctctatcaatacagattgagctatgtgatgatgatgagtttctcgttttagcttgtgatgggatatggtgagttagttccttttcttgtaactaatctttcttgttgattgaagttgaacattcaacaaaactcaatatcaattggacaaaactaggataatacataatgccctgtgggaatattagagacaataaaatataagaatcataacacggtgacttatttgtgccgataccattttctttattcggtgtaaaaatcataatgtagtaaatgttggttttgagttattttcttgttcatgtatctctataaaaactctgatattcttgtttctttccccttcagggattgcatgtctagccaacaacttgtggactacgtacgagaccagttaaaagaagtaaattctccgagacttatatgaacacgcacatactcacacactcaatgtataacagaactaacttctgtcttacaatgcaggaaactaagctctcagccatttgtgagaaagttttcgacagatgtgtggcaccaactgctggtggggaaggttgcgacaatatgactatgatcttggttcagtttaagaaaccgattaataatggagatgcttcagttgatgggcagactcctttatgatcaacattctaaaccgaaaatcgttgaaggaaggtggttcgaaaggtctttgaacaagtcctcagaactgacccttgttccctggaatttgattatggctgatatctatgattggctcagaaatattcatcacaattctgtattgaatgatgaatgaagtctccatggcatattactactgtacatattcaaggtatcaagtattatagtttgtccttcatcaaaaaagcatttatagtttgtctttgactcctgagttctgtacattatctcttagtgttttgtgttttgtgtctggtgggtgcctcagattttgaagggctttctccctgtttttttacccttttgttacatatctactgaccaaacaatgatcaatagactctattatctgttcctattttatgataggttacttgtttcagtgaaatttgatagtgaaagataaaatgtgttttttgagtggctcattgttaatgggtactagtggtgcttaccactacctgaaagcatcaatagtacctagcatattttattgctggctgttttttgtatacgcgtggtaaataattgtttaaatgttatatttgtcactataaattatttaaatttttttaaaaatttataagttatcttaaatagttacaatgtatgaaattataaaaaaaaaaatttaaacttaaaaagatttcttagatgctgaaataaatgaggaatttaccagaaccattcttttaaagggatttactagataaatttctcttattatatatattatactagttggatatactttgtacttttgttgggtgtgtgttgatatttatagcttcatacgagtacaagtaacatgttgtagttaggagtggcaaattgtgtcttcgagtagtatttgtgctgtgtcgagactcatgtataataagtatatacttaatttaaacacaacctgtttaatagtcgtattgcaaaataaacttgaattgactataagtatgtttggtttaaacatgtcaattaataatatatttatgatatatttaatacgtttgtgatttttaaagtagtaaaataaatagatcattaacgagttagttttgtattagttgtgtcaaaccgaatataatccgtttattaaataggttacacgagtcaacacgaacacaattcaaacttatttaaatccgtaattgggttattgtgtctagtctgttttgtcttgtcagagttaattatagagctatgctatactatccaaaatgtgattctagaacgcaaaataaaacaactttttgataatccacccaacactatgtattatagttagaggacaaatatattcagagtttctttttttttgagtttcaaatatattcagagttagatattattgtgcctgtgacttttcaactagtcaaaaatgttatattcaatgtattcataactgaccttactatgtaataaataatatctaaaattagttttacataagaaaagtctaaattcgtaaggttttacggcatttctattagtctaggtactaatgacaccattacgaggaggtaataacattactatgacttaatgattttttttttcatataataatttttatgtaagaatataaaaatttaattacatatgacataaaatttaagtattaatatcatttattatttattta

SEQ ID NO: 42624 - DNA, 3792 bp, Cannabis sativa
gtcactcggctgcaatctgttataacagatttgatgaaagttacatgggttctgacccaaataacacgaatggaggcaacaaaaccgctcaaaacaatcacaatgcattcatagccagtcctgaagtccttgaaagcgatgcatggtttgcggacagcggagccagcaatcacattacttcagatgctactgccatgaatcaaaaacagccatatggtggtaaggaaaaagttgttgttggtaatggatctaaacttgatatctctcatgttggtagtggtgttttggatactaatgatggcaatttcttactcttgaaagacatgctgcatgttccaaatattgctaagaatctaattagtgtatccaaactcacaaaagataacaacatactgattgaatttcactctgacatgtgtttgattaaggacaaggaaactcggaaggtggtgctccaaggaatgcttaaggatggattgtacagacttgaagatcatcaacaatctgtcactacaaataaacaccagtacaaccgtgataattcctttgcttgtttttctgttgagtctaatgttaaccagccaagagctgatgagagtcatgtatctagaatcgatgtgtggcataggcgcctaggccacccatcacctagaattttaaatcaagttttagaatctgctaatgtaaggaagtctaagaatgaaatgcaaaagttttgtgatgcctgtcaatatggcaagtcacatgctcttccctatcaattatcatcaaaccgtgccaaatttcctctagatctcattcacacagatttgtggggggctgcccccattgcctcaaatgccaattacaggtattatattcatttcctagacgaccatagcagattcacatggctatatccacttaagtttaaatccgaggcattaagtgctttcattcaatttaaaaacttagtggaaaataagtttgacaggaaaattaaatgtcttagaaccgactggggtggtgaatatcagcccttcacttctttagtcattgatcaaggtatagaattccaacactcttgccctcacacgtccactcaaaatggtagagctgagcgcaaacatagacacatcgttgagatgggtctcactttgcttgcccaagctcaaatgccactaaaatattgggtggatgcctttcacactgctgtgtacctcattaatagattaccaacaccagtacttgaccataaatcaccatatgaagtcttgttcaatgaaaaaccagattatacattcctcaagacttttggaactgcttgttttccttgtattcgtccataccagtcacacaagttccaatatcattctctgaaatgtgtcaaccttggttacagtacctcacacaaagggtacaaatgtttaactcccacaggtcgtatctacatatctcgaaatgtagtattcaatgaaatggaatttccatttaaacatggctttctaaacaactaccaaaaccccaaacctgtcatcattcatagctcctcctggtctacacttccagttcccacaaatgatgttgatatcagcaggtctgtacatgctcattctgaagcaatccatgatgcatcaccaggtttgcctcaagtttccacctctgtaactcctaccagtactaattctgttcctgcaggggagaatttaatcactacacctgaccatattaccaattttaatgagtattttgatcagtatactgtcgagcaggatcatgaattagacactggcactgagaatatcactctccctactgaacctgaagcagaatcccctcaaccgactcttgctactgccttgcaacctacgcaccagatgataacacgggccaaagcaggggtgttcaagcccaaaacgtatctcagttcaaccaatgctactgctgtctacactgaacctgcatctgtcgaagaagctctcaaacatccagggtggaacaatgcgatgaacacagaagttgtagccttgaagaagaacaaaacctgggtcctagttccaccaactgataaccaaaatctggtgggaaacaagtggatattcagaattaaactcagggctgatggaactgtcgaaaggttgaaagccaggcttgtggcgaaaggttttcatcaacggccagggatagactatggggagacgttcagtcccgtaattaaagcatcaacagtgaggattgttctcactatagctgcctcgagaagttgggacataagacaactagatattaacaatgcgtttctcaatggcactttggaagaagaggtgtttatggctcaacctcaaggctttgaagaacaaggaaaggaaagttgggtctgcaaattgaacaagtcaatctacggcttgaaacaagctccccgagcatggtttgacaaactcaaaaataccttgatcacttggaagtttgagaattctaaagctgacacatccctattcttttacaaaacagagaagtgcataatccttgttctcatatatgttgatgatataattgtgactggaaatgatggcaacaaagtgaatgaattcatctcaagactcaacaatctgtttgcgttgaaagacctcggacagttgcactttttcttggggattgaagttttcagagatgacactggactctatttaactcagacaaggtatattgaagatctgttgaagaaagtgaacttaactcatctcaaatcatgtcctaccccagtgactgcagggaaaccattgtctatcaaagatggagaaccaatgcaaaatccatctgcttatagaagcatcatcggttctcttcaatatttatgccacactagacccgatattgcttattcagttaataaactgagtcagtttctgcaagcaccaacatcagctcattggaacgcattgaaacgagttctcaggtatctacaagggacaaaacgattgggacttcacatcagctgctgcaacaaattgaacattgttgggttctcagatgcggattgggcctgctgccctgatgacaggcgatccgtagcaggctactgtgtctatttaggagaaactttagtgtcctggtcatccaagaaacaagccgtggtgtcccgatcaagtacggaatctgaatatagggcattggctcatgtatctgcagaaatctcttggattgagtcccttctcaaagaactaaaatttcctttgctgcttccctcaatcacctggtgtgataatatcagtgcaagtgcactggcttccaatcccgtcttccacgccagaaccaaacacattgaaatagatgtccactatgttcgagacaaagtcctgcaaaaacaattggaagtaagatacattccatctcatgatcaagtggctgacctgttcactaaaggattggcaaattcaaggttctcatttcttgtcagcaaacttggtgtgagatcatcaccctttcgtttgaggggagatgttgagaaatgaggttactactgctggtgcactatgaagttgctgcactattctgcagagaattcttcctctgcactgtcctctgccaggtgtccttgtggtccaaaactatgggaatcaaatgattgaaaattctgttaggatattccccatttgtaatcttcattgggatttgcttttgtgccatctgtacaatgagccgttgctcatttttccttgtactgaacattctctgcatctatataaacactctgctctgcctcaagttaattgagctgagatttatcccttcattattttaccaaactttact

SEQ ID NO: 42625 - DNA, 4472 bp, Cannabis sativa
  modified_base (4031)..(4034): a, c, t, g, unknown or other
tcacattaagaataactactatataagtatgtatatattgagattgacgtactttttattattaataacaatatacatatcatacgtttaccaatacactgacacacaatttacttttataaaacaaatcgttcaaataatcataccactttagttatcaaaatctaaaaaagaaaaaactcaaaaccttaaataaaacttacaatacgtggctcggcacgtaacttccacctagtatatatatatatatatgtatattttttcattcggataactctctcattgtgataagtttgcttattgcccgtggccaattaaatttcttagttctaataccaaaaggaccttaagatatgagaataaaaaggtgcttttgtttattcatgattacaatgcttaacaacttcctctagtcaagtgagctaccttcaaataacattagacttgaagtagatatcttgcttgaattggaagaaatcaaacactgacaaaatcctatatggtgccaaacttttaaagtatatatagtgtttacaacaacaacaaaaaaaaaaaaaaaagagtttggtcagcacttggtgttgaaaaaattatgaactttttgtttgagctggtcaaacaaggcatacttttcattgaacatgagaatatgtccaatagacataataaaggtaccgttagagttcctttcacatgcaattttaaatgaaaaattaattcacttggaattatgaattgatacaacataatgcaaaaatacaagaattttctttctataataagagagcctagaaattataatgtctgtaatcctatctactgtccaaatgttcagatgagttttgtctgatcccactacattgtgtacactgtgaaacttgtacaagaagaaataaaaggacagcagttcctaccaaatccaaaattcaaaacagctgcactaaggttgtcaacaaaatcaaattaaaaggggataaatggacactagaaacagaaaagttggttttaatccacaagtttacagtacagtttttcgaaagaagctcttacgaactattcacgcacacaaggaactacctcgtgaataagtgcttcccaaagatgacaattcttgtgaccactattgatccctccatcttggacttgagatgggaaaaaaccctgatggtgacaagggaaagacaaggccaggagagggtggaggttgaggacctggacccaaaatccctgtttgaccacccatagggctaaatgaaaaattaggggtcaagggtggaaattgcatccctggagagagcaatgggtagggagaacgcggcgacaacaaattgaagtaaccggttggggacgggagtaggaactgtgaagttggagaaggtaagagaggaggaccaccaaattgcggtgaagggaaattatacgcaggtggtggtggtagagggccactcattctcggggaagggaaagcatgaggcatggaggggttgggaagtagccctggttgctgtgtctgaggttgaccaggtggcggtggttgttgatgtggaggtggctgttgatgtggatgaggttgttgatgtggatggggcggaacaaagtttcccctaggagatgggtctaggaatgaattttgaagatatttcatgtatgctgtgatgggagattcagctgtattagcccaaactgcatccccaggtgtcaatggcatgtgaggtggttgctgtccaaattgagaaggcctattgttgtatgaaacagggggaggagcagccgacataggtacaggaggagggacaagagggggccgattgattggtgttaaagggggtggtcgaatcttttgcaaccgcatactttgtggttttggtggattatgaggaggtctaggcaaaggatcttgtgatggggaaccagtgagctgctggacaatgttgcgaaaatcattcttacttatgttgtaaacctgaggctgaggctgttgtctagtagcattgttattaaagttgggttggtgcagcggactcttccttatattcttccctaatttattcacacccaaatggtcattctgtctatttttggagttatccattttgagaaactcaactgaatctcacaacacaagtaaacaacttttatccattccagataaaatgcagcttttcattgggcaagacccctgacaaataatgaaaacaacataaataataaagaaaatcaaagaacaataactcataaatcaaacaacaatagattgattgacattaattttatgacactatatgcagtacaaacttcaataaaacgattttgcaccctgactttacacggtccaattcattatctggtttaccaataaccatccactgagtactggtaggttgagttcaagagcaaaagcgaaaaccttgtcttactaaacttttgcctaggcacaaatgctcaggcttctcattaaagccaccataacattatcataatgtgaaccctattttgatgcactgtaattatcctattttgaaacttcgaatttacacattcctctaacaataacatccaacctccacaaccatgatttagttgcttcctccaacaatctcctctaccccaaactaaaagctcacctcaacccccttgatctttcatactatatgttcttttttcaattgaataagacagtgaaaaataataaatgctaagtacaccagaagacccttacatcgaatatatgagatcgtttatgagatactcttggtaaagagcatatacatacatgtacactcactcaatttgataagttataacagaatcaccgctacaaatggtttctctctaaggtatgccaggaaaaacaaatgtattctttcgcataagggaaaaaaaaaagacaaaggcgatcggaacctgtcgagattcgtagtatcagcagattaataaatttgtattgtcacttcgcaatcatcttctcctacaaatttctttcaaaaatagaaattgggaagtcgagaaatattgggggaaatcaatattttaaaaaacagacagttcagaacttcttaggcagttaataattcttgcttacgatcattactagggttttaagaagttaattcttctcaacctaatgatgcaaattgcaaaccctaattcctcgtgtttgaacaaagtcaaccataattatacaaaaatttgaacataaaacttcactgaaaaatgataaaagtccataaactcataaacactatcctaaaaccaaagaagcagagcacaaaatcacaaaaatataaacaataaggcacagaaatgggaacaataaaatcaaatatgagttgttgagaattgataccggtgcccaaatatcgtagggtgccggactggcgtccgaaacgatcagatgagtccgttaagggatcgcgatcagagtggcgcttgagggatcgtcacagacagagctcttgaaaaagggtgaaaaggtgaaataaacacttctcagttctcagttctcagttctggagaagaagaagaagaagaagaaaaagaggttcgaatctgtgagatgagagcttgaagatgaagatgatgatgatgatgatgactgtaaaaagattaggccgagagagagagagagaaagagagagaaagtggtgcaccgaatgatggagagagtaaaattagggttctttcatttttgtaaatataacaatttaagttgtataatttacaatattaccaattttgatctgttgttatcagaaataacacaaatgtgttgtttttttggtcaaatattgaatattttttcttctttatagaaaggtcaaaacattgaattcaacactcaaattacattcatatttttgttttttattttaaaaaagtgagtggtggggtagtaattatatagatgaagaagaattggccaaacaaaatgctcatcatagagtagtctatacactataggtcctatataattagatccttctttcttgtttatcataatttttggaagattttttatttatttatttttnnnnaaaaaaaagaaaaaaaaaggaattaattgagttctaaaaataaaaatcactttctttgctttgacggaaaattaataggaagaagaagtaagatgtaatctaatggaataataacttgacttctcatatatatattctaatgttttataatgtgaactcatctcatgattgaatagtagctttgttttaggagtttagatctataatcagattttggtgatgatcaaattttaccaattgtgaaaattctgttatagattactttacttgttcattttggttgcttgatttagaaaaaaaaaaaaaaacaattttggtacacataactacaatttgacatgtggatcaactttcattttcaattttcactcaaccataaaataaatggaagatttatatgtacacattcaaaaatttataaagatacccaattttaat

SEQ ID NO: 42626 - DNA, 8821 bp, Cannabis sativa
ttaataataataatcctctcttctttttacctattgagtttgtgataatcttaaggcttgagaattctataggctatagccaatagagtaatcatatgttctttcttttcctggcaagaagtgaataagagaatcttggtgtaaaagataataaactagaaggaagtaggaaaagtgcctgaaattttgagaatgaaaggcattaaatttaatttattttttgtttgttagtcaagttttctttttgatgtgaatagtgaataccatgcattaacattgaaagttttctttgtgtttctcaatcatttctacagctcaaggaagatgaaatcttgattacgagtcttgcagactctttattggggtccatttcagaaatcacagtatcagtggcatccatagaggtagaacaggagaattttattcaaattggatgctacttttatcgagcttctatagccataatggaactaaaaacagctgagaattccccaccaaatgcagtagagattcttaaatcactatctgaaagcattagtttggctaaggatcttgttcagagactccaaaaaggcaaccaacctctttctatttctggttcggaactcagaagcatcatttcacagatagaggatttgatcaaaaccatgggagaagacttgagttcaataccatcttcagcatttatagatcaagaatatgcagaaattgcaattcaatctctttcaaatgagatgaggaactctcactttacaattcaatcctctgagaaaaccgagctagatacgcagttatcatctcccaaacaaaaaccaaaacaagaaccaataccaatagaaacagacctctactccatcaatgttgaagtttcaatggaaaatccttatttcttagaatccccaaatcttcttaaagttaaaagtagtggcagcaggtcaaaacaagaaagggttagcaaatccttagcaatgttgcctcatgtggctcaatacatggagcctctatatgatactttctactgtcctctaacaaagagagtcatggatgatccagtcaccattcagagtggagtaacctacgaaagaaaagcaattactgagtggtttgaaaagtttgaagcttcagctgaaattcaatgccccaccactggcaagaggttggttagtagagcttacaacccaaatattgctcttaggtccacaatagaggagtggaaggaaaggaatgaagctgcaaggattaaggtggccagggctgctttgtctttggctagttcagataatatggtatttgaagcaataaaagatatccatggtatctgtgaaaagaatccatacaataaggtacaggtttgcagtgctggaatgttgcctttgcttgttaagactctggagtacaaaaaccaagatgttagatgtgcagttttggaactcctaaggctattggtagacgatgaaatcgacagcaaggtactagctttatcagttttcatttacatgcttagaaccaaagttttatttaatatccttagttatttattctgtgttttgggcaggaaatggtagcagaggaattggatttttcagctctgataagaatgctgtcaagtagtttccagcctataaaacatgcatcgttgctgttgttgcttgagctttcgagatctgaatcattgtgtaacaaaataggtttagttactggatcaattctgatgttgatcacaattacatacaaatcttcagttgatgcctttgcttcagaaaaggcaggtgagaccttgaagaacttagagaggtcgccaaataacattaagcgtatggcagaaaatgggctattagaaccccttttgtataatcttgcagaaggtaatactcacaaatctaagtcacatgaaaatatcttctttgatacatttgatagaaatgttcaacaaaaatgtctgagaacctaacatgttatctaatattaagctggctattaaaaattttattcacaggcagtgaagagatgaagacagaaatggcaagctatctaggagaaattgttcttggacatgacagcagaacctatgcggctgagagggcttctcccactctcatcaaaatggttagaactggaaatgttctgtctcggagggctgccttcacagctttagcacaaatatctttgtaccaacctaatgccaaagcacttgctgaagctggaattgtacaaatcatggttgaagagatgttcactcggagaatccatgatgagctagtgaactcaaaaactgaagcagctgctatattggcgaatatattcgagtctgggcttgagcttgagactctacgagctaattctcatgggcacaccatgacttcagactattttgtgtacaacatcatctacatgctcaggaacagtaccccagatgagctaaacattaaccttattaggatactcttatgcctaacaaagagtcccaaatcaatgactgccattatctcagtggtcaaagagactgaagcaagctacattcttgttgagctcataaataatccatatgacaatcttgggattgcagcaatgaagttactcataactctttcacctcatataggtcatacactatctgaaagactctgcaaaacccgaggcctgccagaaaatcttatcttgagttcaaatgagatagctcgaatctccgaaaagcaggcaatttcagcgaaattcctagcgaaactgccccatcaaaacttgacactcaatctagctctacttttcaagaatacagtgcccataattctgcaaaccatcagccaaattcaaaaaggcggaacaagatcaagcaggcattccatctgttacttagaaggcctagtgggaactctagtaagattcacaacaacactgtatgatccacagatactctttctagccagagcccacaatttcacagcagtcttcactgaactcctagtgaaaacttcaagtgatgaagttcagaggctatcagctattgggttacagaatctctctttggaatcaataaatctgtccaaaccaccagaaattaagaaagcaaagctcacgaggctgttttctgcccccaagtttctaactcccagctcttctagaaggaagaaaatcacagtttgcccggttcaccgggggacctgctcttcagaaaacactttctgtctagttgatgccaaagcaattgagagattattggcttgtttggaccatgaaaatgcagaggtggttgaggctgcattgtcagctatatgtactttgttggatgacaaagtagacgtggagatgagtatgaacatactcaacggagccaatgccttacaacatgttttgaatgttgtgaaagagcataggcaagaggctttgtggcaaaaatcgttttggatgattgaaaagtttctaatgaatggaggagacaagtctgttacagatatatcccaggacaggttgttgccttcgacattagtcagtgcttttcatcatgggaatggcaatacaagggacatggctgagaaaattctaaggcatttgaataggatgcccaattccacttcatactatacaatgtaaaaatcatttttattttttatttattgtaaaatccaaggacatcttccaagtggtatgttacttgtaaaatagtgctgcacatatcaagttaagtttgaaaatgtgtgttaatttaaaataacaattttttgtgattgaattggtaagggaaagaaaatgattggtaactgcctcaaagtaggttaacagtttaaaattctagtcaaaacaaataaacaaggccaaaataaaaacatcaacgataaaaaggagtttcctcgtacaagttggctcccttgtaatgtagaaagtagtatataataatactagtaagttcgttggtttttattttaataaatttattagtttctctaaaaatgtcatgtattaatattaaactgcattataaatttttaaaaaaattattttaatgcaaataagtctctaatctcaaaattttgtatcaatagctccaagattaaaattctcgttagtctctaggtatttaattgaattgttctatttgtttgttttgtttttgtttttttttttaacactggagagggttattcgaatttgggaccttttctttgtgaggagaagtgtataaccactagacaatgtctatttctacttaactgcttcgtttgttgctccaaaatatcacatgttgatattttattggtcaaaatcataattttactttaaactaatttaaaataaataaatatatgaataaataatttttaaaattaattaattaatttttttaatcttttccattttttttctttctgcttcttcttctcgttcactccgagtccaacctgcgagctttgatctgctttactaaaactctccaagaggggccactaaaaaaactgtctaagtaaattttgaaccaaaaaagttgaggtcaaagaatcggccaccaaaacccgccgtccaccactacccatatctctctttctctaccgtatactccatcaatatctctcagtttcctagaaacataaagacaaaaaaaaaaatcatctctctccaagattccgatctcgatctcaatcccgatcacatcttttcttttttcttttgcttaattggttttttgaagactttattgcaatttttcaaaactaacgatttatctgcatcaaagtgaattttttgaaaacttatgccacaatttaatatcatcaacacgtgttatttttagaacaactaacaaacttacaggaatcgcgaacttgaggattatgaccgttatttttcgagaatagagagttatctacatcaaaataaatttagaactttaccgcaaattttccaaaattataatatataacaaaagcaggacttggccggcaatgacacaacaaaaatgatcaatttagcctgcaatccacctgctcacgacaaactcaaatctatccactttacttaatattttagtccaaagtttacttcttttttcttctttaattagtggcatctattttattatgttctcagtctggacactgtttgcagcttttggagtttagctcttatagactaatttacttaaccattataaattttcaaacttgatactcattgacaaaataaagattatgtggattggttggattgtaatgacagatacatatataatatttatatgaatatacaactgttacgtcattgatgttgccgaaaatatgtgtttgtttttgctcataagactcggtattttaaagatttcagggagtagaacaagtttgataagattgaactgttctctcctttcttccaaacatggcttcttttgcaattgatgaatttgttgggaatggaatcctcaaagaactgcttccaaagcttttggaagaaggctgggatgacgtgccgacgttgaagatcatgagcttagaagatatggacgcaataagcatgacacaacaggagaaggtcggttggtcatctatagattagaagtcaatttttctgttttctttttctaatcattcattctcagcagtgtcttttcattcactgtaggatgcactagaaatcaggacatatctacacgatcgttctctgatgcaatatgcagataagcttgagttatccaggacatgtcttccagagcttcttagtttaagtacatcagatcttttttcccagttcggtatgaagagaggacatatcgcccgtttcatggataaaactggtccatgtactgatcctaaaccccgatcacacgcactccctccaacaagaacaaacagcacagcctctagaaacaacagcatgaagagtcttgtgcaggtcaattctcaaaagctgagaagtttaaccagaccaatggctcgaaacagcagtaaacaactagaacaatctttggctgatttcaagattggagatggatacaccttcaaagggattgttgctgctgggccagctcagagtagagcatgtggttgtgtgaaacctcctcctgttgttgaacaagtggctccttactctactattgaaaacatctcagtgcaaaagttgactccagaatacaagattgggatggagcgtttagtgaaagcaaagtcacctccgatgaaggcatcggaattgtggagagataaaccagctgttctcctctgcattagacgtccagggtaaatcctataccaaaacatcaattacatgcacctggttttcgttttctgcatggtctccttttgtcaactttgcctctgctctgcaatacatttaccattactctaaacaaataatgtgagacaaaggtttcatcaactactatgctcataattaatacatcattattacacacacatacacaccaaaaaaaaaaaaaaacaaacaatgagaaaaagagagatgagatatggatttaagattgtgaataacagggtagtcaaagtttgagactttacttttcctgaagaatttgtatcccttgagcaataaactgattctagtttgtttctgaactctgttggatcgaaacaggtgcatcatgtgtagagctgaagctcaccaactatatgccaaaaaacccttattcgacgcactgggagttcaactatatgcagttcttcatgagtacatagagtcagaggtaattcagcattaatttcatgttccttgaattttcaagcaacatacagttgaatcactaatcaaatggtgcaggtaaaagacttctggccccgctactggggtggtgttgtagtccatgatcggaatatggaattcttcaaagctcttggtgggggggaactgctcaaagacaagttcatatcaggttttattttcaacccccgagccataacaaattacaggcgtgcaaaggctatggggataaagcaaaacttcaaaggagaaggtgaaatcaaaggtggactcttcatagtagggggtggaaggagcggtattgcataccagttcattgagaggaattttggtgattgggcaccttcggctgaaatcatagaaatctgtactcagctgcaggtaagtacttatggcatttcaattgtatcataaattgagttccattttgtaacttttacattaacataagcagcttttcttcactgaatgcagaatcctcatcaaggtcaagggagctcgaacaaatcatcatagcaataaacttgaagttaattgtttacattccaagaacttttcactcagattcacaaagcttaagcttcaatagactaatcagcttgatttgagaacattttagaattatttagatgtgttttcctccctcttcctttattctcttatgttctctcagactggatattctttatttttaatgtaatttctcctttttttgtaaaaacaaataactaagtattagtggtcttcaccaattccatcaccataacttgctcaaatgaattaaggacaaaaatgtagtataaattccaatcccattcccgcacaaatgtgtacacaacgctttggtggacatatcacaaagcataattaacatcttctgtttgagtgtgaagcatagccactttgtgcaggaaataagtacacatctctcagtggcttgctagtatcaatagattctgtccattaaagcttaattctacaccactcaccttcatgatcctcagccagctacagccaaaaaaaactgaaatcaacaaccagactgataatggctagtaaaatgtggttgataaaaattcacaaaactatccattccaaatcaactgggacgaccaaaagcctgttagtgcatcaacttattaactgagttccttgaaacatgattgctgcaaaatgatgataacgaatcaaatgaatttccacccttctcttgccatgctcctgatttttaaatatcctctcaccagaaatcaccacaggaacatttcccatctttaaataaatggaaccgaacagcatctcttacaagtatctctcttttggtgatcttagaaatatatttagtggcattgtgacaatcaccacaaactcgaaggtttttaactactcgtatgggaagacttgatggaataaatattagcccaaaagcaattgcaagcttctcactgtgatagttaagcatcttcatcttctcagactcctctacatcatggaaaacatagctcatatctggcacataaccttcctctatcatcttgtgatttagtttctccagctcataatatatttgatcagcatatgggctggaccagtcatctgctgagaaaatgtgtactttgcccttgtatttgatccaactacatcccggttcctttctcacctgcttgtctctcatatctcttctcaatttggctacatcatcccatttccctctagcagcatagatacttgaaagcaatacatagcttgcagggtgctgaggttctaattccagaagagactcagctgcccatttaccaatgtccatgttgtgatgatttcggcatgaactcaataaggtaacccaaccaattgcatcaggcttatgaggcattgtattaataaaggcttttgcttcttctaaccttccagctcggctgagaaggtcaatcatgcaagtgtagtgatcagaaattggtgttattacatgttctttcaccattgattcaaaatactgaagtcctttatccaccagtcctgctctgctgcaagcagaaaggaccccaatgaaagtaactccatctggtttaaaaccatgaaataacattttttcaaacaagtcaatagtttcattggcctttcc

SEQ ID NO: 42627 - DNA, 6703 bp, Cannabis sativa
aaaaagtactacataaaaatatgactaagtgtaaaaatttatatatctttccaactacgcatgtaaatgtatatagatgagtgcaaccctagagacaactacaaaaatgatttcccagctgtacaaaactttcttaaaaaatttcctaatttgtagtatcagaatcgggtttcgcagcagcagatcaggatcagaaaagaaactttctaaattgaaccaagatcacgaatttggacttcatatctaccaaataaagtttatttgatttcttctaataaaggcaaaaccgaaattatccattagaaaaaggaaatttcctaaaattagacaactttccataagagaattccttctcttacaagaagttttctaaaccaaaaagagaccagctaagaaataatctttccttagaagagaagagtaattaaatgcacaaaatcaatgtaataaaaataatttaatcaataaaaatacacattaattaaaaaaaaaaattgacaactaaattgcaaaaaaaaaaaaaggacctaacaaacatggtttaaactaaaatattaaaattattaaaaaaaaaaggggtttttatttttacacttcaagtcagttttttttgcatttttacggaattctacctagaaattcctattgcaatcagcgctgcaacctaaattgtaacaaaaaatcgtatagaaacctctattgcaagtagctctgcaaccacttttgaaacccaaaccgtaaatttgaaaaaaaaaaaagaagttaaaaaaatagtatatggagtaattcccaaaaaaaacttttttcatttttacaactaaaatattaaacacaatctaaataaataaaaataaaaattacatattagagcacagcacgtgattttcacgtgcatgctttttctgtaattgaaatattaaacacattgttaataagaaacttgtgccataaataaattgaacaaccctaattttgtctttcaaaatccaaaatccaagaaattgggcgagaataatgaggatcgctattctcaacgactccacattgaccgatttcatccaagacacggaatcgttcgacaatggcgtaacgaaatgcttcgaggccctcgacattgacggcgacggtgtgctctcgcggcaggagcttcgcgacggattcggcaaggctttgccgatcggaacagtggggaaggaaatggtggataatctgttcgatacggttattgggagattcgatgtggaaggaaagggcagcattggtcgagacgagttcaaatcgctctcgaaggagatgttgatggccatggctcgtgggattgggggtactccgattcttcttgcgattcatcaggatagcttgcttctcattgctgttgatcatgaaaaaagataaaagaaaagatttgatttttttcttagtttttacaaagaaaagatattaattggatctcactgcattgatatgctaactttgatacatttaattttttaacatatattgtaatacatttcataaaattgaaaaagaagaagattgtgatttgtttgtgtttttctttgaatgtagtttgtgatcaaacgaacaaagttttgggttttaataaaattgtgtctttgaagattttcatctatgatttgttgtttcgttataattatgttttgtttctaattttgaatacatgatttggtaggtgattattgtagacataacccattaatcagttgttaattttagaattaggattgtttgagaaatgtaaaagaagctcacaaattatctatgatctgatgatatggatatttggatcttggtgttgtttttcgaattctgtatctgaattgattagaactgtcgttttgagtagtttgtttaataatgattaggaacctcgtatgttaaattgattgaaatactgcagtttcattggtatagtaaaatctgtgtttttgagaaaagacaggttatcaagaaaaaacaaaatgggaaaaagacaaaatagataaaaataaataaattaaaagaaaaatagaaaaggactaaaatacagaataagtaagttattaaaacaccactcttttaagttattaagtttatagacttatagatggatagatatagaaactgaaatctcatcctcttggaagaaaatcaaaccacacaacatcacaaatctaaattcaataaacaaaaagaaaaagataggcaacggcagtgctgctaatgaccaggaaagctatttctcccccttcttttctaaatttaatgaaataaatgaataaagagtctcttagtttctggtcattttttttccttttgaaaatcagagtagtattcatataaatcttggataatcaggaattccacaactgggttctttattatctctgcaacaaatctaactgggatatgggatttgtggacaaacatgtgtttgttattaactaagccaagtttgtttttgttaatcccattcaaaacaaacaattcaaaatggccatgttgttggctccaccaccaccagtgtcatgctcataccagccacctttaactcacagaatcaattatcattctcctcaatcaaaccccaaaccaaaattagaagatgtgtcctttactttcactcaaaaaaccaatacaactcaccaccacccaccttggtttcaagagataaacaagctttgccaatctgggaaccttcccaaggctctgaatctccttaataaaagtagtgactctcaagacttttcagggtatcactctcggagggaggccataggggtcttgttgcaggcatgtggatattggaaagacatggaaactggaggcaaaatccatgaactggtttctgcatcaaccaggtttagaaatgacattgttctcaatacccgtcttgttaccatgtactccatgtgtggttctccattagattctcgtttggtttttgatagattacaggagaagaacttgtttgtgtggaatgcacttgttagtgcttacactaggaatcaactgtttgatgattcaatcaacttgtttgttgagttgatttcggagactgattttaaacctgattatttcacattcccttgtatgtttaaggcatgttctagtatttttgatgtggggttggggcaggtgtttcatgggatggcaataaaggtgggtttggtaatggatgtttttgtgggcaatgcattggttggtatgtacggaaaatgtgggtgtttagaggatgcagttcgagtgtttgaaaaaattcctaagaggaacttggtttcttggaattcaatgattcgtggattttccaataatggattatcttacgaatgttataatttattacgggagattttgggggaaggtttcttaccggacgatgctacaatagtgactttgttaccggtgtgtgctagcgagggaaatgtagatatggggatggtgattcatggtttggcagtgaagttggggctcaatgaggaaatgatggtgaaaaatgctttgatggacatgtattcgaaatgtggatacttatctgaagctatgatcttgtttgataagaacaataagaaaaatgtggtttcatggaattctatgattggaggtttctctagggaaggagatatatatggaacatttgatctattacaacgaatgcaagtggaagacaagaatgtgaggccgaatgagatcacgatattgaatgtgttaccagcttgtttagaggagaaagagctggaaagcttaaaggaaattcatggttattcagtccgacatgggtttcacgatgatgaaatggtagcaaatgcttttattgcagcctataccaaatgtggttgtttggattatgctcaacatatgttttatggtatacagaataagactgtgagctcttggaatgcactaattggtggctttgcacaaaatggtagtccaaagcaggccttagatttttacttcaaaatgaaaaatgcagggttggatcctgactggtttaccattggtagtcttattttagcttgtgcccatttaaagtttatgcattacgccaaacaaatccatggatttgttctacgtaatgggttagattgtgattcatttattggcatctctctaatgtctatttacattcaatgcaacaagatattatatgcacatgcattgttctctaggatggaagataaagatctagtatgctggaacactatgctaactggttacactcagcttgaactacctggcgaagctcttcatctttttcgacaaatgctttctaatggagttcggccatatgagattgcagtcacgagtgcctttgaggcttgttcgcaactgttagctttgcgtcttggaaaagaactacattgctttgccttaaaagctcacctcatggaagacatgtttgtcggttgttctatcttagatatctatgcaaagaatggctgcatggagcaagctcaaatggtctttgacagtttgagtgaaagagatgttgcatcatggaatgttttaattgcaggatatggaatcaatggacatggaagcaaggccttggagctatttgaagaaatgtatagattgtggttgaagcctgatagatttacatttattggagtcttaatggcttgtagtcatgctggaatggtcaaagaaggcatacaatatttcaatgagatgcaggatttgtatggaatagaaccgaagttagagcattatgcttgtgtagtggacatgttaggcagagctggccgaatagaagaagctctaaagctcacaagtgagatgcccgaggaggcagatgctagaatctggagctcgttgcttagctcctgtaggattcatggaaatttggagatgggaaccaaaattgcacagcgattgcttgaattggagcctgaaaaggcagagaactatgtcttggtatcgaatttgtatgctggatcaaggaaatgggatgatgctagaagagtgcgacaaaggatgaagaagattggcttgcagaaagatgctgggcgcagctggattgagctcggagggaaggtatacagcttctttgctggcgatgatatgctaccgagttctatggagattagggatatgtggaaaagattagaggaaaagataacgttgatcggatatgtaccgaatacaagctgtgtgcttcatgagctagaagaagaggagaagattgagaaattgagagggcatagtgagaagttggcaatttcttttggattattaaacacaagtaaagggtcaactataagagtatgcaagaatctcagaatttgtttagattgtcataatgcagcaaagttgatatcaaaagcatttgaaagggagatagtagtgagggacaacaagcgctttcatcatttcaaagatggcctttgttcttgttcagattattggtagagaaagttttgatggtcattttgtccacatattaggagataaagttggaatggagcaaaggggttggctcagaagtgttaggctgaggctaatcttcaagaattagaatttgagaagaataaaaaccatttgcagggactaagtagattttaagaaattgacaaattgatgggaaaaaaaaaacaataagatggggtgatccgatggcacatttggtataggtgttttaagagcttgataggaaggaatggaggtaatgctatagctgtttctcttgataatttgttattctttttatctcaccaatgatatagttacaagtagcttgattgatttggcaattatctccatataagaaatatttaattgctataattgtatgttttctttctttaaagtgtgtttgtatgtatatataacttatatttgtatcttagcataaaaacacattaatgtaaaaatggcccttctcacaatattgtttgaagtttaattccaattagacaatttgccatatacaaaccaactacaatatgtcaaatgctgcaaaattagttttgaaaattgttcagtttaggctttgcttgaaattcagaagaaaaaaaaagggttgtatgagaaaatattagagagaaaaattattagaatattaatttattacagtgagaaagatgtttttaattgatgatttgtggaagagtaatttccatctaaccttttttttccctgtgttttcttcaattgtagaaacacatccccctttgatgtatctttgttagctcgaagccaattatatagtaaggaattcatgttctgcccttgaattcagaaacaaaattgatcactttaaggttattcttcacaagatttatcaataatactttaaatttgtacgttgtattttgtgaaattaatcacaagagtttaaggaacataaaaataatattaatttgtggcataaatacctaagttttatgccgagtagcagataaataccgaagtcgtatttttagcggtaaaaatactttccgtatctagtgtggaacttccgtaggtacccggtcgttaagcagggccgaccctatgttaatttaggccttaggcaaaaataaaaattaggacccactgaaaatgtgaggttattgggatttcaactctcaacctcttagttgttaatccaatttaattatcactaggctacaacacatatttagcattaaaatttaatcctatgttaataaaaaaatccaacaaaagaagattcgttttgttaaacacaaaaacttaa

SEQ ID NO: 42628 - DNA, 3442 bp, Cannabis sativa
taatgcatcaaaattagtattttgtaaaataaggaaaaatattggggtgttacaagtccaggtcttgttcttcacaagggcaaaaaatttgatatccacggcacgtctccaatgaggaatttttaatgcaataagagcacaatcaggtgcaaaatcagcagccaagttgagaggtgatggagagaaggcatggaacacgcaaggtttgcaaatgccggctttagcctgagtaatcattgggtgggaggggcctgagggaagatacgttgtagtaggggaagtggggggtgaagtttgtggtcgaggatgagatgagtgagaaggcagaggagataagggtaatggaatatgtaagggcatggtggattcggatgaagtggatttggaagaggaggttgtgatggttggggtgcgaggagaataaagggatgctgtatgtcgtgagtttggaacaggagaagatgaagcaggttcttcttgaagggagggtgagtaaccaaccacgacatctgtcacagcaccagtagcagaatcggacgttacactaggaagatatgggagccattgaggatattgagtggaggtggctggttgatctgtatgggcagatggataagtgaaaccactggcaaaaggaaactcatcttcattgaaagagacactacttgcgacatagacacgacccagagagtggagacacagatagcctttgtgacttggactatatccaagaaagacgcatttggctgaccaaaactgcaatttgttagagttgtatggacagagatagggataacacgcacacccgaaggtcttgaggaacttatagttagtggagagactaaaaagtttctgcatatgacatttatattgtagaaccggtgtgggtaggtgattgattaggaaggtggctgtttggaaggcttcccaccagaagtgttgaggcatactagagtgtgctagaagtgttagaccagtctcgacaatgtgtcgatgtttacgctcagcttttccattttgttgatgagtgtgagggcaagggtttctgaatttaattcctatggacttgagctaaggctcaaactttcgatattctccaccccaatctgtttggacaattttgatagtggtgtttagttgtttttcaacttgagtttgaaagattttgaacgctggtaaggcctcatcttttgttttgagtggaaatatccatgtataacggctaaaatcatctatgaagtgtatgtagtagcgatagccatgtctagatatattgggggatggtctccatatatctgaatgaatgagttctagaggctgttttgattccctaaaggaatagggatatgctttgtgatgagctttaccaagttggcaactagagaaaaattgtaaagtagaaggtaaagattttttttcattaattagaacatgtttgagtacattaagggaaggatggcctagcctagaatgccacaatcttgactcattgacagacacttgaaaacaggactggacttactcaaaactagaacagacattggtattgttattggttgacgagacactggttggagtgtgacttgacgagcgtgctactggtgttgtgacttgatagagtctgttgctaaccttcccttgaagaagaaccttcttcgaatccatgtcctttaaaacacaagaatcagcataaaatttggcgtaagcattgttatctttggtgagctgggaaacacttaaaagattattagcaatatcaggcacacacagaatattgttaagtttgacagataactcttccttgatttcctctacctcggccgcgaccacgaccgcgaaagttggtggatctgccagaactggagggaacaaatggttttttgttgcgagcagtaaagtttgcagtgggattgggcaagatctgtgtttggagcagtgttggctctgaagaagatattgaacctctgatagagtaagttgatcagctcttgatgtaagattaatgaatacagagtcatactcagctctaagaccaccgagaatatagagtatgagatcgtcatcactgaaagtttgtccagcagagttgagactagctgctgtggccttcattttgaggatgtagtcgtgaatagacatggatcctttcttgagagactgaagttgatatctcaactggaggagacgtgctcgagattgagtggtaaacaggttctctaagagagaccaaagctcataggaaaaatgacaacgcaggacatgacctaacatagcctcagagatagagttgagcagccaacttaatattgcttggtcagttctaatccaaatagtgcataagggatttacctgcctctgtatttcttgattaggaacaggatgcatctcgacgaactgaggagggcatggtcttgtgccaaataggaaatcgtcgagatcgtgagcacacacagcaggaaccacctgtgaccgccagggtagttatctctgtcaaggcgaatggctataggagcaaggggctgatgcagaggcgccggtaacgctggtacagctgctggaatgggcgttgcgtggaccggagctggaggtggagcatcgacggccactggtctgtcgttgttgttgactgaagagtcaccttttgaagctgtagaagccattggctctgataccaagagaaaaagagtatagcatcaaaaacaaataaaagagagagaaattctttttctgtagagttttgtattgaatttttgaatggattgtacagtgtgtacaacagatatatatagtacaatgaccctaaagaatatcaggaataacaaggtatattctttcctattctaattggctacagaaaagagaatccaatgtaattggtaattctagaatgacctaatatcacctactgcgagctcataattacaaagtgataaacatgtgacaattcaatatttccaacaatatcactattggtccaactaaatatcaggtctcatatagtttaatataataacttttaaagagtatcaaaattcactagtcaattacaaagcgatatatctagaaggtactaagcaccactaatactcaataaaaatgctcttgtataatatatgctcaaagatacaaatttcccaaggttctactccaaggtcattctcttttgaaacaattatttcaactatgtactcaattatgacaatttccaaaagtaaagggaacctaacatataaattatctataattaaaacacaccctccaaaaagaaaaagaaaacgataaataaatgcaatttttgtgaaatttaggaaagaaaatgtggaaaaagtatgctttgttatgaaataatataaaataatataaagtagatgagaagaaagaagatgaagagagaaagagaaagtgaatgagaatttccgagttgtttattccaatggggtga

SEQ ID NO: 42629 - DNA, 2808 bp, Cannabis sativa
  modified_base (1637)..(1639): a, c, t, g, unknown or other
attatacaaaacataacttaaaaaattataaaaatgataataaaatactaaaaaaatacaaacacatattataaaatataaaatattattaaaaagatatcgaatatacaaacacttagagaaaatgtaaatgtgtatttatttaacttttcaatttaatttttatttaaacttattatatataatttatacttaatttaattatattaataaataaatatattaaaaaaattatatttttaataaaaattaaataaattatgttaaaacacaaattttaaagttgaaaaaaactataggaagcctttatagagtcaattatttcataaaaaccaattccatagttccctatggagtctgttatctcataaaaactgacattatagggacctcatagagtatgtttctataaaataatcgacattatagggtctctatagcgatgattatttaataccccttcagcattgtctaaaacaacataagtaatatattttgcaaaaattgacactaaaaattcataaaaactgtctttaaagcttaattttttagtagtggtggtctaaaaaaatattaatactattcaatacttataatatcattatgaatagaattacatataatatattacatattttttaatttaataataattattaaaaaataattaattattattgtacaataatattttacatgaaataaacagtaaaatattaaaccatggaacttcatattgtcattactccctaatagccatcctcataaatatattcttttcactttagtttttaaacaaatacctacttgggaagtgtggcattattttcttgacaaaatataagaattttgattggatttttcttttcttctttttagtattttatggtaacattacgataaagctgataaagacaataatcagaacagtactacagtgcatttgtaaagattagtaggtaatatataagaaacaactatacataatatagagtctagaatataataatgttttagagtggagaattgtcatgcaactttagtacttccttatattaaatgctaatttaagtttggtcaattttggtatctaatcaatttgaacctactctcgtccaagtatgcacatgcatgaaggagtggaaaaaaggtaataataataaggtattaagtcatatcttaagtaacaaattactattgtataattcaatatttagtctaatatattttaatttaataaataatataaaaaattactaactactcataacgcgctatattattatagtgttagacactttgagatatctaataaaaatattctaattttaataagggtaaatactattttggactctgtattttacaaaagttaccaattagatcctttattttgttaaatgacaaaatagatcctgtattttttaaaatagtacaaataggatcctgaactgattttttgtcaaaacaaaattaataataattcgatctgaaggtattatgacaaaactgtttatattttctgtatctgttcgtgttagaaattgtcttcaagttggttatattaaaaaaattgttaaaaattaagtttaggatcataattttactattttagaaaatacatggtctattttatnnnttaacaaaacagaaagtccaatcgataacttttgtaaaacacaaagtccaaaataatatttatcctattaataatattaatcatttatgcaaagttttgttataaagtttgatactataatcattttcttttatatggtagtgtgcttttagtttaattattttctttcatatgtagttcaagttgcaggtggttcaggtataaattaatacgcacaatgaacaatctatacaaaaagtagttaaaactgtatatcacaactggactaaccaattactatccatttgctccattatttggagaaatttataaatcatgtatacttgttattatttgacaattaaaataaataggtggagatacaactcgaagatagaaaaaaaagtaatactaagaaaacagtcacttgcacaatattaatatggataattaagggtaatcataaaatatacaataattcaattgcatgatttaattcaatatctaaagcactattataattgtggactttagaggcaatttttaaactctttcagtgtcaattttaacaaaatttgttaccgatgctaattcaaatgatgttgtaggactaaacataacggactccataaaagaatcccatgacgtcagttattattaaatagctgacgccataatatacactatagcatcagttatttaataagaatcgaaaacatatgtaataaaaaccgaaaccatataaaaaattgatgtcatagtatgtaaaaatcaatttattttttttagttttaaaacatgaaaaaaaatcatatttttagaaatgccaataattttctttaataacagtaaagaaaaatagaaataatagtgcaaagtttaaaacttgacacaagagatttgtacgtggtatcagtgttctttcaaacactgctagttcacggggccacgcctaaagaatgaaatcaatttgtaaagtatcaaagattattacaaaagcaattgacttaaaacaaatttagactccctctaatgatttgccacaaccttttgtaattcaccttgctaatttgatatctcaaacacaccaagtagtgaactctcttcatctattgatgtgtgcttacttcttcttgaagtaaggcttaaacaaatcttctccccaagatatatgtgttggaaattatttt

SEQ ID NO: 42630 - DNA, 4451 bp, Cannabis sativa
agtggcaacattttatgtatctttatcaaatttgtttttgtcattttattccttgtaaaataaataaagtggcccacaaaacttaatcttcagaatgatttttcgttactaaccagtgattgtattagtcactgtattgttcatcttattaaagaagaccattaagcttggttaataaactatccattttcaaaaaaatatgctaaatgctcttgttaaataccctcaaagtaaaaaactcactaaaaatatttgttatgctaaatactttaagaaaattctatcatatgtactgatacacccttatttcagtatccagaaaaaaaatttagtctaattttttttttttttcatattcatatacgttatagctatttaagataatctacaaaattttaagaaatttcgaataatttataatatagaaaataatgttcaaatagtttattttacacgcgtataaaataaaataatcacgtgtacaatacactatttgaacgtaattttcagcgtattaaactttttaaaatttcttacaattttgcaggatgtacaaaatcatgagaaaaaatttaacttaaaattattttgggtgctaaaacagataaatgtgcattaatgtatcaattttaagtgggtacattgtagaattttctaaaataattaacttgaattattattattattatttaaaggaatttgttttattgaaaagggaaactttagaaacatttaatattttcttaaaatatatattttaaattataaagtaatatatattgcattaaattcaaccaattatgcctataaggttgctggaatttatatcgccgaatatggaccgaattctaacgagaacattaggccaaaataaaaaattaataataataaaatttccttaaaagttcattccgccattgccgatttctcaagttcaatcaaccgtacaagtgtctgtttcaaccttctcttccgcaataaaggtccatttccttctctccttcacacactcagctgttaatctctatttccgttctcgcctcataatctcatattttttttttgtttaatttttattttaaaaaaacttctcctaatttgagttctcaagctttgatactaggacgtgggttgttgataaaaatggttaatgagaaatgggtcgtactgggtttggtttaaagatggtgaatttgtctagtatggaagatggtcgggttttgaactcaggtggtggttcattccctgacgtctttcacttcgaatgccgattacatccgaaatcggcattcggttctttcagcatttcctccaaagctttgtacaatcgccatcttcgttgtttgttacttcccaacctcaacaaacgaatgctttgatctttcaatagaggggaaaaaagaaagaaaaaattaaaaagaaaaaaaataaaataatggaacgtacgtaaaatatcatttattgtcttcttctttttgggtgtgtgtgtgtttttcttttcttttccttttgtgggagtttttggtttcttagcaggaaatgaatacagggtttggtttggcgttacaagcaagtaatggaacgtttggaataatggggactccagatgtagaggctggttttatagagaaagatcccaccaatcgatatagtcgggtaaatgcatcattataatttctatcgtgttcattataccagtagattatggttttggcattctaatgatttcatgtagaaatatgtaagtcgatattaacagagcaaaatgtgcattgttgtttcttgtccattctctattttgttcatcgttttatagtgttataccattcaaaatgtgcatgattttgtcacgtgaattgctcttaactgctggtttttctatcatggttgtttgtttttataaatctaagtagaatgaggaaaaggtgatagttcatttctctgcatctagaaatcttgttttgttttgtttgttttttctgtagttgattttttatttgctttttgtttgtttgttcttaaattggtcacagtacaatgaaatattggggaagggcgcctttaagaccgtgtacgctccaacactttcttccttttgttttttccatgtttttttctttactattgcttggccactaggatttctagctagaaattgttagtgaatttcaataataatggtcttgcttcgttccttatttgactgtacagctataaggcatttgatgaagttgatggaatagaagtggcttggaatcaagtgaagattaatgatgttttgcggtcacctgaggatttggagaagctgtactctgaagttcatctcttgaaatcactgaaacatgagaatatcatcaagttatatcattcctgggtggatgacgaacacaaaactattaacatgattactgagcttttcacatctgggaatctaagacagtatgttcttctgattctttgtcattcttgttgatgttttggctgcaattactgtttgaaattgaaatttgggtaccacttctcggttttcagataccgcaagattcacaaaaacatcgatgtgaaggctataaagaactgggctagacaaatactccgtggtttggtgtatcttcatagccataacccacctattattcacagggacttaaaatgtgacaatatatttgttaatggtaatcatggtgaagttaaaattggcgatcttggattggcaattgtcttgcagcagcctactgctcaaagtgtcattggtaactctaacaacctttctcctgtctttggatgcctaaacttatcgatgatgtgctaagtttgtcctcctttactttaggaactcctgaatttatggctcctgagctctatgaagagaaatataatgaacttgtcgacatatactcttttgggatgtgcatgttagagatggtaacttgtgactatccatatagtgaatgcaaaaatccagctcaaatctataagaaggttaccacagtaagtttaaccattatcagctagcttttatctcctagcatgtggccatatactaatgatttgatattgttataatattatatacagggcattaagcctgctgctcttcgcaaggtgagtgatccccaaatcaaggattttgttgagaagtgcatagttccagctgctgagagattttctgcaaaggagcttctcaaggatccattccttcaagttgaaaatccaaaggaattaacccgtgatccagtactgctaacctataaaagtttcaaaggattaaacttaaaatctggtccttcgacgatggacatagatcctgattataagcagcattatgaaagcaccggcacagagagcaacttgagtagccctgaaagttcagtcttggagttcctaagaacaaatacaaggcatgaatttaggttgagaggaaagttaaatgatgacaactcagtatcattgaccttgcgtatatctgatttttccggtaagaggcaaattttagagagtaaatggtgccagaagtgggcataggcatgtgcaattttgactgtttttcctgtcttatgattgttacaggtcgagttaggaatatacattttctcttttacctcaacactgatacggcaatttcagttgcgggtgaaatggttgaacaacttgagttagcagatcataatgtggctttcattgccgagttgattgatgacttgatactcaagcttgtacctggttggaagccttcctttaataatccctcgtctgggccaataggttccaatggaattattgaaggtaatctactcagtaacctgtatgcagaaattcccagttgtgcaaagcctaatctcataatgtggtttattttgtagatcaaccttcaatagtatcagttgcttccaaggtactggatgaagatgcttcaacaagtgatgttaaaatagatgagttggctaactgcaataacaatggatgctgtgaaggcttaggttggtgtggctcagaattagaacacccggattcatattctggtgacaataaattgcaaggagataccaccggtgctggcatctttgtcccagttaacaaacatatgaagaacttggagttacagttgccagctctattatgtagatctcattctaaaggctcaacaagcagctgtaaatcaatatgcttagcagataaaggtccagatgttgagcttcagatggaattagcttccattgaggaacaatatgaacagtggtttcaagagctttctaagatgaaggaggaagcattggaggagactagaaaaagatgggcagaaaagaagaggctggcgggtcatcagttgggggcatgttgaaatcctctctcccattacatacatcccataattgtgcatattcttgttctctctcgttttgggattttttgtttctttttaattccctccttcactaatctatgtttaa

SEQ ID NO: 42631 - DNA, 1150 bp, Cannabis sativa
tagcttttagggagtatcgctagccaatcgcaacgcgacatgtcgagaaagtgctagggtctactggtgctttataacaatactcgtataattaagtatcaagttctatataatttaatgtaataaattttaaaaaatattactaactagttatacagtatcatcactactaatattaattactaataagaatactcatttaataattataattaatgaaaagaaagattaataaagagtttgtagtgcatgaaacgtttttttattaattaatgagtataggtatgcacacattcggcctacattttatagacaattgttattaggtacgtgtgtgtatctaacactaatataaatcacatgttatagttaattatattatttagcattatgagtacaatattaaaaaaaaattaaataatttatattattaataataaggtttaaattttagttgaatgtgtaatttttgtttttttatatatggtaagtaattatttttattttattatgccgaaatagataggagtctgtcgagatgtgttgtagatttattgaatattatttgatgtgattaaacttttaaaattttttgtagtagatctcttaaaatgttgttttggtatattcttatttgtttcggtattcatatagttttttagtctacctttttttataattatacatgttgtagctatttaagattacttgtaaattttttaaaaattttaaataaatttatagtaccgaaaataatttttatatagatatgtaccacgcctaaaaaaaaaaagtctatcaaaacaatttgtaagagcatttctaatggagatacaaataagtgatgtaaatacaaaatattacttactttgttaaaaatctactctaatagtaattataatgtaaaaatctcaaataattaaaagtgatttaaatttgcatcacaatataacatgatgtaaaattttattatgttttatatttatttttatgttatttttaatattttattattaaattttagctaacatactctcttatattaaatttgtattataattatattattattaaattttacatctcaggatcaaacttaaaattattggggaactcaaaatgaaccaacctcgtgattcgtgaagagtgg

SEQ ID NO: 42632 - DNA, 5091 bp, Cannabis sativa
ggatctttataggattatgttaaaaatatgttggtcaaattcagattctgtcgaaaaatgtacaatttttcaaaatagaagatctatcgtaatatttaactaagtacatggacccaaattggtgtacaaaatataattatttaatatgttcattaatcatgtagtgttcaaaatcaaatactcaaaacactcacaaattgccatatctaaacctaacaaaagaacaactttactgaacatggctcaatccatggagggcctaaaatcaaactttgttaaaaaccaacccctatgattgttcaccctttaccagaaattgatgtgcaacttcataaaaaggtatatgaatatagatctacatttatggccacgcaattcaatggtacaattcttatatacgtggctgataatgcacattaattaaggtgttccctacctataatttcatctggttattctctgtgacatttcaatcatgcaacagttagatttatcagagaagaatgaaattaaatgagcactctcaccaaacctctcttgaatatttttccatattaaccacacactcacttctcacacatttatttagaccctctatactatataccccctaaattaatctttatcctaatggagttttctaaaacaaaatgaggtggtcacaccttttgtagcattataattactagtttttcctttaaacaaagattaagtttagaagaccaaccatttatattatcaccccagaacgtaggtagtcatctatcttgactacgtaagacaacacaaatctaagaccacatgacaataaaagagtttggagtatcttaccatctgcacctgaattatttagtcaatggtttaaaaaggacataacaaaacatgcctccagcaagagaccaatcatgatgaagaagactatgactcatccaccaagctcggggaaagatttcgatgagaatgatcaagttcgtgagcagagaatagtcctgccctccaagttcatcaccaatatcagtgatggtttggaaagaaaggaaccctcctggtacacagcctaagattgtgtttcatttcttatagtgcagaatttacctgtaattcttgtgttctttactgcacctcatcactattgtgttccctttcaggtttatcacttctcagattccaacagacttctccattcaagttgaagaaaccacctttaatgctcataaggtaactagaacaaggcaatacatgctttctttgtagcactgcatgttacacaaaattatagcagcagcaaagccataataattgtaaacagtgaaaaacaagaaataaacaagaacgatcgcaaaagatttagtcaacatttatattttcatatagtctaagaggctgtctaattgagtccacattttgcacttagaattaataaaataaaaaatataaaataaataactaagactctgcattacaaacctgttatgctgcagataccacagagccctgatcacaaaagttttcaaattgatgctttccacaagttgcatactaatgactaatgacttagtgatgacatagggtggatctagcggcatgtctttatatgattaattttcataaatagtatggtttccatttatttcaaaacaacttaataaaacagccatatcatacatgggctgactaaaatgcacataggtcttccacatattgtcttaagttttatgaaaaacagatacctaatacgagtcttcacgtgtaacagtatccattggtagcaaaatgtggctacttcagtcgggttgatattcagcagcaaccaaactcgagttttaactgcgacatcaaactcgaaaattttccaggtggatcggagacctttgaaacaattctgaagttctgttatggtttcccgattgattttagctcgaagaacatagctccactaagatgtgctgcagagtacctagacatgactgaggaacttgatgatggaaatctagttaccaagactgaagcattcctaacatttgtagtcctttcttcatggaaagataccattactgtaatcaaatcttgtgaagatctatctccatgggttgagaatctacaaattgttagaagatgctgtgattcaattgcttggaaggcatcaagagaaaacacaccagcaaattcaagtaacacagaaggctggtggtttgatgagattgctatcctgagaatcgatcattttatgaggattatgacgacaatcaaagcaaaaggttcaagccctgagatcataggcaagtgtatcatgcactatgcacgtcgatggttgacaggaatggatgaggagttagaaggaataagaggatatgggcatggaaagagtgatctgcagttcagtattttgagccggagagaagaggaaggggaagagggtattgcacatggcaagaggcaaaaaatgataatcgaaaacctagttagcttacttcctcctcaacatgaagctgtttcctgtaagttcttgctgcaaatgttaaagatagccaatgtgtactctgtaacaccagccttaatttctgagctagaaaaaagagtggggatgctgttggaagacgctaatgcaaacgatcttcttattcctagatacaaaaatgcagatcagacatcactaatgaagtacgtatttaccttctctaattgacttgtgttgacttaatactccaaaattagaaaagttctgaaggttgcatgataatgatcaactcaccactttgcacctcttgttaataattaatgttaattaaaacagttcctctgaagatcacaccatgtatgacactgatttggtacgacggatcgtggaatatttcttgatgcaagaacagcaacagttacacctacatctacagagaacagagaatatcagtgtaagtaagctgttggacaactacctagcagagattgcccgagatccaaatctctcaataaccaagtttcaagttctagccgagctacttccagaaaacgcacgagcatgtcatgatggcctttatagagccattgacatctacctcaaggttacttctaccttctcattatcacagcttctgttttttcctgggaagtttgggcaaagataactttcacaaaacacttattaaacttaacaaagtataatattctttccagactcatccttcactacctgagcatgacagaagaaggctatgcaaaataatgaactgcaacaaactatcactcgacgcatgcacccatgcggcacaaaatgaccgcctgcctctcaggaccgttgtccaggtaagcttttccaacaagtaaatataattttcaccttctcaattatgtcaacgtctgtgccccttgagagttctgccatggttttaaccaagcttggtgccaactattttgaagcatatgaaagtaaaaacacatgacaataggacctagtctctcttatattactctttatttttcgcccccccaaaaaaaaattctcttatatttacttgcatagagcttaagattcaggaaccagctacctgcctaatagaatagagagtccagcaagaagccattttcatacagatcaactaaaagagcacaggtaaaacaagaaattttcatgttattgatagcaaataatcagtgccacaatccaataactataaactatcaaatgatacctactacatattattcctggaaattgaaatattaatgttcatgacctactacaaaatgaaatacaacactaccttcttctttaaatacatactcagagccagttggtttccctccttgtgacaaaaatcagagcacaataaacattgtataaaacattcggggtgaaattgataatgaattaaaataaccaatataactaaaataagtaataaatgaatcaccagaaactatgatgaaatcacaatgacataaaataaaataaaaagataataataatgaacagggaaaaagcagttccctcagaaaattcccataaactgcatacacagcattgtaagccagtccttaaagatatcacaaaaaacatatggtaaagaaaacttgtcaaataggcagacccatcctaaataaaataaaacttgcagagttcgctaagtacgttaattcccaaaagatgtaaaaacaccagaaacaaagtcgttttcctggtgataaccgtcttttatccatttaattgcatttctaaccgcaggaagaaatatgtgcaggttctattctctgaacaagtaaaaatgaggacaacaatacaagaaaaagatccatcgccaagtgacaatatttctgaacaagagggaaaccagcccacaaccgagatggaaatcaagacccttaaagtagagcttgagaacataaagagaaagatgtcagagctgcagagtgactactctgagctgcaacaagagtatgataaggtaggccacaagcaaatacatgcacctcgctggagcttaggttggcgaaagatcaagacttcttttcatacaaaaatggaaggtgatgggagtggagaagaaccagaagaaggtaaacaaagacctaattcagtgcgctacaaaatcagctctaaacgcagatcatccattgcataaattatctggacatcatatatcttgcagtaaaaaggccagtcttcaagataatcatttatatattttgttttcttatttggttagtttgattgcataaatttttccattttcttatttgttgtttgagagcaagctgatctgtaattcgccttgactgaatatagtatttcaatggaagcacaatatgtgatatcaacatattacaattactcaaagaagcacaactcctaggttcagtagaaacaagactaagaatttaccagcataaagatactattaagtgagtggaaataattgaggagagattaatcactaatagcttacaacattaactagaaggaaaaaaaaaagcctctttgagacttcttttagaaactatttttgagagtgtttgaactttgaaggaatcaataaagtggtttattacttgaacatttcatattcgatcaatttcctatttgtcattgttcaa

SEQ ID NO: 42633 - DNA, 5391 bp, Cannabis sativa
tttggatgatttttttttttttacttttagattttatcttatcatatctaatctgattccaagaaaagaagtgtggcaattggtagtaaagggatgtaatattctcttacaaagcatatcctaaacttcaacctctttttgactaatttctgttgtgatgtcaaataccaacagacccgacccgtcacccgctcgtgacttggattgggcttgtacggaataggccaatggcccatataggatctgagcccaaagataagaagaatgaagttaaaaaagccaagcccaactcaaagcccaatcctaagaattttcacagagagaagatagatagagagagagagagagaaacccatcttgacatctccattctcctccttcaacaatctctacatataataaccccactgagttggtttcctccacgcaaagagaaactcactgagttgagttgtgttgttctaacccacaaggtaccccaaatgctcttcttcttcattcctttggataactaattgattatatagtaagactcctataccatattattattattattattattattatttattacaaagaattatttttaattttcttttctcatttattattattttttttcatctaatttggtgtttgcccacctatattacttcccatgtgcccacaataaagccctttacttcttgctctaaatccttttaccattgttgattgttcgattctcaatcttttcttgttcttggagctcttgccgattgatcggactcgtttcccaaacaacaatcgctttctgggtattttattattttttattttattttaatttattgccactgctcaaaaatgggttgattttattatttactttatttctttgatttgctttactttttgcttaacacattataatttgggggttttgtttttctttcattttaaagtgccttttttgtgtgttcttgtaacttagcatagattcttagttcagatttattcttctggttggattttttatgtcggttttttaatactaaattactgatttttaattgcttaattagctggattctttatttattgtttctttctgatgtgggttttagctaatgtttgtttaagatttgtgctattgctattaacataatttatctttgttgcttgctttctttgattgaatatgtacttgtgtgtatgagtatttacctatatgtatccaaattggtctgctctttatgttagttatcactaatgttaatgaattgtgtaagtttctaggttacatgtgtaaattgattgttaattcatgtactgatgatgtacattatgcttcatagagtgcatatcattcatctgagtagcagttgtttctcatgatttggaatttgaataggtttttgtgggataggtttagttgactccagaattaggaatttcaggtgctgaaagtgcacccaagtttgtcatttgataatctgcctataactggttttgattgcaacttctctaaaagattttgttaattgcatgaattaatctttatgagttctgtgtcatggcgcgtgcatgagttttttctttcacaaatttgttcatacaggaatgtttgttgtctttgtgtctgttggtttggataatcaagtcaggttttcatttatatatatgtatatacggttttgcttgttgaaagaagatcgtagaaaaatcaagatgttttggtcattgttcatgctacttcttcgtagtcctccctgaaaagctgggaactttatgatcattgcaatcttatattttttttcagggtgtcttcctcttctcatttcatagacatttctgaaatatcatccttccagccctcctgtttctacccatttagtaatatatgggctgaggggcacatttcatgggaggtgtagaggatgaagaaccagcgacaaaacgcatgaaattatcctctggagaactgagaggtctttccaacggtacatctcttattgaccctgtagctggctcttcaagagacttgatggctcggcccctaccatccgcaggggacgatgaggttgttggctccaaaggtgtcattaagagggtggaatttgtccgaataatagccaaggcattatattcgcttggttacaagaaaagtggtgctcacttagaggaagagtctggaatatctgtgcattctgctgttgttaatctgtttatgcagcaagtccttgatggaaattggaatgaaagtgtgaatacattgcacaaaattagggaactggacgaaaaaatcattaaatcagcctcctttctgattctggagcaaaagtttcttgaacttttgaaggaggacaaactcatggatgcattgaagacattaaggactgagattacacctctttgcattaatggtcctagagtacatgaactctcttcgtgcttagttgctccttcacttttgggttctcgtgctcaagataatgttaggctcaagtctcgaacaaagcttctggaggaattgcaggaactgcttcccccaacaattatgatacctgaaaggcgattggaacatcttgttgaacaggctcttgttttgcaaaaagatgcttgcttttttcacaattcagtgaatgaacaaatgtcactgtatactgatcataggtgtgggagcgagcaaattccttctcgaacactacaggttagatattttactgattttggattgttatctctgtacctacaaacatctagtgtttgtaaatgttggttttagtgtttggtctaaaatctaatgctgtcttgaacttttaagcggggaactactaagagcaaataagattcaagacttcacaagattgcacttaaatatttgaatgtattatctaagctgacctactcccctcaccctctacccaaattgctctctgttgaaatatatttaatttaccttttgttcaattcccttctctttttggtacaaacatgtttagtggctttcagatactttgtcatgtttctgttaataattttgtttcatttcagttattcttccatgtataaagttcggaattttgttaagtatcactagaatagtgagttcagatatcatatgctgcttccgctcatacagatattacaagcccacagtgatgaagtgtggttcctacaattttcacataatgggaaatacttggcctcgtcatcaaatgatcgatctgccatcatttgggaggtaagagagtcagtataaaacatcttgcaaccaacttcctctttccttctagtgtcgttttttcttctttgccattgattagaacattgagtgtatcattttgatcactcggaaaaaatgctattaatgacatcatacagatatgttcataaagttagggaagtgaaaaactattgcttgaaagaactcccataatgatttttttctctcataataggatttatagtgatttcgattcagtgaataaattgctaaaggtatgtgattattttggttgcttcatcagtagtttgtaattcttatatgatacattatatatacagtttatataaatctgattttgaaagcttaaacatctacttatggattaagtttagatctttatatttcttttcaggttgatgcaaatggtgcactttcattgaagcataaattgtgtggtcaccagaaacctgtgtcttcagtatcatggagccctgataaccgtcagctgctcacatgtggtgtggaggaagctgtcaggcgttgggatgctgcttctggcgaatgcctccatgtttatgaaaaacctggtcttggcctagtgtcttgtggatggtttccggatggaaagtggatattctctggtgtcaatgacaagagtatctgcatgtggggattagatgggaaggagctggagtgttggaaaggccaaagaactctaaggatctctgatctggaaataactagtgatgggaaacaggttattagtatttgtagagaaaatgcaatattactgctcgacagggaggctaaggttgagagatggattgaagaagatcaaacaataacctcgttttcgttatcaaaggacaataaacatttgctggttaatcttctgaaccaagaaatccatctttggaatatacaaggagatgttaaacttgttgccaagtatacaggtcacaaacgcagtcggtttgttattaggtcttgttttggtggaatcgaccaagcttttattgctagtggtagtgaggattcacaggtagtcaatcggttctccttatctttctgtgtcgaaattgcctacttatatatatttgtccttttaagcctgagcaaactattgcacccatgaatcaactcgtttgtatacattttcttgtcaagtattcaagggccaagtcaccttggctattaggctttctgtaacccttttctctgagagcagcagttctttctagctgcatcagaatcagccatctatgttaattactttcttaaatcacagacaacaatacaatgctgaactttaatattaaagattatttggtcacatgctaataagattgctcttgcaggtttatatctggcacagattaacaggagagctcatagaggcgttaccaggtcattcaggcgccgtaaactgtgtaagttggaatcctgtaaatcctcacatgctagcctcggccagcgacgatcgcacgatccggatatggggtggtttaaacactcaaaatgtcaagtgtggtggttgtgatggcggtacactcagcaacagcaacggcgtccattatagcaacggaaaagcttgaattgaagtctgatcaaagcatatatctggttactatttctttctctgaccattgctttcttcattttatgtaaatacttttatcatttgtcaaaagaaaaaactgaaaatcagacattcatatcaaacaagcttgtggggctgtgtagcaattttatgataataagtttttttcttttatttttctttcgagtaatttacggtataaatacgtaagtttaactctctgttacacataaatatttaagtttaattttttacgataataacatataaatttatttttgaaactttcataagtacgtggcggttgagaagttattattcacaaatcatttttttataagtatatttaaataaaaaaaaatttgatgacttaaattaattagggattgaaaatttcttattattgataatatctgatttttttcatatttataattataaaaggaaaaatataaataattttccatttagcttctatgaattctagtattcaccaatgtatctcaaatatgtcactaattttcaagggaaaaaggctttaagtatcagggtaaccaaggcaacccaaacttgggag

SEQ ID NO: 42634 - DNA, 2543 bp, Cannabis sativa
ttttatttaaaattgatttaagtatctcaaaaaagggaaccaaataaattaatcattgaaagcaacctattaatgtttctcgtagatgcatttgcatatatatatttttcttaaaatttatgatgataaaatattccattaataaattaataattgtggaagcgtgatagtttcgtaagtaacgtgaagtgaggtgtcactgtccaattttaatggcaatcgggtttattagattagattatagtctttctaatctttttcatgttctataataaaaaggtgtatatatagccaccacattggctgcggaccagaccagttagtctacataggctgctatgcatatgctatcttcatcatatattcatatataaatttataaccaatattattggtaactcaaaattttgaaatttattttattttgttaggagaattaatagtcgaagagtatacaatgctctttttttcttgactatcatacctcttaactggaatattgaatagtgattggaattctaggcttgaccacgtataaatatctatataataaagggttaacaaaacgtgtaatacgtaaattccaataatattgttattttaggagaaaaagctccaaaaactcacatgaacaagtaggacttgaaaatgacaatttggtttatgattgtaaatacaccaaaaatatcttctcattaagaaaaaaaaaataaacaaataaatgaggaaaatgaattcctcatatggtcaaataataaaatagacaagaaatttttaatttataattataaatattgagcttattatattgaagaggtccacccaaaaaggtacactccttcccttcacattaaataaaatgaattaaatggatttttttttcttgttgaaataaatgagatattatttacaagtcaaatattctatcgtcacacaaaaggcagcgcgacaaattcgtacaaaattacacatttaccctcaaagtctcttctgtcttctcgagtcaaactctccactttttagtaatttactaatgtccccgactcagtgagtcacatccttgcctcgctcaatatccaactcgttcacggcgctgtaaccggtcggagtaccactccccgacggagacatcatcccacttcctcttttatctctactgagaatcctcttaaacgataacatccgactcatcggagacctaaacgacgacgtttgacccgacggcgaggtataactagattcctcttctattctcccaaagctctcgttccttctcggaacttcaatagacacacccacaagctcaaacggctttctccgagccccaaacgacgatgaacccatcgcagaagaagaagaagaagacgtacggtcgcattccgagcataacccggaattgcttccgtgacccgattcgattcgggccggttcagcaacgcatacttcggtcaggatctcaagctccgggttcggacccggttcaactggagatctgcagaggggacaggtggagtgggagtggaaccacatgtcgatgcattcggtgtggaagttgtggttgcatttgggtaaccggcgacccatttcgttctcttcgaattcagacaagcacacggcgcattccatggcggtgttgggatccgaatcgggttgggttttggatgagaagacaaaaataggaagcgaattaagaacagccgggtctaacccacgcgtggcggcggcagtggctgaggtagttgtgtccatgtgaaatactaggtgattacggcggttccgattccggcgctggttacgacggcgggcacggaggaggtaccaacgtgcgtagagatgaagacataccatgagaattacaacgaagaacaagatgactatggcgctaagcataatcttaccactgagagcgtaattcttgtcgtttggagtagtgaagtttgtggggtcacccatgaagaggttatcgttgctggtcatgatgggtttcggtgtgtctgtaaattccgatggaaatggaggtgggagtgggaggtggtgagtggggaaagacattggataaaagttttgatttttaaagtaaaggatttggaagagaaatgaatacaaaattgttaattaattaattaaaatgaataaataaaaggaaaggagggagtgaagattgattagagtagtagagagggaaggttctgggaaaggtgtggagagtggaattgagtttcatttgaattaatataaattgtaataaccaaacatatttctttctataaaggcttcgcagtccaaaaccgggtcgccaacgttgacgcggaattatttttgtccaattacttacttgccctttactccttaacgtcttgttatcagcactcgtatcattttctcaataaaatccttcctaataactcacactgtaattaacctcgcttttttatattttattatattagcttcactacattttctttatatcatttaaaaaagggttttttttttttttagttttaactaaaaaaaactaataatattataaaaatactttc

SEQ ID NO: 42635 - DNA, 2436 bp, Cannabis sativa
  modified_base (33)..(51): a, c, t, g, unknown or other
tccacaaataaattaattcacaaataataatannnnnnnnnnnnnnnnnnntaattgccttttctaatcatattactagagcggtcattacaaggagtgtgcttatttttttttcttattactttttaaattttttcaactttttttttcacaccaacttttcattataccccatcgcgaaccatacccaatcaatcaataaaaaacgtatagcattattcaagagaatggaatattaaaagaggttcaattaggcttaaatgggcttcaaataaataaaattgttaattttaagctcaaaaagacaagttaagaattaacataacaaaagttggcttaacaagctcaattattctaaagaatgcctatattatattcctaagcacgtgtcttctaggatttcattttaaatacaaaacaacctagttctaagataattaccttttcatttcataataatttttttcttcaaaaaattcaacaagaataaaaactttcaaaaataaggaatttattcgaaaatcatgattaggctatcaaatatttacccaaactcatttgaacgaaataaaaaattcaatcaggaaacacaaataatacgatggcttgtttctatccaagtatgcaaacaatatattcaatcacttttctcagcttatcattatcaacttgattcacataaaaatacaacatcctaaaaacaacttggcttagcataaaggaaaaactaaaaataaaaaaaaaatcaataaagcacaaaactaaatatggactaacctactatatactaaaaaataaaggggaggcctagaagtgggccctaaagaacctgcattagagaaaagacttgcaatagaagaagaagaagggcctacagtcccaacatggttaataaaatagctatcataagtccttagatataattttcatcaaaacaccaacttccttacacaagctaataatcaaacatgggaaagtcattgaatttttaaggtgataaaggcattatgagtatgggtggaaatgagtttcctcacatcattagctttacctattaagataacataaaccaatacttccatgtcaggagttacattactcgcacttgaagtcggagacaaattggaacaaagaaaatgcatctaaacacgtcttagttgtaatgatcgtataattaaacatgaaaattagtagattattagtgattaaatctgtaaataccgcttaattttagtatagataattagggtctaatttagaattagacttttagttatgatttatgaatttatggagatatatttgaatttaagtgtgttatttgtgttatacatgaattttaagctttctcatatttttatccccggtaacgtggaacgcggcgtatggcctatagagtcactttagtgtagtttagtagttttacaatagcggggcgacctagttagacatttggaatgtcgatagttagggttattgtgttttattatttgcccctaaagtcatcttaccctttcgttatgtgtgtggggggtattttagtcatttttgacttggagcttaggtggcacctccttttctctgcagctggccactaaggaaggagaagataacattggattatctttagtgggaaattaagaaaaaagaaaagaaatattagaaatttgttttttagtctctctctcttgtacgattcaactagggaaaccaggggtaaatcaattttctttcagcaattcagaaggttttagcaaagtttttagtgaggtgattttagtgagggtaagccttaacccttatgctcccttcaatttttgaatattttaattagtttaagcgtgaaattttttgatgttgttattgtagggcttgaatgaactttagtataggtttttgatattattttaaggttgttcatgcttgttgggtgtaaatttgaagcttggttgtggtgttgaccatgtttgagttcaagcactcaaacttggttcagccatggtgattttgtattactatgttttttggggttttattgcttgggtatgattcattataacatgtttaggtgttctggagcttgttggaagatttggggtagttttggtatgttttgggggccttttgtttttctgcaatgaaaaacggcaggttgttgctgcaaaaacggcctaccatttttcttggtgtagaacccagaaaaacgaactgccgtttttcaggtaggttccccatttcgtagttttctcttgttttcgcaatgcttaggactttttctttttagatatcgaaggggaacctttatttttgagtttaagtccctagaaagtaatttagcgtatcacttctcagttttacaaatattgtgatttaggggcctgtaaactgttgaggagttgttccacttaggttgatcgacacacctgaattcagaat

SEQ ID NO: 42636 - DNA, 8275 bp, Cannabis sativa
aaaaaaaaaaaaaaactctgttttttgtatgcatattctaacttttgtttctccagtacattaatcctatcgtgaagaactcccagcatccgctaaaggggaacctgttgtatgccatagagaggattttgaagctttcagttcctaatttatatgtgtggctctgcatgttctattgtttttttcacctctggtatgttcccatgttttgctttagcataccctttatttccttatattgccctcttctatactctgtgtttatgttccgggctgtggggctatttttagaactaagatttacttaccaataatgtagtatgctaataatttttcaaagaaaaccagtctttagaaaaacttacacttacagagtgaaaatgtaggttaaacatactagctgagcttcttcgatttggtgatcgagaattctacaaggattggtggaatgcaaaaacagtggaggaggtaggttctatgtctatgacttatgccttttcttatgtttgttctagcagcccacgctagagataagcttttaactgtgttcgtattttgttttttgtatgtctcccttctgtggctgttatcagtattggagaatgtggaatatggtacgtgtcttattctaattcagtttttatcttaaccttttattaaaacttattgcttttattgaattgtttctttttattttctaaatattgccaccgtgataaatcatttgcctgattggtttcaaaagtgcaaaagtgttctagcattgtggttgatatggaatgggtgaacacaatttagtctatactgttttttttttttaatgaatatatagtctataccgttgaagtcttctgtttggtgtaatatgattatgtatatcgtttgcatttcttattggatattttttgtttcagcctgttcatagatggatggtccgccatatctatttaccatgcataagaaaaggaataccaaaggtagtttatatgttcctttttcaaatctaagtgcttgaaaatctaacatggcattgataaacgtgcaactttgatttattgttgtcttccaatttccaaagagtacttgatatttgaaattctagtaatatgcttcatatgtgattgcttcctatgcaaattattaactttccattttgtataatttgtctaattagttgccatcttgtgatttatatgtttacaagttgaactttgtactgagattttcagtagtagttgccataatcttactttatttttttcccccatttcttgagttcagggaggtgccattttgattgcattcctagtttctgctgtttttcacgaggtatattactttccctttgcaatttctacatcactaaacaattctctatctttaacttgttattatctctagtttggatttgtctaattattatacaagatggctattgtttatctgcctttactcagacgtattgttgttcactttcattaatccaaataatggttttgctcttgtaaataatcttttttatagcaataaaaggatcctttagtttttttcctctttatttcacccttaatgggaaagggaattagtgatgtaatggagaaaaactgaacaatatgcctgagggagctgtaaaattttgaactgcagcaaattattattttctttttttcaattcctttattcctcacaagtcacatcccttgctcttcaacttcgattgtttactaatgctggcatgtcataactgtttcatttgtcttcagttatgtattgcagttccctgtcacattttcaagttatgggcgttcattggaattatgtttcaggtaaaaaaatattccattttgcaggcttcttctttttctctctctttttctcgctattgtatttttccgttcctgctaggccctatgcaatattgaatctattttagtcttctactaagttttgtttcccttcatttctgtcccttgtgtagcaaataagagttgtaatgtaagatctaatgatggtactttttacccaggttcccttggtattgattacaaattacctgcaaaataagttcagaaactcaatggtaagtttatttttccgaggaatcattttatatatattcctatttacaattttaactgattttagagccactctgccataaagtaattgcaccaagcaatatctgatgtagtcaagacataattgcaagcaaaactacttagttgtttattgagttacttcttaaattccaacccattgtcttgacaaatttgcttataacttaatttccaggtgggaaatatgatattctggttcattttctgcattctcgggcaaccgatgtgtgtgctcctatattaccatgatgtgatgaaccgaaaagggacaaatgaataaccatggagctctgctgtataatctgaccgtagtttagatcactcgaaaccgtaagttgtcattgatgtgcttaaaactccatggattcttcaaggcaactcgactcatgtggcagcgtgtttaaattctacgaccatgtaggatgcagcgagcttccacagacatttcctctattcgatttctcttgagcggatttttttctgacccagtcgactaacacatacaacgctttgagagtaaaaagtaccacaatttttaggcctcagtttaattaatacttgtctggtctaatttactattgtggagaaagcttgtaatttgtaaacgtttcatgatcaaacttggttagaggccaaaatacaacatattttttcatataatagttatcattggcgtatttcttaagagatttctaaacccatttgccaatgcctttctgttttcgctcatctacaatctaattagatgattttgtcgacttaatttgtagtgtcattaaaacgtttgaacttatcgtatttaaaataataataatacaccaaaccagagttgttgattcactcccactccgcaatcaaaggtcttaaaaggagagcctaatactaacttttgactaccatgtcaagtaagtccaatccatagtcaactttaccacgagattgatagagaaagaaacaagaatgagagctcaaaccactagacttagactctatatgcagtccttatcaaccttttctttttaggtgattaatctacaagcttgtccccctaatgttcttctctcctttatcttaaaatgtcaccataaatagttaaaattctcttttatcttaagtgtcacggcaaactattattattctattcaactggagtgaagtcaagtcaagtaccattctaaatggtataataatgagattagacaataataaatagagcttatacttttctttgcttgtttgtttgttaaattttgaagaagcttcttcgtgaatagaaccaccgacgcagacgtcatcatcatcataaacaatccctatcttagtctcaactctaattaataaaattaaatcagattaattctcaaaatgtttaactgtacgaaaccaatcataatacataaataaatctattatgaaaatgtcaaacttccacaacggtttattgattaaactattccaattacagaaagagagtaaaggtggacctttctagagagagagagaaagagagctcgaaatctcatctctctgagcttggggggcttagcaatggaagatttcagatccagatcattagggcatggaaaaatgcagatggagagttactacgggactgggggaacgggaacgggccccacctcgtctggggtcagtggtatgcaagatctcaggtgttacagtgcttcgtacgcagcctcagtccacccaacccaagctcaatcccaatcccaagttgggattgggaacgagggaaagttcaagaagggcaagtccacaaatgggtcagtctccaaaagttggagttttaatgatccagagttgcagaggaagaaaagggtcgctagctataaagtctacacagtggaagggaaagtcaaagggtctttgaggaagagcttcaggtggctcaaggaaaggtgtagcagagtggtttatggatggtagtgattgaattctctcgggaaaaccaaaaatcggtagttactttttcaactcctcttttcttgatttttggttgtttgatttgcttaacgcctcaatagtgtattgaatttggtgttcgttttagaatctaagaagtgttggtgatttcgttaaggctatatatatatgtctattattattggtgaataattgtgtatattctggcactcttttatgtcaaattgtatggcagctctcttttcatcagtttgtaattgctcttgttttttttttttcttttttaccttaaagctgatttgctgaggaatataagctttatattctagagaaattgaaggctgaaacttgaatttatatttgattatatcttatttagctatgaaactcagtgctgaagctttccccttctttagggtgtttaagcacaatctttgttgaaaggattctattgattcagttatagtggacaatttggtatcagccactaacgttaacaaattcattgttatatgttaaagcaaaagactaggccacattgtcccttccaaagctgcctgaacaatcctttttgaaattagaccattagttattgaggccaattggttttaattgttttatgggaccttctcaaattcaagttcacttgttagtgttatgagccatatgattagaattcaagttcacttgatgatagtgtttactttttgagcctggggtaagtaagttgttgtgtgtgaagtgtttaagtgtgtgatttggctcaaaacttggcgtttcttctattttaaatttctcagaattggccttcttggttggggaagaagaaaccttagattattatagaagtgaatgctgaacatttgaaccaaaaaataagaaagtggcttcctcccttgaagtagtgtttttcgttggtttgtttcttttatcacttgataggagagtgtcattttagagattttcaaagaagttctcacctcaagattaattttggataatatggatatggatagactaaaaaaataaggaaaaggatgcagtaagggtgtacaagacaaaacttcagtcctatctaattctattccttttttaaggtattggtatagggtggtccaaaaagtgaaatgcacataaaaggctggctttaactattttgattctctactctctagagatcttccatttcaattctaaaagggttaatgttcctacatttatgtgctgactcaacctccggtgcctacatttatgattgagcaataacttttataataaaagatttaacaagagcaatagcagcatattactcatcaagttttgttcacttctacattaatctatctgtctctcttctggaaaagaagcatattaattctaccagcgacattttttgggatattgaatggttaaattgaaaatattagtattattaaagaataataaattatataaatttaaagtcataagattacaatgacgaaacttcctatcaaagtaactttgttgtgtattgtacgattagtgaatttagcccttattggaatttcataacagaaatagtctcattttttggtatcctttccaatctcgtccttctaaaaggagattgattctatctagaggttcaatcaagtaacaatcgatatttctttctttcataataagactacttatcaaaatacgtacccattattttttttacattgtattttgtatattaaaatcgttatagaatacttcttttgtattcaaattttattggtaggatcgaaatgtctttatttgttacatatttaaattttattatttaattaattatatatatatataactaaaagcaatttcaaattagttttttaaaaaaaaagaaacaaattgaaattgataaaaaaaaatcaatcaaatttaaagtatatcctgtcttttcttataaataaatttatgtatatatataattatgtagatttaaggggattaggtggtgtaaattttttctccattcttttggtagctttgataatttcagggaccacgtgctagctataagagtcatataatttattctgtcttaattggattattggtatgcacttcacgaaagttctcgctccattaagaatgacaccaccacaagaagttaacctcttcaaaagatcaagcataataacttaataaggagttctggtaggatttgaactcttgatccaaacaaagaaagatatcaataaagattttcctaccactatataacaagttggttccaagtaaatattaaattggaggaattctgattgggagtttcaagttgcttagttactacacatttattaactgaaaatatataaaaggaatccatattgtaaatctaagtcaatctataattgagagtactttattatgtaagagaaatgcttaaagactacaatggtagtagctaatagcagtactcattttgaaatcactttaaatatagtgattgatcagattagctaactttattggcagcacaaacatctatatgctttatactctttttacctacaccgttaattaagctcttctttttgcaaagatgctcttcttttctagtttacaatctcagttaaagtaacactcaatgcattttatgcccactctggtttgtttttgttattttaggattcaattggcattctaaatgaaaatcaagattttggccatagatatttgcaatgaaggtaaagaagctgcgatcaaattgtaggatttcatcgtccttattagacatatgtgcaagaaaaatttgtagaaacaaattggaattttatgcccactttagtttgttttaattattataagattcaattgccattgcaaatgaaaatcaagatttgagccctcgatatttgtaatgaatgtaatgattttacaagctgcaatcaaattgtagaatttcatcgtccttaactccttgttaaatatatgtgcaatttcaaaagaaaaattcgcaagagcacatatacattagaaggtaataataaatagattacttttagaacgaactacaacaaagccacaacttttacgagcaccaaaagcttatcaataatttttctaaagactggaatcttattctaccgcccactaattcgagatattattcaaatttcaaacataatttccacaagataacggggaaaacacaagaataaactaatcatttattttattaaaacaaaacaaaacaaaaatgaatgatacgcatactagttaaacgctgcaaaacaatttaatggaggaagagcaaacatatcatactagcatttgtgctcacagtattacgaaaaatgatataatgaaaagagatgaatacaatggcctgtttatggagccagcaagtttaaccctgttagtgcaaaacaataccataaagcacatcttaaaaccaagaacgtaacatgcagcgagaggacatacgataagacgagttgaagccagaataaaatgtaatcacccctttctcttctggctcccaaccaacaaaagcaattcaccaaatttttgtagaaagtattcccttggcctagtcagtagcttttaagaattgagactgatttagctatagctgcacataacccagaattccagcagtcaagtcataacgtcctaaccttcagaaactcctagaaaataagtcattctaatgcaaacaatccaatagaaaattaagaacaataaacatgaatgtctaataatggaccttttcttcatctagttgtagactttcgatgcctttgagagctccgtcaaagttccttatgtgagaagtatgtctcccagatgatgtacgcttggtttcagaagaggcacccataggtgaaggtacacttctttgcccacttgaaattctgtacgatgcaccagggcttgcttcagctgtacgggagcgatgtggatcagactcacttccagcaaatgcatctcggctgctagaaacagcagctcgcctcgatgatccacttgagcgggccaataagtttgagtttgataactgcaatacacaattggtgtgtttaaataagtgggacagcaggagttcctcaaagaaaaagattcacaaacatgattcatgaattaaaacggatgcaaatatcaaaaccaaacaatctagaagtatgacaagaaaaaacagaacagacaatttaatttttattagaaatagtaagtgtaagata

SEQ ID NO: 42637 - DNA, 8851 bp, Cannabis sativa
ggggtcaaatcccataacactctttttttgattttttttttatatatttttaagggccccaaaatttaatccgtcttgggcccatatattttcagggccggccctgagaggacccaactcctcaaataatggatatcatatattaacattaggaaaaatttcaatgccaataattccgattcatatatataaaaaaatacatatatgtatatgtgcagtatattttaagaaagccaatgttttagaactcactaacctattccaaatgatgaacaaaatttaaactgtaacaaccaacgaccgaagctagaatgagggagcagtgtgatgccgaatttcgaaagaaaagatgtgctaatttattattgtttgaatgagtaaggagaagaagatgatggataatagtaatggcggaagaaagagcaatataatttttttacgggtcgtattttgttttattcagatttaatatttgattttttatttaataaaaatcttaatcttacgttaatataactgagggaatatttgagtcccacatttttttaaaggggtcaatattataccttttcagggtagctggaatcctattgtaaaagcattaaagggcttaaaaaatctaaaacttcataacaaacagggtaatcattaagattacctatccccctttacattaatgcattccaaacagccacttaatgtgatgaaataatttatgataagtcataacaacatatgattttaacatttattttttgttttaggaaaattaaaaagatcaatatatatgttttgtaaaatttaaaagaaatattatgtagagaaaatgaatgaaaaagtgtcatcttaaaatagaggaaaaaaattattaattaaatttttaatatagaaaactctatgaaaaataaaactaggcatagtgaaactttatctcaatcttcattcgactcagcagtttgattagtgaattgattgtactttggactcatctgtcattttggatctatatacaattggattctatatttattggctgataatttctctatgggttttcggaggaacaagcgatatttctgcaaaatataatttgatactacttttatgattattgaaataaatttcagtatgcttgtaattgcaggaaatatattacatatataaatacatgatattttaaatgtaaaaatatacctcatctgaatacgactttaattgaactacagtacatgacaatatattttctgcaaaatctcttaacatcacaacatctagtatttcgatactatcgtcgagttgtacatatgtttttacactaatgatccatacataatatattgacgttggtatgaatgtaaattaagttcaaatgtcaatttaaatataatgtgtttatcgtggtgtagggagatctttttttgcactttggattctcatgatcagtttcttcattgtcgttgtagaatacaattttcgtgttacatgaatcacatgacatgtaatagaaagcttgacgagatttttaatatcattttagcttcaatccaatagtatgttttttgcaaaaaaaaaaaaaatgagctatgtatgttaaaaaaattcaatattatatcaattaaaaaaaatcaacgatatttatttaagtttatatacatgggctggattaagtttcttcataaaatcggtaatttcgttgttctttacatattctcattttgcggcaaatgaatttggaaaatatggataaaacagtgtttgaatagtaatattatttattgcttcttcgttattttcagcccttgataatataaatttaatgttaaattagttaataaagtaattgtcattcaatagtattcgcttaaaaatattattaaatgaaatcttattattttatgcatgagtattaccattcatgtagtgttgttgctttaggattatctggattgatttcgatagtacttgattcacgatttgacaacggcaatcctatttaaaaataatattttaatccaatattagtggacaatattgttaacaatatacggtgtttgttagtatataagtacctcttttagtttgaacaatcagttttatttctattattattgggttggttccgacaacttcaaatagttgttcactattattttggaccaaagcaccccaaaaagtcaaacatgttgggttgaagctacaactttgactgaaaagagaaatggcttattattttgctatgtataatcaatttaaattcataataaattattaggtgtgttataatgaagatgatcattatgtatttagatgttatattttatattttatatacctgttatcgattagatataattcttgtatggtctgctgtccataaactatgttgaccacttttgttgggtttattttgacagctacacctatgttatctgaaaattgaatgcaatgttagttaaaattttataaattatttgttatgtgctatcttgtagagacccgaaaataccttgtggtttgttggagtatttgtcagatgacaagttcttaaacgaaacaaattcatggattggttaagaaatttgtttgcctttttttaggacttcaacaacttgtgtttttgagttcagcgtccagctataattgtaatttgtgtcatttttaaggtattttgcgggtgttttgttgacacaagcatcaccgatgtagtaagagtgtaacacatgcaaagtgtcttccaaaacatgcaaattgtcttccaaagcttcaatatcttcaccaaaaattactgcatcgactctcgtttcctatgtaaagtttatcaataagacatacaacaagattttgtattagataaatattatatttaaaaatagtcctggaattgtgcaactaatattaatgtctgaaagatgaattagtctacctttggatctaataaaaatagcttttgatatcggactggcgaattcatacttgttcgtggtggaaatttatgttgaactgtcattttgattttccatccaacagtgattggagtaatgtcatctactgattatggtagagtcggcatctaatatgcacaattaatattgatattttgaaaaataaatagaacaaaaaacttgtagtgatacgaaacaatgcctcaaatataataaaataatattgcaaaataatattactatggaaataatataaacttagattttaaaagcatttagagtggtattagaaacatttagaattttacgaatgctaattacatagtcacctagaaagttttttgaaaagattaatttaaacatgataatgataataattttgtgtacacaatatttttaatggagttcttatcttattgaaaagttgagacaggtcggattaagactctaactgtcgaagatgtctttaatcttgatattgctacatataactaatcgtgtaaaaaaataggttgtggtaaatagatttcaacgtaatccaatgtttgtccctgtgacttatttatagtcatcacgaaatttaatcatattggaaattgagttcttttgaatggaaccccactattttaatctacatttggcaagaatagtatccttgaaatgaacactctttcttcgatatggtgtccgacagcaatgtcagcatctatgatagtttggtcaaatggccggcatattaaacgggtttcattgcacaaaccttcagaaggattaatgtttctaagcagcatgatgggacaattcttttttagttgtaattcatgggggaaatccattgagagttagagcatttgaaaattcttccattaccgattactcagtattatctattgtctcatccctactgtagtagaggtgtacttctcctgggaaccttcctattaacaacgaattatttcatcgacaaagatgttctttggtgtcaatattgcacggttcatcatggtagacacattatctggatattattgaatattgtggaaaacttttctatcaacaaattcaaagaactattgtcatcatgataaggaacaagcatattagttggtatatgtatggtgtcattaattgtgtggggtggcatgtcattgcctatagccaatacatgatctgaaacattggatccagtcttgctctcctattttgaatgagttgaaacttagtcagggtcggccataggtaggaacaaatcaagctggaatttatttgctctagtctcgttcttttacggaccacgggtaacacttgacaaaaatctcccccgaaaacaattatctttatgccaaagggtttgtttgtattgtttatatctcgtagcatcttatccaatacttctatgtgttgttttcttgtcattggagtctcgtcccatattactaactttgtcgcacgaagtagtcttacgagggcactttgtttgctgacacaatatatgctttttttgtcggcatcgagtggaagcttaaaacgtgagtgtgttgtacgaccacctagaagaatagaagctacagcccccgatgaagcaattgcaagtgccacaatattttgtgatctaacttttgcaaggatggccttgtataagaacgtttatcctgttccacccggaccatctacaaagaacgcatgacttttgtttgacaaaatattttccatcactgtattaaagactttctgttgctcgtcgttaagtgattcagaagctggaacagcttcttctgaaatattaacaaccaattcatcattgatctccctaaactgaaattcatcatcgtcgaaagagatgtcatcataaaggagttgatatgagttaatgtctttttccatggattcaattgtggaagatattgaccttagtacttcatatctaacatgttatgatgaatctcttggagttttgaaatcatttgacatttcttcctcagagcgttcccagaaatctcttgaattagttggattgcaataaaccaatatggttgcaaacagcagtctcaaactcaaaggcatttgatactatgatgcttcatgtaaacaatcttctaagcaactgtctctttgtaacagtccatgcaatgttgcgacctcacgatatgttggtaccaaaatgccaccaaatgtcctaatatctttgacaacaaaggccattttacaaggtttagtagtatgcacagaaaatatctctcaccttcaattggatttgcggtaataatacgctttataacttttttccttttccgaggagtccattttttgttttaatggttccaaacataatattctggaatttgtttgtacaataatgtctttgcattttcatctactcgatttaatgtaaagacctctgtcaacatggagtttttgtaatgttcagaattggcaatgcgacttaggttggtatttcatcttaatgtgactggatgttaatcttatagatgtaaatgcaaactgtacactgacgggttcatctcattaagaataaaactgtatatcctccacatttgctttgggggcagcaatccatcgggccgtttggaattgatggatttcatcaactacttcagtgttgttatcagaaaccaaattaaatgcaacacgattatgacccttatatatgtacttgtagagatacttggcagcttttactgtggagcaaattttaacattaatgtggcaatcaaatgttgcaaggagataggggttatatgggaccacccaacgattgtctaaggttgatcccataacattcacagtcgtaccattattcgagcgcctatatattgggaagtaatcatttctaacaaaggtaaatagtgcatagctttttggataattacttttgtaacgtggtctgtcccccttcatgtaaacattttgttgatttaagtctctacatggtccatgcatcatgtgcttcaaaatagccttgtacaagtggaggttagtatttctattaggaatctttgcagatacgatttcatcaaatgattcgagtgcatgtagtctccaatatctttgtaaaataattaaaaaaagtatgcatgcgggagacccctcttttggtgctcaataacgtatacatatgctgcaaccttgccaaatatttcccatttgaataatttgtcttttgattcttctagttttgcatgaaaaattcaagcgacagatcaggtctattttggctttcctcgtgccgactcaattcagttgtgatttttttccagcttgggttgcatgtcattgttaagaaaaggtctggttttccatatcattgtactaaagcaattgcttccatgtatctttttctcatgtctcttggtcctccaatgaaagaagaagggaatatgatccgtctaccaacattggaagcgttcgtttccccagcataactgtgtcaactttaccttgatacaactctgatcgaatatgtgcttgttcgagtcgataataatttaatcttgtggactctattttcacatacatgtctactgcatgttgttgcagtagtcgactggaaaataataaaattgatcttgattcttctcttatttataacttgaagcaataatattatcgcaaaaaactatcgggtcctctatttcttcatttgatgttggattattgaaatgtgaatggagtgttattcaactgatattgtataatgatagagtgtttttaagatcatgattattacaatctaaccttattcttctgttgcaagcaatttttctacagtagatgattgttgaggatttataggttggtattgattgacatatcttgttgtgtttcctgtaatccttttaatctttttatgccaacctgtgtcttcgagtgaaaataatatcggatattgcagtaaatcataacaaccatagtaatattgaactttatattgtctaccaaagtgattataaacaaaaatgtcacgtcctccttggtgatgttcgtcatcattttctacacatattgctccaacttatgatgatgttggggcattgtatacacgctaatctgacacaaattatttctatttccaaaacttgcaaatcaccaagcgaacgaaagaaaatagagtaaggattaatccgtagaatattgataagttgagttgcaatggatgcatccattttgtattttgaatcagatagtcaattttctaattcattttcagtgtcatagaaatataactgtagattagaaggatggccatcaaaagggatcaaatcgattatgttgtgatatatttgtgcttgagctctgaaagtgtatatcccattgaccctctaatagagagttttatcatatttaactcccaaagaagtaaaagcaaaataattattataaattcaaatgagtgtttgaaaatgtgcaaatcaggagtgtcagaaattaacaatgcataaagttcatctggaacttcattggtggtcaaatgaacttgtccattagcgcaacaaaagccttttgattcatgtttgaatcgcttcgcttcacaatgcatgcatttcgacaccagtagaagagaaaatgcttcagatggcacctctttcagaatttatcgatatcaagtgtaccgttgaatcaattgtcctatttaattgaccacataaagaacgtgaaagatcaaaattattttaatttttggtatgaaatatgaatttcaataagaacatataatttaaaatcagttccttacccctacaaggtcttgatatggttgcttggcagattggctcctcaatagtaatagtcgggttctatttgtggggaaaaaatttaaaatgtcaatgaagaaaaataaagggtggttgagttagatgagaatattgttttgcatataaacaagttggttattgttatcatttgtggaagaagcgattgcagagagatcagtcacaccataatcaggaacgagagaaacacattcttcatgagacgatccctctttgtctatataggggtgtgtacgagaactttgttgtctcttagataatccttgctgaatactaacttggtcattgttattggtatatttaatatgaatatttggatgttgcgtacttgatgttgtcgtatcatcaccaatagatgtgtgcatcacattataatcagatggattggaaaattttatcgttatttgattgtttttcaatgctttttatttagcatatctttcacttcgttttcaacatatcttttcttttttgtttgttgagaaatctctatatattattctttttgaaggtcttgtttcacgatcttcaaaaattgatttgtaaaatctttaattagatttatgttggtcagacatttatataataaatgttaaatttttatgattaaaatttacaatcttaccgtatgttattatgtcaataaaatttaagctcaattgaatcctatatagttggatttgtcccaattcaactaacattttacgttataattataaccaaataaagaaaacttaaattcctaaattctaattccattataataacagacaaatcctaagaagaaggaagtagaaaattcttcaatttacctgcaacacaagttcttgaaccagtgacccacaaatggaaaccattcgcagaatgggttcatctacaccatctaccacgcaacagaacagcttgatggagtttgctcgaaactttaggttattattctcacacagttggaccaacacttgcgaagctgagaactgcaaatgttgataaatcagttaatattgaaaacaatgctatacatgaagttgacacaaatacttaacaaaaaaagtagttacacaaatcttctcacttctctctctatatcatttatatattaaagttttttttaaaaaaaaa

SEQ ID NO: 42638 - DNA, 4769 bp, Cannabis sativa
aaaaaaaaaaaaattaattaaatacataaatattatttaaattttttttatttattaagggcccaaaattttatatcgtcttaggcccacattttttcaaggccggccctgtctgcagtattagtagtacataacattcaacatcttatctttaatttatttagtaactacatatattataatgattatatataccacacaatcaaaattcatttaactattcattcttccaacaattaagaaattaaatacaaaataaatatatatattttttgcactatatagaagagacctttccgacaatctcttcaatgaataacacttaaaccgttacaattgctattcatgatcattacattcttcaacaccacgcagataaggattttggttgaaaaatttattatttagagatccaaaaaccaagaaaattaaaaaaaataaaaaataattatattacatatacagattgtcaccaaacaaaacaaacaccgagatcaatgactcacatcacatcgaaattaatatattaaattttaatttcctcaaacattaaattaccaatcaaaactagctctttcttagtacttctgatctatatatagtaaaaaccgatatcgagccgtacttttcttcatgatgtggttttactatataaatatatttaccatgagcgaatatagtactatattatatattatatacacctacatttatgatgaatcaataacaagatatatcgatcatatatatacgtacacaagtggcacggtactctttatgaataaatgtgttgcggtccgtcattgtagcccttcattaaggctcatatatagattagcttattattaatatatattattatcatttttccaagctggttcgattgaattcattcatgaatgagtatatgggaatgggaaagacgatgttagcatggcagagagagagaataatataataaagaattatatagatcacaaacagatgagttttgtgattggactaagaattaatattgaagaatcttaacgagaaggaagggggtccaatccgggacaaccgctccgccttcttctcctctgcacgttagctctctcacaccttattgatccatctttttattttttaatttttaaatatcttgactctctttctctctctctctatctcacacacattaataaacaagtatacatatatattaatcgatgataaagacaagaagattagataattttagtggtaagacagcgtataccattcctaatctctctctctctctctctctctccatctgtaagcaaccaattaagtgagaaagcatatgtacacatttatgctattgctatacacattatattaaattggacttgatcataacagtacatgacatgtcatgtagtgttaaaacattactagcttgtcaatttttgaagcatgctccacagccactcattaatcgtaagagttccttcgcaatattctttattaaaatataaaggagtattttatatatttatataaaacaagaaattaataaaaacatcgttttgtagaggcagtcaacggtgctggcgcccaccaagcaccaactactcttttcctaggtactgaaatccaaagtcgccttcatcaccaaacacctttttagctaacagttacatccccactacttgatccttctttactactttttctctttttcaataccaaaaataataatctctatatatatatgtatgattatcaccatatgtgtttaacacttacatatatgcatatattgaattacataaaatattaaaattatctttatatatatatataagaagtgattgattttgatgtggcatgcatatataagtacctttacaacattaaacactttacgcccctatagacaattcataatgcatattggttgcttttttttttctcatgacaaattgtacacttattagaattatatgttgccaagtataagtttaatttggtctgccgtatattaatgtgctttacatttactcgataatcagttggtaatgcccaaaaaatataatattgaattagctagtagaatatatataacagttaaggcactaattggatgattagttggctccacgaccaagataacaattaagtcttagttctcaacaaaagtccaaacagcgttgttctcacggcgtttacgtatatatatgtatatagtttattaatcatataatcatcaaaagaaataagctatatcataaagccaaactaaaaagttgattgattaattagcttttgaaatttgtaaagtatacttgtgaaattaaattaagtctccgttctttgagaaagacataatcttggctctagagagaaatgaaagaaggaaaaaagaaataaaaagctttggtacaagtgcgacaacaacaacaacatattgatgcttatcttaatcacctcattatcctcttttattaaactaatcaaaaccccattatcttcatctagctaattaaaaaaatatatatttggtattagcaaagctaatacaattaaatggggacaacacatatggaccacactaaatatcgtgcaaaaaaacaattaataaaataaaaattggtttaattaaagttccatgtgatgagcacctattgcttcgaatctagcataatatgttgcatgttctctcttctctctctgtgaagccgcttttccctctcgaagtggcttgagattgttgcatcgttctttgtcctcgagggaagagtcccaatcgaataaccattcaaactttatttaatataatataaaattttaattaattaattaattataattgaatttgcatcggccattaacattattttaagggcctaaacagccgaccaaactgaggtctccatgtgatagatggcgatggatatggaatcattatagtcatctcttcacctgctttgcttagcccctttcctcatttcttaattaattaataattacaataatgtcaaccatttttatttcttctaattatacatccccatccttccttaacttatactttttatatatctatacacacatacacatattcatatacgcatatatatcatccggccgtctgctttaaactccctcttcaataaatctgtctttaattttattattttattttcataattgatctaattacttcaccgctgaagtattattcatatacatcatattctttttaaggcagccaacgaaactaattcaaattttaacactttttgacaacatatatatgtttatatatagtagttactagttactatatgctactctgactgggtacaatatacatatcttaagtctcaattgattagtagttaaaaaaaagttaacttattaaatattattacaaagtaggtctagagtgtatcattatatctttctgtcttttcaagctctaaaatattgggaaataaaaacattatccatcgataagtactgagctaattttatatttaggttataattataaattatctgacgcatatattattatttgtaaaagaaaagaaaaaaaaaaagaaagattgaagtcttaaaatatattgttcctacatatttggaagtgccatattaataaagaaccttctacatcaagtttaagattttggtagtaacaattattattattagtctaattaattagatatggagactaagaaaagttatttttaacaagtactataatataaatatttatatatatatatatataagaaagattgtatatagaacattggtctcttatatccatatatagattaagaattgtacccctatagaatagaatacaattattaataaaattaaagacattagtttatatgatacaaattatatatacatatatttacgttttatatctcataaaagttagcaaccaaatgatagttttttgttccgttataaatttcaataagatatgtgtaaataaatatatatatatatatatatatatatattgatatacacgttcatgatcatataaataaagcctggaactatactaaattaattaatcctatattaatatagttaataatcggataaaggaaaccaaatgattatatagtcgaaaattcccactgccaagatctcatagcggcctaaacacaatatagtgtttcttctattttaagtagtattagtatatgcattaaatagaaaaaaaaaaatcatatatacaacaacttgtgatagaaaaaggtacaaaaaatgggtctttttcttactaataatgttatttgagcagcgatatataatatttatatatatatatatatatatattatacataatactcaagatcgtactgtgtaataaactaggcaacttacacacacaaacacaccaataattatatattaatgttgggatcgagtatacaataagaagaatgaaaaaaaaaaaaaaaaacattttgtctccgaataactaatataactgccataatataaatatgtacatataacaaagataataaaatgattaactttttaattaatgatatataagccaggagatgtagaagaaaccttcaaattaaggagtactttagataatatacgaatgataagttgaattagattcttatccggaaattaatactaattaaatggtgtttattaatgaattaatattgtttttaataaatgaatatatataaatacatgcaaatcgtaaatattaccattaccgattgttaaaaaaaaaaaaaaaaa

SEQ ID NO: 42639 - DNA, 1097 bp, Cannabis sativa
gtgaaatttcaaaaattaatgaatgaaacttaaataatgagaaataatgtttacctggaaagtgtggaagtgattgttgaagctttgggcattttctgaatcggcttatttggtggtttcaggggcttgtttttgcctggtattaaaataattttgatatggttaaatatttagaaattcaacaatgaatatagaaaaaggaaagtgaaaaatggtacctggttgaattggatttggatgaagacgaagatccattgtaagtaaagaaaagaagtacagagaaatatagaagaaaggctctgtttctttctatattgagaattggatcaatttcaaagtggtggatgatgagtttgtttgaataaaaatggcggcaacaggtttaaattttgacaccattaatgggccaataaaaatggactattgggcctgtttgttattgggctacagaaaatggccacaagcaacatataagaggactctttcactcatactatcatactttatagcaatttttagttatacgacttttatatgaataatttggattataactttcataaattttaaaaagaatgttaaaaattatgcataataagaagtattattttgattagaagattggattgaattttcatttttactaaaaaaatacaaaattgaaagctatgaattagatggtgaagttaacttacatactcatctaattcaaaaaaatatctttgttatttgttatgtttttaagtaatattttattcgtatttttggtattattatattgtatcgtgtttaaatttatatttttattgtgttgtgtttaattttatattttttttttttggctaattaagaatttttttctctgaactttgacatactttaaattatgctcttaaacttttaaagtcgttaaaaattctctgaactatttaaattgttagatttaaggatttttgtctaattttagtaaaaaaattctaacatgcataaaagttcaggagacattagtacataaacaattactgatgaaacagtaaaattaaataaaattagacaaaaattcttccatctttgtatttcctttaaaaatatatatt

SEQ ID NO: 42640 - DNA, 3913 bp, Cannabis sativa
taggcaccatggtgcctaataccatgctccttatataagtatataattttatcatttttgaagcttgactttaagcattttcagcttttggtatcatgtattgcaagcaagtttacatttttgcaacagtttgactgaatttcagctcttttaatatgctagacaacaaagtttacatatacaattggcataagagcattaattggttgaaactaactgcatagcctttcattacatggttaggaagctttagaactgcgcatttattgcaacaatgagaaacttgttccacctcacttttccaggaagtgatgtcttttatttatttgtttggccttgttaattaatgtctgaactgatattctgtggttggttaagaaaaacagttagactgttgtctgatgtcagagtaacaggaattcacaaataatttcgtactttaggattttttttttcttatttttttttctttatggtcttaagataaaattaaactcgtttactttattgaattacttaactcgttggctttgtggtggacatgtttgttggcactgaaataagaatgatgtacttcctatattcagggtgccaatttactagagaatggacaattatttcagactttcacagttataatgtgaattcctgatgttatgagaaattcactttctagttcaattttttgttctcacttcagtttatttttcccataacaataaacccttcaacgtattaaatgacaaaaaagtagtagttatccaggaatttgtgagtagctctcatttagttgtggcttcacaatatggtagtctatattggatttctttcttggccttttgcttaatttccttcctatgactattacgcaggtatctatgttaaagaattcatgtaaaggggctcttaagaaactaaaacattggatggtaccggaaaaggtatgtactgtgtcacaggttctcctctgatatatgtgacatgtatttttgcttgtttaattcaatatcatctgttcttttgtaggctaaaacttcaatgaccactttcccttcttcagctgagatagtgtctgaaccattaggtgttgtcttaatcatttcagcatggaactatcctttctgtatgtctaaacatctaaagaactcatttattttgttgttgaaattatggtgtatatgtacttttaaataacttttctaattgtgcaatcttttgtttattagtgctgtccctggatcctgttgttggagctattgcagctggtaatgctgttgttctgaaaccatcagaaattgctccagccacgtcctcattgcttgctaaattactaagtgaatacatggatagatcttgcataagagttgtcgagggagctgttgccgaaacatctgcactgttggagcaaaaatgggacaaaatttgttacacaggttctattcttttccatttgtttcttctcatcttgtgtgatgttgaaatcttggatcaaatcaacttcaatagatacttgtcatttgttggtgcatctaatctaagatgaacattttgtattgataatataccaatgatatctcttcagatgcagctaaagtttctctgctaatctttttttcttaaaatttcacacttagtaataatacaaataattttttgaatattaggcaatgggaaggtaggtcgcattgtgatgcaggctgctgcaaaacaccttacgcctgtacttttggagctcggtggaaaatctccagttgttgttgattcagccgtcaatttacaagtactgaactcttctatattttcagtctttattctgccatatgtcttgctaagatttctatcattaatttcaactcatgctgaaactttttatgtcaaaggttgctgtgaggcggattattgctggcaaatggtgctgtaataatggacaagcttgcatttctcctgattatatcattacaacaaaagattttgctcccaagttggtatgtttcctgatatacagcgttgcaggtctcaatcgacactcagctttatttctttcaaactaaattccttatttttcttcaggtggacactttgaaagaggagttagagaaattttatgggaagaatccattacaatcaaaagatttgtctcgtattgtgaacttaaaccactttgctcgcttgtcaaagctcttggatgatgaaaaggtttctggtaaaatcgtcctaggaggcgaaagaaatgaaaccgaattgtaagttcaatagtttttggtacactatttcatagtagctagttatatcaaattgtttcagtcaattaatgtcccttcaatggcaggaggattgcccccacactcttgttagatgtgccccgagattctctgatcatgagtgaagaaatattcggtcctctgcttccaattattacagtaagaaacagaggacttttacaataatagtcacattgatacaatgacaattcattgtttgatcacaaagtgtttctccttgtttcaacaggttgacaaagtagaagatagttttgatattatcagctcgggaccaaagccccttgcagcatatttatttaccagcaacgaaaagcttaagaagcagtttgttacgacggtatctgctggcggtgtggttgtcaatgacactaccatacatgtaacttttcttctatatctctctcacataattcatgttcacatagtcatttgcaagcatatatgcatacacataaaaccaattaggaagagtgaaacacaagaataagaataagaataggaatctttcaatagcttaatctaagatcatcatcttcaaaagaatctataaaatctttagatatcctattgttcactattctgaagacatttttttttcttcatatggttggtgcagcttgcagttgactcactcccatttggaggagtaggagagagtggaataggttcttaccacgggaaattttctttcgatgcttttagccataaaaaggcagttgtctaccgaagctttcttggcgacgcagcaataaggtacccgccttacacgttaggtaagctaaggctgttaaaggcccttatgggtggtagcatagtacgcataatccgagccttgtttggatggtcttagcaactttgaatacatgtgagagtttgtaacgaagtttttttttccctctatttatggatcttttgttttgattttaaatttgaacacgtttaatttattctggaatcggaaataaaatttgctatttaattgtttgtacactacaacaaatatgttttttccccttgaatttatatatgtattatataactttgatgttgaatttaactttgtatatttatatacacaatttattcagtcttgcggtcttgcccaatctttctttcttttccttttctataagctctaaaaaaaagtggtcctcaaataaaatgaaagtatgactgtaatttaataattttatatgaattattagaataaataaaaatcaagataaataaattgcatatttcacttgcaaaaatttacataagtacgtgtttagagttttttgaaacaatacgtttagagtttacagtaacaagttcctattagttaactgtttttctcatatttattctttctaatttaagataattagatttttaacaagtttctcttatttttatactagggaattaagccgcgccttgcgcggatttgaccctagttttgtaaattttcttttactgattaagtaataccatgattaagtaataccgattaagtaatatattataaaatgtaatattttgatgtatatatatatactaggagaaagctacgtgcaaagtacgtatacttagttttatgataggtgttttataatataaatgagaatgattcaataaataatcatata

SEQ ID NO: 42641 - DNA, 1338 bp, Cannabis sativa
taatgttattccattaatattatatatgagaaaccaatattcttttttttttcggttaagtaattgttaggcaatttagggatggttttgagttgagtacaaggctgaaacactctaactcaaataatatatctaagataaatttaatacaggacaccaaaggaaattaaagctttttaaaattttgcgtgtaagacatcaatgactttaaatccatgtacacgcaattgctatgaactgaaagatatcatacataaggttgatcaaatatatatatatatctctatcactaactataaagtgagttcattatatatacatgttcagtatatataatgttagaaacattattgcttcttgtgttgatgtgacttaaagaaacaaatgacatcgatccaactgggtcctatttttcactattatatagaagacaaaaaagtgggtagacgattagaattccactattctggttagaaatatttccgatgtttaaacaaacaattcgaaactaaattagaatcaaaaagaaaataaaattaaaatatttagcttaaagtggacaatatttcttttatgcgtagatcaaagaaaacaactttgggccaccgaaaccccgagcaaggtagcatcacctgtgttacctgcgtacagagtaagttaggcataagtcccaatgcctaggaaaacataaggagcaaccacgtgggacatagatccctacatgtcgtttttgagtgtttccttaaatggtcaaaatagaaggatcgtgaagccactgaaatacaaatcaaaaactgaaaatgtgacatggatatcataaggcaccacctgaacacataggtgggttgttgtacaaatttggagtgatattggttctagatctccagggaagatgcaattaacttcataaactcttagagacttaggcttagtttgttaagttagttatgattgttaacatctgttatatattcggctggttagttatttgaccaccgactctagtctgctatatatagcagtcattttgccattgtaatctaattttcccaatcaataaagttcaatttctctctgctcttcaaagctaatatgatatcagatgcaaactattgaagcttcaagaaacttcatcttgcacattcaaactctcatcaatggcgagaactcgaaccacaattttagctaccaccaatgatcctcccatggtcgatgctactccacttctgccacaacaaacctccgctgacaacacaactcgaactgaaactccagttcctaattcccgatccactgcgatcgattctcgacctcctcttcatgatcgtcctgcatacg

SEQ ID NO: 42642 - DNA, 1730 bp, Cannabis sativa
tttctgtagtagagcaagtctttctagatatatagcaagtctcatgtgattgtgtttaatttgttatctttgtttagttttgtgtttttgttgctcgttggttcttgttcgataaacaagaataacatgcattgtgaggaattcaataggatgaatgagtgtttatgagagttgtaaaagtgtagtttcatgtgtttaattgattgggctctttcatggtgagaatttttctgtaatagaacaaatcttcctagataaatcaacatcaatcttaattgtgtttaattttgttatttttgtttagtttgtgttcttgtttgatgttttttggcatcaacaagaataatatacattgtggttgttgtaatgcacaattatggttataattaatgttacatatgtaaactaattaaaattattgttataattaatgttacatacataattgcataattatattgttctctcaaactaacataacccaagaaaaaactcaagatataatttctaaatatttgtttacttactaatcaaaggaaaaaaaaaaatacatcaaaaggttaaaataagaagataattaagatataattacataaaacaaacgaactgcctaacatggcttacattacaagaacagagatcatcatcatcatcaccacaaaacctaatccaatcccataatcacatcactttccatgattccaaagtaggaaaactcggcaaactctccaattccaatccaacctcaccaacacctcccaatcccatactcaccggagaaaaactagagagcggcaccaacggcggctgatccagcaaaaacgctgacgtgtcaagagtcggaaggcaaccgttagcgatcggaaaacggctgctgcaagctctttgcggctcaggtttaagtataggcgccgaagtcgatgtagagaaaggagccgagccgaatcttacgccggttacttgctgaaccatttgtcggaaattagcagggtcggctgttatgaaagtggtgttggatctcttcgtggctctggactttcttttggaaatctttccggtgatggtgttagaagtagtagtggtattattcatcgtcgttgttgtggaagagggttgaggaagtgaaagagtttgggtgtgaagaattaggtcaggaggaggtgaagaattagctatggatttttgaagggctttggtaattatggaatctgcgtctctgttgagaagatcggagaaccaagaatcggcggagagggaagtgggtttgaagacccatgggtcaatagtagtagtggctaaattctctgaagccatgaaaacgcgttaaaggaaagaacacagtgaggagagtgagttatgtttgttgtggtgtgtgagtgaatggagtcaaaggaatggactttgaagagagtgagtcaagaaataaatggagaagagattgaaggggtcattaatggagacttatataggacggtggagaagaaagaaagagtgttttttggggagggagatgaggaaaccgcgttgtctggaggacgatgagatagggacacgcgtcatttgattgtacggatgatgaggatgatgatgttagctttgctaagctaatttgtatgtttttgtactagtctagagtctagatggagtggtgtatggtgaaatttgaatttatgtgtatagttttggtgtatattaaatttttgaatacaaatttattaagattaaataaa

SEQ ID NO: 42643 - DNA, 1971 bp, Cannabis sativa
ccatgcaacataaaagtgatttctgatcttatattaattagtaaatctggtttgaaatgggttttatttagggcacaaaacccaacaatattgtggttgtgtgacaggtttaagatttgtctcatgatagggctaacgaggatgggttgggacttggtgtaaggttagagctcaagcccgacaattgcaatgcaagttcatcttcacatttgcgggtattgtatacttttgtctatggctctctttgtttagtgtttttacctatatgtttttgcctttgtgatggtgtattgaataatggtgattatcacactgccttttaaatattttaggctttatcttttatcatgatcgttttatatgctcatattttcaaagattcttccatgttgttagatccattatggtaatttttttgaatggaaaattaaagctttattaaccatcaaattttgttaccaaaactgataaaagttagttgggacattcctcataccaaaactacgatcaggataagaatgagaagccctagtgaaactattaacaactacattcgcagatcaatttacaaaataaactttcacaaaaggtaaatctattagaaaaggtttacaatctttaatgatatcaccaattaatgaaatcatagaaaatgaactcctcaaagcttgcaccgctacaagacagtcagacataaggtaaacttgctgccatgaactttgtttaatccagctgagagcttcccgaatactcacatcttctacaacttcaaccgcgactgtccccccaaaaaaaccagcccgtccttcaatgaacaaaccgttctcgcctcgagcaacaaggccaaaaccaaatccattaacctcctcaaaaatagcaccatctacattaatattgatactattcggtggtggaacggtccaaagctctgcgccatcaaactcagtcaaactagaaaatgacatttccaaactaaatatttgagcttgattccattattcaagatagctaatacctgaggaagctattttcaaaggacttacacacttttggttccaaactttttcattttgagcacgccaaatcacccaacaggtagcagccaacaaacattttttctcctgctgccagacgcatgaagcaagcttcaaaccaacagaaaaactcagtattttccatctccccatacctattcctacacgattcctaaccacttgagcagctgttcaaaaacaagacaatggtgaattgattcagcctcaatttggcatgtacgacaaacaagattaacatccacatgcttagttcacagctgcaccatcgtgggggaagagtgcctgaataagcccgccaaaccaaatattttatttttggagggacttttagctgcctgaacttcttccagaaataagatgaactttctacactccaattaccattcaattcttgaatgagattgtagtccaattttaccaaatacacactagacacttctttagtccaaaataacttgtccatgggagatgacatattgagggaaagactaaaaatgagtcggctagcacacccattaaacatgtcatttattaattctatgttccaaggtaattcacttggttttataagattgacaacataagcctctcttgtaaaccaagggactctaaagtctaaagtgaccatgatcctttagcacattaatcttctcacccgagcccaccttcaattatggtgattttaattacttgtgtacttaattatcttttgtcttataactctcgagctcaattaatgaatttatttctatgtgaagtttgattattatatccgtttagttattcttatgtgggggttctcgtattctgagttgatttgtattactagtatttttggcataatttgccataattgaagttatttattttgtgagatttataagactttttgagtgttgcctaaataggctgtagt

SEQ ID NO: 42644 - DNA, 1422 bp, Cannabis sativa
acaacccacaaatcaaaaattcaatctttgttacattctaggtcatcacaaaaaaaaaagagggttttgactataccgtgttgagcgggatgacggccgtccttgccccaaccgattccacgagtagaatcaaggtactgttggacgagatggcgacatttctgaaggtgatttataccttcgacacggtaacaccatttgagcctttctctgagaatctttgccttttcgatatcgatccatttctccctaacgatgtgctccctcatctcaagcatggccactgggtccttgtagggattctcggcatcgaagtcatccggcggcgaatcatcgaacactactcccttctttctccccattttctctttctctctttctctgagtttttctcttctgcaattttctttcgagtgtttttgagtttgagatttgagagtgaatttgggctatgcaaaggattatctattgggcttaattgttgaggcccaatatccttatttgaggctatttaggatttttgactttccaacaagggataagttgaggaatacctcttttttgtatcaattaatcaaaaataccctcatgttattttagcaaaaaaaaaaaaataccctcatattatattttatttaaatctaaccatttttatgagtgaattgcctaatatatcactgcactacacttaagtgtagcacgtgatttatattaatctaatgggtataatgggaaaatcatttattaaagtgggtatattttaaagaatataaaaaatgaagataaaaataaaaacaaataaagtaaagtgggtatacaatgtaatttccacttccaataatgaccttacgaagtttttagttaaaaatggtctttcaattattcatagtgttgttaattagttattttatcaaatattttatcacacgtagcgtaaaatgataatatgactaaaattgtttatcgaaccgcccacaccacactacataaaattgcgatttaaaatcttttgcggtactattgtggtttatatatatttttattaaaccgcatggtcgacgattgtggtctggtatttgatttgtcttttttttagtttgtagtaattacaattattttgatttattttttaacaatacaataatagtttgatttgatttattttgaattaccaacaaaggaaacttagttttggggaacaaattttactaaaatagatttaaatggtgttataattatataaaatattagcggatactctttcaatcttagaagagctaattagatatcaaattgattttttgaataaaaaaaagggattttatgatttaagacattccttttttgttcacataaaactttatatatataatacactaacactacaacacaaaacctagccagaaaaaccttttaaatcta

SEQ ID NO: 42645 - DNA, 1798 bp, Cannabis sativa
tatttccttaattagaaatattctaatattaccaattttggtctggcaaccatgtgaagtgatgaggagattagactatacttgttaattaatatagcccaagctatatagagaaattgttagtgggaaaacaaggttgacaaagctaactgtaacagcaacgtctaaattaataaaaaaaaataataataaacggaaaggaaaaaagatctatatatatatatataatcatcacctcttacttcatcaaattagtagggacaaacaaaagtaattaaaccgccaaaaaagtatccaaattgttttgtatatatttcagtcaattcccaaattccaaaattaataagttttataaattgaagcatttgatcagttctcttaattaaattgtgttccttgtttgttctcggtgttcggttgtttcaaattaaactagttattaattacatatggtccatggatctgaaaaaataaatatatatcttgtcttgtggagaaaaaaatgaaaatgtgttaccaaaaagatcttattaattagctgtttgtgtgtttggacccccaccaattatatatgtgtgtcatgtggatgtggctcatatggtttacacctacaatattttaactttgtaggccaatctcatttaaaatactcaactactactaacagtactgtacttctgtgtagagacatagataatattattgcacatgcattttatgaaaatggcactaagtaattaagtcccatctaatttaggttagtatttatctatatattttaggataaattaattataatcttcattataatttttctattgggctagcttttgcatatatcctagattatatatatatagttggatggtaaccgaccactattgtattggcgatcgaagatcaatattaatatagttgcaaactgacaagaaaagtcaaaggtaaatagttgactaattgggtggaaagttatagttgtttgatatcatatcaatccaaattccaaatactaaagtatgggtctgtaacttaccatgatacatattctaaatttgtcaattttcctacctaacttcaaaaagtttatatgagtgtgggtgctacatatatgtggtaatttaataataaagtggtccacatgcattaatgtatgaagtatagaacaccacccatgtatatgatcaaacaagaaagtaagaatctgaaagagagaaagagaagtgaaattggatggagatcaaaagatcaatcttagttgtttatcaaattaaaaaaaaaaagaccaatcttagttttattcaatagctcaaatgtttatgtatagaattaaatagaaagtagagaacacaaagtagttagctataagggtactcataaaataattgatccaattaaatccgtacgatctaatttaatctaatctcatatgcaaagtacaaattagattggattgaaaaatttaaaatttatatttgtgcggattgaatattgattgacatgtaaaagtagcgatccaatcaaattcacacatatttataaaaaaataaataaataattatacatacaattaatattttaatgtaaagaaaataataatttaaaaatttaatataaaacaaatatatttaaaaaaattaatagataaaatatatattctattcgtatatttatatatattctatatacaatttaaaaatatatatatttctttatatattcaatttttttcttcctttaattcttttatttgttattttatttattttaacttttagttgaagacataaaataacaataa

SEQ ID NO: 42646 - DNA, 4119 bp, Cannabis sativa
  modified_base (4044)..(4050): a, c, t, g, unknown or other
aacataaaacttaaatttttattttattattattcgttattaaattaaaatctaattatttaatatatttaaatattttaataaccataaataagtaatacattaaaaagggtaatataattataaatataaatagataggcatatatacatgatatcatgtgttgattttagctttaatgcatgtagttgtgactagtcactataatgtatgtgttagggtttttcttgctagtctagttatcaagaaagtttttttttcgctaattattgaatggtttgtatttttgtttttctaaattgtttaatctaaaatttttattagtattaaattgtgcaattcatcagtaatacccccttaaaatataattttatagtcatgacgcgataaataatagttgataaattaatacaaattaagtacattttttctttttattttaataattaaagaattaaaaatataaatataaattactacataaaaaaattattttattatttattaacgtaaaaaaagtgatagtatttaatttgtattcaattatcaactagtatttattacttcaatcattcatgataaaattgagaaaaatatgatactacgatgtgtaatagttatatttcaaaatatattatgaatatgcggcctactgtaaagagaaaaacttagtatagtataaaatgttcagaacacaaatatactatatattcttaattatttaatgacaaattttgttactatattcttagtgattgggacagattaaaatggctggcttatattatttacaatttatttattattattttttttttaatgagcgaagttactttcttcaaaaaaaaatgagcgaagttaaagttaggatagctccggatgaaatgaaaattagggtattaagaaaaggaatttctcaagaatctaaaaccccaatctttttggggaccaaatacatcccatctttttagtatctgcaatttatttatttatttagttactattcagatcttataaattttttcatgctaggttttgagagagcgatagcaaacacagaaacggtagtttaattagaagaatttggtaatatataatacgttgtattttatgttggagttaaaactgttatcgtgtgagggactgagtgcacgtttcacatttgactcctctcaatataaataatgaataattaattaatgaaaacggcatattctttttctgtataataaaataaaaagaataaattttgaattaatctattaatattgaaaattgacagatatccatatacgcgttactgactgagatttgtgttttgtagatacgaagtcaattttttttcttttttattttgtcattaatggaaattgaatagtttagtaagatgttgttgcatggggcctaatatgaacacggctaatagtatatatcatgaagatcaatcaacttgtataaaaaaaatatccaatgtgtcggtaatttttggaatatgggcattggccaatgatttccagcaccaaattattagaaatttctcttatttccccccaaaaaattaaactttatttgattgcgacccgtgaaccaaaatctagccgaggagataagaagcatcatttataaatatataatatgtatttgtatagatatacctacatcttaagggcatatcgtgagtaattaagtcacttctcgattccacttggactaatataaagggagaaagtattatataatatactacatatacaactaagtaccccacatatagataaaatacatgaaatctaatggatgttgccaattcatgaagggaatgattgaagaagaggaattaagatactccttttcttttttttcctcattattttctttatcggattgaattttaaaatgaaattttattttgttggtaatggtaacctgtttgtgaaaatgactgaaatgggtagatgcattgcatccatgaaactgggagggaacaaaagaggtcagctttgaatggaccgagcccaatgaccccaaaagaaatggggccatgtgaaggaaaggaagccctttctctatctgtctctctctctccaaaaaatgataagagctaaattgtaaagaacttttctctctctctctctcttctccttctgtgtgattcttttcttttttatctctcccccactcaatctttcctcttggacctctttgaccacccttttgaccattcttttttttaattttgtttttgggtctttcttatgcttgtcttttgaatcatgcatgaacaaagagggagtataaagatagctcatcaaaaagggtcccaaactaataaagattttgttattggccaaagtcttaaaatatttccaaatcggatagaaggggtcagaacagttggtggagctttgggggaaaggaactaattataactatttatgggcaaattcatggattctagtaaaggagtggttcattatgtatcattcatcctcaacgttatcatcataatcatcaagctttagaagtgtgagatggagttgttagattgtcagggatctttgggtaatttataaagtaccactattaatatgtatgtatgtgcaatattgggcataaaacaccaaaaaggggaaactctaatatgcatgtatgtaataagtaggtttcaaatggtggagacaaaactatagattggttagaaattaaaatatagactttacgtcaaaagcttagacaactcttattctcataacaaattgactagaacaaattaaggggggatttatatgaagtatgacacaatgacatcacacggtagaaattttaaaattgtgggattggattttcatattatttaattatataatgatatgatttgatatcagtagacttattatatgcaatagaaaattaattcaactaggtagttagctagttagattaacctgactattaaatctttaatataggcccaacatttggcattttcacatgatatatatggttggatcaaacacctttctatataacaattaataatgcttattttaatttgtcaattagtgattttcacttgttaaggttcattaaattttagttatgtaatcctaaaagtggcccttgaggatactggcagagaaggggaaatggaaaagagaaaaagaaaataaataaataaaagggtctttgggaggaatgaagattctttgcttttctttaacatagtggcaattaattttatatgaattaagttatagcaaagcaaagtatattgttttcgaagtatctaatagtatttgtaagggccatagtttttgttgtagcaaattatgttttggtcttcatctcttaacttgttagatgtatctactttgttatgtgtagatgatcatttactgatctttcagatgcatcttattttctggttttaatttgtattctaccaagtcaacattatggatcaaaaatgatataagtaccatatcaaagccagctggcttcagaaattttgaatcggttattaagttagtagtatatatttatatataaaaagtagctatctaactatttttattaatttagtactgtttactttataatatataaatattaatattattttattttatttaagttttttttaatttatctttacgatatgatttatataaaattaatattttaattcaatttcattatttacttttaattaatttaaataatattattttttaaaatttaattaaaataaatttttctttaaactaatattattaaaacaaatttagtctagagattttctaccattaaatggtagattggtttgtgacctaaataacaataattacaaaatgatgttaatattttataagtcttaatatacttcgacatgtaaattgtattgcgatttttcattttaatttatgtattatttgtaacattatttaattattgtagcatttgaaaaaaaaaatatataacctaatataaaacaaaacatccgtgtcttgcacgaaatattatctagtatatatatatatatannnnnnnatattaaaagtgcctatctaatggcaattcttggtttaacagaatatacttaaaataaaagaatattct

SEQ ID NO: 42647 - DNA, 6907 bp, Cannabis sativa
tccatcgctattattttctttgcagtatactaatctcccatccactgtagtttccatagctccgcccttggattatcgtttgaattttctttttttcttttgtcgaatggattcaggttgcttctggtgctggtctgcaagtgggcagccagggagttatgaggaactcaactctaatttgtactccaattatgggggaatcggtagatgatatgcttgttgaactggttaaggcaaaacaatctggtgctgaccttgtcgagatcagattggacaaattggaggtttttcaacctcgtgaggatcttaaaaccttaattaaaggcagccctttgcctactctgttcacatataggttagtcacctttgcatgattgaaagatcgagactgtttttattcaattgttagataaactcatcttcattttgacagtttggttaacattagtaaaagttttggctcagattactagcttctcaaaaaagtctatatagttgaaaaatgatttttttttctttttaatttttattcaaaacaaatctagaaaggactttttaatctagaaagggccgaaaaattggatccatggttataatttgttgtgatgaggagctggtccaaatattgtaagatttagcttaaacattaatattcaatggaccttagattgactatcaaagttttgtgaaagtctgtttgggtttcccagcaatgaacattattctattatctccttgcactacctttgagagagtctcatcattgtttaatgttatacatttttagaccaacatgggaaggtggtcagtacaatggtgatgaagaaatgcgacgggatgcacttcgattggcaatggaatatggggctgattacattgatgttgagcttcaggttacttctttatgaaatctacaactattctcatgttggcatgtgtttcctgtaaaaacatcatataaatattttcattggtgacttcagaaattacatccatgcacatatgcttgtatagaagtacaatcggttgaagttagtttacataagccatggtaattgctggatatatacttatattaaagacaggaggtctgtagcttttggtggatatcatttgtgcttgtaatgtgctagctaatctaagaaatttcctcaagagtctagatgagatacttgatttggcagtcctgtcatttcattatttatatattggcagggtctttagttatgttgatggatcctttgctttattagaaagttctttgtagaatgatattggcgtccatttccttcatggaatttataatgctccctgatggttgaaggcattgtccaagaatcctctccccggttttatgtgagtctttgtttcattcacttgtcacttacaagctctaagagcaagtgtaacatcagcattttcatatgtaagcaacaccctcaatagtagcacatacgaaagcttagttttcttatactgacagaaaaagtaaaacttgtaataggatttatttatttattttttttttttatattagtggttgcaataatttgttatttacttctagtggatacgtctctcatacatacagtgcaagctaaaataaacgtcaaccactcatggaagctagtttgtgttacagttttcatcttctgatttccaccagtatggcagcacgattaaattttagtgatcctatttcctctttgtgaaggttgctcatgagttcattcaatccatagctggaaagaagcctgacaagtttaagatcattgtttcttcccacaattatcaaaatacaccatctacagaggatcttggtaatcttgtcgcgaaaatacaagcaactggagcagatatagtgaagtttgcaacttctgccttagatataactgacgcggcacgtgttttccagataaccgtgcattctcaggtatcccaattaaagtttctctctaatttcttgtttctgtaaatctagaatcattaatcgaaattatctgtttatgaatgatggtaccactttatagcaatttctggctgaattttaatcaaaattgtagatcctctgtaccctagatgtatgtatcaacagttcaattcaagttacaagtgggcattgaataagttttcctcttattgtggaatatctttatcttatcaagttagtgagtggttgggttgtttgccagtatagtaatttggttaaagaacagaggttgaccaagaaatgctatcagttgaacagagctttcttgcatttcctatttctagaaaaattcctgtttagtataaatgttggctagcaactgctggcttttcttcttcttcatatgatatgaaatattaatttattgctcaccggtgattcaggttccaataatagcacttgttatgagtgagaggggtttgatttcgcgaatactttgtgcaaagtttggtggttatctgacttttggtactcttgagtcgggatttgtttcagcacctggtcaacctacaatggatgagcttctacatttatacaatttcagacagatagggcccgacacaaaagtgtttggtgttattggaaagccagttggccacagcaaatccccatttttgtataatgaagccttcaagtcacttggttttaatggagtttatctgcatttgctggtagatgacattgcaaattttcttcaaacttactcttctgcagattttgctggattcaggttcattttttcatttttctttttcatgttgaaatattttatcaacaaaatttgctcttactcttgtatgacaaagcctatacttcccaaattttcatttgaccactgataagcatttatataatatttatacattaatctaattctatataaatatatatgtatgtatataatgctgtgtggacgagatctatttgaaaagaaaaatatgtatttggaaagtgcaatgttgattgcatgttggtaataaaattaaatttgtatcaaatgcagtgtcacaattcctcacaaggaagctgcacttgcctgctgtgacgaggttgatccagttgccaaggtaaatggaaaccattcatgttatttgttgtataaccgcacaatttgtagtatggctcagtttctaatcttttattgttcaatgtattttatttctattttcaagattttcttatatgtgaatggtttatatcttgacaccatacaagtcaataggagctgttaattgcattataaggagacaaagtgatgggaagttattgggatacaatacagactatattggtgccatttctgccattgaagatggattgcgaggtttactttaactgcaatataattcttttatatgcatcaatggatttatccgtaagctttatcttgtttgttgttccttctatgtgtacaggttcgcttaatgctagcagtatgggtggttcacctttagctggtaaactgttcattgtcattggtgctggtggtgctggcaaggcgcttgcttatggtgcaaaagagaagggagcaagggttgtgattgccaatcgtacctatggttctgttctatcctttttatctttctcgttattggtttttaatgactcagctactccgatgctcagtgaattttatgatctactttttcaatcaaacattctctttcattttgctgtgtctcttgtcagtaatatatatgtacttgtttttgtttagaaggtgtgctagttgttttccttgatgggggtgaaatgactattttcctgacatccattgtttacaattgacatgatagaaaagccataggaaacaaaaaacaaaagtgtttccaacagtgagattgttgaaagtgttttggttaataaatgaacaaataaaactttcttagagttcaaagtttatgattagaactttcgaagaaccaaaatgtattttggttgactttggtagtgttatggttaattataatgctctctcttataatgcaatcagactttgcctgatgtatgtattgtaacatcattttgaagatggaacaaatatgtaaagaatgctgtgcttaacaatatatatttctgtgatgcttaaatccttgcattgctcatgttttttatttaaaattatttgctaatctgataattttttatttgtttcatccttgaaggtcgggcaaaagaactcgcagacacaattggaggagaagctttatcacttgctgacttacaagatttccatcccgaggatgggatgattcttgcaaacacaacatctattggaatgcatccaaaagttgatgaaacacctatttctaaggttttctattgccacactgcttgcacctctttaagtctcatgcatccttaaagtgcattttctataaaaacaccaccgatggtaaatttgtgtacagatttaatgaatgtgcatgaaagtctaattctttatgatgtgatgtatgaaagtttgttggtttgatacctgggtttcatatagttagtgccactgttcattaactagtaacctctttcgaagtgagagcattaaaagtcaggcttctgtttttgcagcatgctctacgattttactcgctggtgtttgacgccgtatatacacccagaattaccagactcctacgcgaagcagaggaatctggagccacaattgttactggcttagagatgttcataggacaagcctacgaccagtttgaaaaatttactggactgccaggtaagctatattgaaaagaattaacattatcgtttaccaacctgtctccatttagtaatcttcaattgactttttgtttcgtttcttttctcctgttttgcttgcagcacctaaggaacagtttagaaaaattatggcgagtaactcttgaggttcgtcattgattataattttttttccagtattgagcttgacattcaagttattctttgtttaccatttatgaactttcgcttgatgatttatgcaaaaattgctttcatggattttgtccagctgagttcaatgtaacaaaccataaatttctgattttattgtatgctataattagttcataatttataaacaattattctgagaattctgagtcttgggaactctaattttttttttcaagaaaaaaactgtgtgtggcttttcggtttggtcttcttcaatgtatgttagaacattgtttttcatgaattgatatactttgcaactttatcgtcgaaattggttttgatgaactgccttacataaaatagggaaattggttttagcattgccttttactattattgtttttctttttgaaattaaactcgtattaacaacaatcagagtttaatatatcaatgagaaaagaaggaaaattctcaatccaagctaaatttactatctaccctaagtgcatgcacaattaattaatgagcagttttattagttgtacgtcaaacatgaattaaggatgtctcaagaaaattagagagcaaactagcaatattatctaataagaaacctagttcattacaaaaagaaaaacgcttagggaaaccgaaaccgagactaagcaatcagactctacaatataaagaggaagaccaaaagcaactattaatgctaaagctttcgcttgtatgactgaaaagttccctacaacaaccaaaagcataagataagttcagaaattacaataaaaggaaaaaaagtaacaggtcaacttaataaatgagagaaattaaaataaagagaacaacaaactacaaaccccttaaacaatgaacatacaccagagaaattttttttccctctggtcaactaactccatgagtctaacacaaatattcccttgactatacttacaagaaagcatacccgaccatcttgagtaaattacataatatctaaaaagtgagaataacatccttctcaagattagataaaacatacaccataaaagaatcgccattgctcactctcataacaaaaattaccataaaactatcattgttattatactaaaattactgtattttttaataatttttgttttattttttacttttttttttttaaaaaaaaagtaatgtattaccgttatattcaaaaagtaatgaaggttgaataatattattcttaggtttaattatttatttagagaatacatttttttttaaaactagtgaactaagttgcgctttacgctgtgttatttaatttttttttaaaaaactttaattttctttttgtattggctaaaacattaatataaatataatcttaaaatatttacaaattgtataaattagtattgtaaactatgactaatagtattattattaatataataaattaattaactaataaaaagtgtaaagtgctctatgaacggaataagtactcaaataacaatagtacaatactatgttattttcattcttttttaacaacgcacccacaaaaaactttaataaagagtttataacatttaaattttcatatgtctattaatgagaataattagaagaaaaaataatatttattctgcatatatagagacacaccactctagtgataaaagcttaaactaaattaaaaatttgtgtgagataaacttgaccaaaattatgtctttaactcatagaagaaagaatattaattttggaatgacccaaaataaagaaaatatcattttacatagagctatacttatgacacacataattattttaagacaatggaaatttcttttcaaaaaagataacttattgaagggtttaatcactaaaaatttataaaaaaaaaataaaactttcttagcatcaactcatttatgattttctttatataattatatagatataaaatgattaaactatatttaaaattattttatgaataaattttgatgggtcaatatattt

SEQ ID NO: 42648 - DNA, 2642 bp, Cannabis sativa
aaaggaatggaatgaaaattatttactttctattccattccattttattacctccaaccaaacgcctaagttccaaaacctgttcaaccaaatgcttaagtaaactaatcagccattcagccaatgatccagagacacaatattttgtttttttttctttctttttttgcttgatgagacacaatattattttgttatgtctcagaatttggtgtaaactaataattatttgattcgtctaaatatgtcgtgacaacttatataacatttattatttaatatgactcaaatcgttaataatgacattatgataactctgaagtagtatagtagactagtagtagtaggtactaggtggcaaacggagatttggcaaactaccaatttttagaagtatcattttacaattaattagcgtactctttaaaaattattacattaaactacatggacgatagacaccaacaatcccttttaacattcatcataaaagagtgctcatagataaaagctgactcatctttttggatacgtgaatttgaggcaataatgtttgcgtgcctcaactgcttaaagttggctattcatatttgattgatagtgaattttttttagtttctttcttcacacattatattttaagttacttcagtctttcagagccaataaagattaatgttaaatagctaatattagattgaaataattaacgaatatatctgggcatctctaaatttatttatattcattcctatatatgatacatatattacaacataaattcaattacataaaacaaaaagccacaaattaaactcagaagacgaatggtgtaggtgagaaagctggaacgatcaccggtgcagagtttgtcctgatataattaaccaaaattaaattagttgaaccaaaaagtgataattaagacacaaaattaaaactaattcttttcgtagatcattaaatattttccaaaaattattaacaatagacaaacaaacaaacaaatatataaaccgaaaaagagttgtattaataaatatccagaaaagaaagtagtttcaccttgagtcattacgagaagaagtgtcactcccacgagccttatgaatgggcctaggcccagatttaggcccatctttgctggaagatttgttctgaatcttctgctgattagtagaatgatcttccgagatggcatggaggcccggccgccaatgcgtcgccgaattacaccttctgcgcttggaagaagacacgtggcggccactgttggtagccacgtggacgttagtagtctcctccggcggtggcgctgcccggcagcaagaacccagctccgagaaattgaagaacttcatattttgtaaggtacttgccttagatcccacgtaaactaaagttaataaattaggtgtagatgaaaaatgtgctcttttttttctctttattgggtatgaactaaagaggtaaaggtaagggtggtagtttatgaatcattttctttttcattcttttattcctatttatacatataaaaagtctaggtcatcactccaatttatttatttatttatttatttttgtgataaatacgtaacggacgtgtatcagtgaagccaaagaaagtagttcgtccttatctgaacttttgagtagtgttaactaattatcagttacacaaattatatgggcagttttattatctgtgggcgttattattattattatttgaaaggattatttgtattactagtattcgataaattgtttataataatgttctcaactgtaacatctccatttaatacctgaaccccacaacattaactagtgaaagcatatataattttcagcgtcaccatctacttcaaccaattttttgtgtttggtcattttctatttatgaaataaattgtaatttttttattttgtggcaaaaattaatcgcaaatgaaaaatctagaacatggacaaatattttggaaaacttgtagaaattaaagcatataaaaacggtgagcatcactctagattaatgactcatcgcggtggaggaaaataccaacaattctctaaaattaacgaaaatgaacaaagcaagaacacatgggttgagaattacaggtattttactctccacgattgatcagtttatggcttcaagatctctcagcccagagaattactttccaacaatggaagccaatcaaaaatattgaaacaataatttataataatgagttgttgttaattatataataaagtattatatagtataaaattattgtgaataatataataacgagaaacagaaaaagtagaagaaatgaagatatatagaaagagaaagtaaaatgagaatttctaactcctttactttaatgaggtgaatcctatatacaaatatgaaaaaaaaaaaaattaagaactaaattaaaatattatattgatagtcactttaataattttatatattttaattttatttttttttctatattttttaaatatactttatagataatgttcccattatacctctagatcaatacaaattatgtgttatgcttaagtagaaggtgatggtatattgagcaactcactcataaaagggtatattttaatgaaaaataatttga

SEQ ID NO: 42649 - DNA, 3776 bp, Cannabis sativa
tcaagatcctaaaattggtggctgcaatagacgaagttgttaaattagttaaacaataactaacttaacaaactttcctacgagcgagatctccacgtcaatatgagtcttagtatatttgggatcacagaccaaatgcactcgttgaaaaagcttccagataggatagaaccaggtgaagtcgactcaaaactgctttccagggagaataactagttgtccagtactctttttcggaagagggctagctatcataaaggctcaactcagagtggacatgatagtcatccgggaatttccttctggactcaactatcattccacaagactccttccaggatggacaagttagctttcctggaacaacattcgggagatacctaactttccaagaataacttttaaagaccttttcgtttggaggcactatatcataatgctgctatgtggatttctgtaataatatatataaaaattattttaaagtgtaattttttatttttattttttattttacataattttatgaaacatattagttaaggactataataattttatgaatcaaatggaaaggaataggataaagctaaattttacatctttattgtggttatcgaaaaaggaagagaacaataaaaaacaataatttgcttaagaaactttgtccaaaaaaaaaaaaaataataataataatagaaaaaaaaaaactttaaaggcaaactatcaacattggtaaaataggagctccctaattagtcatcataatccacatattaaacctaataattttgctttcacaattatcaagttttggatttcacatttccaatgatgatctcttacattgctttctctttaaaaagaaaagaaaaaaaaaatcattcatatctcgacttaaaagaagaaaaaatataataattcaaaggcaactaaccaaaactaattatagttttttcaacaaataaaacttcaaacattcctttaggttaggactaaataaagttaccagcaaaagcaaaatctaatattggtctataaaaaaaataatgaagtagctatgagattgcttggctaaaactattaggttacaactttttaaaataaataaagtgtgattggttaaattttttaaaaataatttaaaaaaattaaaaaaagaaacagaaaacattataatgttgttgtttattttagagaataatttttatttttttttgtgtaacatcatattatttatattttggctcacatactttgacccaacttcggacctagactaagatttggaccccgtactcggccctataattggaccccgcatctggtcctaacctcaaattcagactctgtcccccgacacagacttggatctagacccaaaccctgaccataaacacgagttcgcgtccgggattcaaagtctgaggtggggtgggttcttgttacggtatggtgtagactattaaagtttttttttagtaaaaataaaggagaatcactccatatactattttttaattttttttttcaattctacaatttgggttgcttcggtggtttcttcggtagtttttatgtgggttgctatatagatttgagttacgatttaagttgctccattaattgttgggttgttatgtacattttcgtaaaaatacaaaaaaaaaagttttgcagtctaaaataaaaaaaatctctaactcttgaaaatacaattctaaaaattgaaaacacaccccaaaagaatttaaaaagaattatttcacaaatatacaaaaataacaaaaaaaatattattttatagaattctaaatatttttataatttttttttttaattttaagaatagtaaaaaatatataaaataaaaaactctttaaaagtaaaattgtattttttgtaaaaaaaaaaagtagtgccttattaattatcccaattttaaaagctaaaaatggcccagcgttcaacatatccaattagcattcagtgacacttaatttttacctagaaatattactaaaaaaggacagcttattattattattattattattattatgaaaataaatctaaaaaaaaaaatagttagtttcagttataactgtatttcaattattcgtactaaattataaaatcccaaccgtcaaaaaaaactgaggtacgtaatccaacggccacgatgtcaacaactacaactgtatatatacataaagatacaaaacatagagaggtagaagaagaagttgcagtggagctgttaagcagttaggtctgcaaccaacaccaccattgtagactcagctaatttctttttcattttctcgaacaacagacctaactaacggcaaaataatgacagaacagaacccataaacggttacatttcaccttttccctttttttttttttggtgtgtcattccaacttttctaaaaccctaaaaataaaataaagctcagacatggaaagaagaagaagaaagaagaagaagaagaagaagaagaaggactcttttggacccaccattgttttatcctcacaaatctcttcctttgctttcggacccttttttttttcttacctctctccgcagatttcgccaaatttcacgacccataccaaaaaagatttttttttttttttaccaaaaatatgattttcctttcgatttctctctcccctgagaaaatccaatatgggtcgagcttaatgtaggggggagagtgggaaattgtttgattttttggtccaattcccaatccaggtcgatctttggatttaagttttctctccccgaattcttttcttcttttaggatcgactctggtttagggatttggcatttgattatttcatgaattgatattgtttttgtttttagtataatgggttgtataagctctaagcaaccggatccaacgccgtcgccggcgatggacggtgagaattcggcgaaattggattatgagaatcggaaggaggagaaatcggatgatcgtggatgggagttgcggaaatcgaggaaggaagggtctcatggtaggaattcttttagcttcaaaatggggttttctcatcgttacgttgatgccgaactcatctctgctggttggccgccgtggctcagtaccgccgccggagaagccattcatggttggattcctcttagggctgattcttttgagaagttggagaaggtaaggaaagaaatgatttttatttattgaaggagaaaacataatacaataaagtttgaaattagaagagtcaaaacctattaaatgaaaaatatatatattttaaatgaattttttattttaagactaatttagaattttgtctcaaattttgacatgtactaaataaattttgtttccgaacttttaaggctaattctcataaactattgagattattcgatttaaagacttttgtccaatttcgtttaatttagctaacatagtaattatccatctaccaagttgtgttctcccaatttgatatctatcatattgtgtcacttaaatttggatatataccaaatcatgttctttaaacgttcgttacgttatatttatattggtaaaattagtcaaaagtctttaaatctaacaatttaaaagcataatttgatacatattttaatttagaatgcaaaaattttaattaacttttaatattgtttgcattaattatgaaagtaaatttgaggaaaaggcatattttttacactagaaattgctattaaatttgaggccaaaccaaacccaatc

SEQ ID NO: 42650 - DNA, 10049 bp, Cannabis sativa
  modified_base (206)..(219): a, c, t, g, unknown or other
  modified_base (8168)..(8177): a, c, t, g, unknown or other
tttaatccatataattcaaccctaaaccctatttgaaatactatataaggaacatgatgctctcatctcatccaactattcacttcaaccaacttaaacctggttttcatactctgataactagtagatgagagacaccttctatagtgatttcaagcctccttcattgttctgcataatcggcctatagtgatagagtgtcatgnnnnnnnnnnnnnngtcaagtactcaatcatagtgcagaagacggttgtaatatctcgaaaaatataatgatatttaattgaacatattttattaaatacgagttaattagtgaaatatgagtaaaaaacaaataaagcgtaatttattaattacgaaaattttatcggactatgggggtatcgtggataccatttttgaaataaaatgttttcgggcccagcagccgtggaaacttgatggagtggtcagaaatgtcacgacaataaaagatgaattgaattggaagtataccagactagtttagaattttaagttgtcggtttggtggattagttagaaaatttaccaagttacccctagccttatttaatgaaagtgttttattggaggggcctttgttgacgtagatgaagcagaagtggggtttgccttcaccttcaaggagacaatgtttatggatttgcggctagactagaacatgacccttgcaatcataggaggagatgcagatgccaaatgagccgagttcatttcctaggacaaagccaagagggaaattacaactgtaaatattgaaaaagtagggactattgaggcaagagcacagaatctggaaggcgctcttccaactcccactgaagccagcacctcaaatttgaaaaacaatcctctagaatagaattaagttgttccaagttatttttccttacttttcatgggcctctttggattccatttgtatctttgtaggcacacttattttgcccaaactgcgaggcttctttgggtttgtaatatttaaattatattttagttagtccttggagaccaaagacaatttattaaacttttagttagtccctgtgaggattccacatgttaacctccctagtagttgcacgggttcatctttgtaaaagggaaaggaaggtgaacatccacacagcatagagaacatccgatcatcagaaggaccatctggacaacagggtgaaaacacctcagataggctaaccaaggttcctagatctaaaacaacctactctaccagaagaagccattaaaaccttggttcttcatgttcatcaaaacccaaagtctaaaatgaagaataaaaatgctaagattaaacctttcttccataaaagtcttacattcatatatcttattgatcccatgcaactattgaagttggggtctctctaaacccatggtatggagcttatttgcattcaacaatggcgtgaaaggaaataaattacagaaataaaaaaaatccataaaagaacaagagaatagtcaaaaggacttactcactgaaggatcttgaaggagggactaaacggagacatcgatggtggtgatttctcctttgcccaatgatgggggctctgagccttcttaaggttttctggtcttttctctctgggaatgttctcaaaaaatggaaaatgaaaataaatacttgaaagaatgagaaataccctttatataggcttcaatcttatttccctcaaaaaatcaattaaatggaaattaattcccactaaaagcattatgggaaagtgaaaagagaaaaaaaaaaaaaaaaaaggaaatcatggatatataaccatcagcacgttttccacaaaatgtgctttaaaaactgccattatgagagctgacaattaatggtcatttgaagagacagaagtgtgacagtccattactgcacggtacaaccgtcaaagtactaactacatggacttcatatgcctgtcagcagccatacaggtatttaaagtccccatccgtacagatgttcatacggggacttaggggcaaatattatcccaaagtttgcacaacaaacatggcatgactcagccatctcagtaacctggcaaagaaactttgggcagaattttgcctagcaggtcaatataaggagggacagccataaggtggtcaagatgtcccatgcagcctctagctggatgctcaacttgtcgggcagataaaatgagagcaacaccttgcaaggatgattctacaaaccaatttcataaagaagacaagtttcaagggctctggctggatagccaacatgccggccagattcaccactgctaggttaccagccagagatacgcgatccttgatttcgccttcaacaagcttcttaaaatatctataactgaatcctacaaactcagatccagtaaatctatccgagaataaaggaactttatcagatcgtaactatatcttagaaaataaggatatttattattctgtttactccatttatggagccatatgtaacaactcctataaacaatgaaagtattcataaggggagagggccaaaaaatagcgagctatactcgtacttatgcatttaagagcactttactgaaagatatctgtaaacactttgagagtccaagctagaaatcactttgtcttccttagtgatagcccggtattatctcacaagtaatacaactaaaggggagtaggtcatcacccacatacaaggggccaaacttctataaattctgtgtgttcttcatttatttattattctaacatcttatttagtgattaaccatcatttattagactccgagtaagctgactaatttcccagtcaagagagaccaaaaaggggtttgtttgtcaagatgttggaactaaatcgatttctatttcagttcttccatgaaatagatattggtagtgtgttggaagggagcctgtggacatttaataaaattattctagtctttcatcctctttaagaaggagatatttctcgtcaaatccctttgtctaaattggacattcgggttcaacttcactataataagtttgggtatcgcgttgatcgtcttgttaaagacacatgcaattatattgttagtttcattaattatgataagaataatttcaaaggaaactgatgtgggtatttgaaagcccgtgtcaagattagagaaacctttcaatggaagaatgaaggtccgaatagaggggaatgattagttctgggtgaatttcaagtatgagtgtgtacccttgttttgcttcatttatggatttattggccattctgagtggttttgtgaagagctttttgttaaaccttttagctaaaatcataaaatcttatggagtatggatgcgtgctaatctgatcaagtctaatcactactctattggtgcaaagtggcaaagaccgaatggtgcatttccattggagatggatggtagtggtttggtgaatctgaatagtgatgaatcaatgatagaattaaatgagaaggcaattaagggcaattctggcggctttccatctataattggtgtaatgaatcaagagattggtgttaatggataaatttatggcgctaataatttgcctccagctagaattttaactgataaaagttaagggcaaccatttaaataaattttgggaggaaagtggcttcacaaaatgaaggagtattatatatggaatccaaaaggatacgtcctaatggtgaattcaaaattgaagagaatgatgtaactatgggccaagttaagcaagggcctctaaaaagcttgcagtccatgggcctagatgcaagggccactttcaacaatgagtgttctctgctagaactcttatgggcttgggaacccttaggcttttcagttcatattggatttaactatccaaaaaaaatccaatattgtgtttttgtgtgaaatgttatgtaagcgagatacagtgaagctgttaaaatgaaaaagtcattttgatatgtgctttgttatggagtcccagggaagggggtggtattacaatgttgtggaaggagagtgatgaggtttcgttggcggggttctcaaacaataatattgatgttaatgttaagatggaaaggggaggttattggcattttactggtttatatagggaactaatcaaaaatcttaggcataatatgtggctttgattcgtgatctagcaactgtggaaggaccttgtattatgggagatgtgaataatgtatgtagtcttgatgataaaagaggagggcataagtatcctcaagctcttattcaaggttttaataacgctcttatcaatggtggtcttcatgatttcaatcttgagggctatccttttacatgggagcgtggaagagggtctgaccattgggtggaaatgtgtattgatcgtgcaatggttaattaagattggttatcgtgtttctttatggctaaattatataaccttgaggtgagcacctctgattattgtcctattcttttaattcttagtcctgctattctttttacctcaaaatgcaattttagatttgaaaatgcttggttaaaggacccaatgtggctccaaattatccatgattgatgggagatttaatagggtcaaattttgaaagaaaaatttagattttgttgtgagaagttagctatttggggttatgagataactagaaatttaaagagtcaaattgctttgtgcaaaaaggaaataaaaaaatacaaggaaaagagagatgttgatttgtgccatttgttcaaagaagctaatgagaatttgtctaagtttcttagcatgaaggagtcttactggcggtaaagaacaaaataactttggctcaaagaaggggatcaaaacaccaaatatctccatgcttcaacaagtgtcaggagacgtaataattatattacaatcctttgtaataattatggagacccggtcgattggaatagtggtttatcggaggtcatggttgattatttccataatatattttctactttagatgtggattgggaaagtatggttgagagtgtccattgtttagtcactgatgtgtaaaataatgaacttctctcacttgtaagtgctaaagaaatacagactgctttgtcccaaatgcaccccgataaggttgctagcccaaatggttttagtccaagttttctatcaaaaatactggcacattattgggcatgatattgtgttagaggtgtagaagttctttgttactggttgatttcctttaggtttcaatgacacaaatctaattcttattcctaaaaataaaagtcatgcttatatgagggatttaagacctattgctttgtgtaatgtcatttataagattgaaacaaaggtgatagctaacaggttaaatttctttcttaattcaatcatttcagatactcatagtgcatttgtgctaaggagattaatttctgataatattctggtttcatttaaagttatgtattatctgaaaaaggaaacagttgggaaaagatggctatatggccagcaaactagacatgagtaaggcatacaatcatgtggagtggccgtttcttatggctattcttttgcggatgggtttcgattcaagatttattggtctaatttttgagtgcatctcttctgtgaggtatacgattgttaacaatggtagggagattggcctattatacccgagagaggtattagacaaggacctcctctctcgccttatcttttcataatccgtgctaaggtttttcttctcttattcgtaaatttaaatatcaagggaagctttatgggtgtaaagtggctaggggagctccttccattttccacatgctatttgcgaatgatagctattgatattgtaaggccaatgagagagaagttggctttgttattgaacttctttctttgtttgaagctcatttgggccagtaggtaaattatgataaatcctccatctttttcagtgttaatacaagtgttgcagttaaaagatctatttgtgagtttattggaattaaataagcaggcatggagagtaattgcttgggtttgcctaatactatgggttgtaataagaaggccttggttggctttttgaaagagaagattcataagcgaattcaaagttgggatgagcgcttgttgtcttgaatgggaaaggaaattcttattaaaattgttgtccaagcactgcctacttatgctatgagtatgttccttctttcattggatatttgtaaggatgttgagcatatgatgagtactttttggtggaattcatagtctgctaagaagagaggtatttcttggatggcttgggatcatttggctaaaagtaaatttgagggaggtatgggttttaggaggctgcatgaatttaatattgccatgcatggcaagcaggggtggagattcttaactggttttgatagattggttttttgtgttttcaaagccaaatactttccttgtgataactttcttaatgctgaattaggaaataatcttagctatgtgtggaggagcattttggaagcttagaatcttgtcaaatctggtatctgctggtgcattagctcgagttctcaagttaatgttctttctcagtcttagcttcctgatagtgcaaatccctatattgtttctcaacatcctggtttggatggtattactgtgaatcatcttatggtttttggtgagcatgcttgggataggaatattttggaagacttgtttgtggcaagagatattaatcttattttaagcatccctataagttagagagatatccctgatagatggtattggaatcaagaaaccacaaggagatactctgtcaaaactgcctacctgctacagctggaactttctggcgctcctcaaattaataataactcgggttattggagaaaactatggaatttgaagattcctctgaagtgaagaatttgttatggcgtgattcaggcaactatcttcccacaaatgtcatgcttattaccaaaaaagtaagtattggtggattctgcgtgtcctctttgcgaacaagccctagaaacacttgctcatgtattggtggattgtgttattgctcgtaattgttggaagctatctccacgagggtacaataccagtttctaatagatatttttctaattggctgcctaacatctttgacaatttttccaacaaggttgcaagaattattaatgtcatctattggcaactttggagacacaaaatgaattggtttggaacaaaactactttagttgcttttagcattgtaagatcttttgttactctgtttgatctatggaatattgttcatgaagataaattatctactcctcaaagatctgttggttctgttagggaggttgagcacttgatgaaacctttgccaaatacgatcaaaattaacacaaatgctacaatttttgacaacacaacaaaatatggtttttccattgtcattcatgactctgctggtgtgctgatggagaccgattttgctgtgtggaaggccttgtgcgtgcggaggtggtggcgattggggtgaaagaagctctcagctggttgaagaataatcctattgttcatgccaaagtaaaaatcgaatgcatcaacgttgccaatgctaattataattctattgaaatgttttctatgtttggtattattatttataattgtcgagaactccttgcttctcttagaaatgtgtcgatttgttatgttaaacagtttgttaatgtggtcgctcattgactttctagaacatcttgttatcttcctgaccgtattattagagaggataattgcccatgtgatttgttgcgatatgttgattgtctcttttagagtaatttgcggcataaatacttaagtttaactcccagttgcaaataaatacctaagtttaattttcagcggtaataatacataagttataattttaaaacttctgtaggtacttggttaaataaattgccatgtggtaattcctgattgatccaaatcattaaatttttattatttaaaaaaaatagttcaaatataccaataagaaaatcatgttaatatggcttaacatttaacggttagatacctacagagttctagaaatnnnnnnnnnntattattaccgccaaaaattaaatttaaatatttatttacaactgagagttaaacttaggtatttatgccgcaaattactctcttttttaataaagttcaatctttcctctaaaaaaagggttaattgcggcaaaacccccaatacttttatttcactagcaattaacctcaaaaactcaaattttggcggtaaagcccccaaaactcgcaatctgttagcaattagcaattttcatccgttttcatctgttaactaccaaaatggcagtacacgtgtatcgtccatgtgtatacacaatacacgtggcacaattttattagtccacgtaaataattattaaaaaataaaataaataatatttaaaatttaaaataaatcatttttaaacaaataaaaattaaaaggtctgttttcatccaaaggtctctaaagaaggggttcggattccaccctctttgtaaatctttaggccttgtctacttatgctttgcggatgatttcataattttttgtaagggtaatttcagttggtgaaagaggcattccttttatttagtgatgctacaagtcttattgccaataaggctaaatcaactgtatactttgggggtatctcaactacttgtaagcaaagactgacgaatattttacaaatggaggagggatctttcccattgaaataccttggagttaatctaagaccaaccgaatggcgagcagctgactgtggtattatcatcgacaaaatgcataaatacatgcacacctgggctagtaggaacctctctttcactgggagggctcaattggttcattcggttctccttggagtcagaaattactggatgagtttgttcgtgcttcctcagaaaatcatgggggctattgacaaatgttgcagggacttcctttggggctccaatggaaatagaagtaaaatgcatatcccctcatgggagaaagtctgtcttcccaagaactctggaggtcttggctttaaagaagggaagaaatggaacatatcacttatggcgaagtatatttgggctatttcaagcaaacaagaaaacctttgggttagatggattgatgcgatttacttgtgagggctgagcttttggacagttgatttcaaacaagacgcgagctggtattttaaaaagatccttcgtcttcgatcaactgttaatgaaacttgaattaatgcagctgtaaagagaggtaaattcagttcaaaattgttttattactcgtatattcaagctcacactgttgattatgctagaaacatttgggatagaatggttcttccaaagcataggttcattggatggcaaatagtgaatgaccagctgctaacaagagacaacatcagcaagtttatctccataacaactgatctctgtccggtctgttgcttggaaaaggagacacaccatcacctgtttgttaactgttgtttcacccgtagagtgatcaaagagataacaagctggtgtggcattttttactggccttccgacatcagagagtggttatcgaggtcttccaacagcctgcaagagaaagtgctcaatatagtagttttggcgacattgtacactgtttggactaatagaaattgttgtatctttgagatgaaatgtaagacagctagagccatgagtaaagagatcaaatcttgtgtaaaaatcaggttcttaagcggctgtaatgggggaaaagggaagcttgatagctttatttttaatgtaatttcaggttggctttgagggctgggggtttcggccatctgctttgttttgcttttgttctttgtattgttcttgtctgtttgaataaagaatcttcttcttcaaaaaaaaaaaaa

SEQ ID NO: 42651 - DNA, 1870 bp, Cannabis sativa
agataatatagactttaaacattcttttacatgtgcccaatgcaaatggatatgatagaaaaaactatactaaatgcacgcctggtccaaccaagtcttctttttcaatttttgggcttcgaaaatcgaaaatttgacactcttttttgctttgctgcataaagaagcatctaatcatccccaatggctagcatctgcagctttcatttgtgcatgccattcccatccaaaaactccaagacaaaaatgatatctagtgtgtgtgtgtgtgttgggacgtttgtctttgtcacacattattgttcaatcaaagctaaaataaacaaacagttgcccctttccctctcctaaagattattattcctttctttctatctagcctttgtctttttttgcactaatactcaccggcccccacattctcatatgatctctttcctatttccaaagctaattaccataaccaaaagctaaaaagagcttttggggacaaatactgacagggcattgcccaacccaacccaccttttattcctccaactgcttccttccatgtactactttcaacattcttcttggactcttctcccaacccttttgctccctttacttataatgctttcctcacttaactcttcttaataagatttggcctcctaaccttttctctttggattattcagcttagttgccgattcccattctttctcatcaaacaattataatttttgtttatatataaaaccaaatcagacaatcttaaccgaacaaaaacttccctatatataataagtacatgcatgtagagcttataaagctaaaccatttatgatatatttcaaaacttccttataagagttctcgcccacctagctagccaacttattagttttgaatagagctatatatatagatagactaagtttcataatttattaaacagtgattatgggaatggaacgccatgaatacccttctcaagtggttcattcctccattgctcttcttcaagagcgattcagagagttacagagagtgaaagaaatgagagaagaaaaagagcttctcagattgctttccgaacccaacaacaacaatactagttatattaataaacagttcaatttgatgaaaagccttacacctgatcagtactactacgagccagccaagttgatttttcaacctgatttggtgcctcatcaccaaacaacaccactaccaaagccccaagtttctctctcgttgtggccaacgtttcagaccagctttcatgaggaacagtattactatgttaataccaatgagatgagtcctgatctgttgatgaaatcatcatcatggcccatcatagtcaactccccatcttttcaatcttctatgaacaaatcccatgattctgttgatcatgagcctgatgttgatacctctcttcatctgtaaaacaaatattatttagttacatacactagctatataatgcttctctttctcttttgtttttttgttccctggtaatgtagtggttaaccccatattatcaattccatacatgaagctatatatccttgataattaataagtgtatcccttattgctatatataatattactaacaaattacttcagatcaaatgcttgtttttcaagtatttgtataattaatccagagatatctgaagcatgtcatgactcatgcatactcaaaatcaaagagtacacaatatccttctttcttctttatgacctacgtactcatgattcaattacacctttttagaatcataagcatttttctcccattacttagacatatataatatatatgaataataatatatggcacctgtagtgagaaaatgtttataat

SEQ ID NO: 42652 - DNA, 2091 bp, Cannabis sativa
ctgcaattaaatagtttactaatagaaaaacaataaaagataatatagagatacaatcccaatgggttgatgatttgataatcatgaatttgagggtgatcctccacacgttaaacgaattttcaatttcaaatactagtctactactagagaagaaagagatgcccttagtaaacaagacccccttttgtcaaaataaaagcaaacgtgcctagatgctttcctgcataatcttaacaaacgtttcaatataattctccaaaaaaaaaataaaatatgatttctgtaagtcattgagctgccaaagttcgaagacttattacaataccctttttgaattactttacttactcaaaagattcttcatttttccctttccttttctaaccccaaagctaagaacataaaaaaattgtcacctcaactgtaaatatcattggcttataatatggcgcgtgaatcaactatatataaatatatatcatattcctctccaacaagcaacttattatatatatgctttattctccgacaagtttcattacgtatattagtgctccatcctatagtcaaatcttaccaaaaatacatgcattaatattcttccctcaatcatatatacataaatttataatattacgttctctatactttttccacaaaaaaatagatatatattaacttgtgaacatgtacgctataagagtcccacatcgttaaataacatatatatgtatatatacacactacatgataaaattcacatagagaaaaggagagatagactacacaattaatctgatctgagtatgacgccgatcgttagcaagatatattgttcatcttctgaggcagtgcttgtggtaagaagaaggcctcttgtagtgaacggtggaggttttgtcgtcacagattgtagccaaagggttattttcagagttgatggatgtggaatcagtggccctaaagaggaactcatactaagggatgctcagggtgaagctttgcttctcgttcgtcgaaaggtataatatatattagtaattgtaattatatatgaaatgtaacgtgtaagtaagggtgaggattttgatagagaaaatttttatgcaagcagggaggaattgttgaagcgctaagcattaattacaagacgtggagaggtcacagctttgattacgaaggagcacccaagttggtttttagcttaaaagagccaactaatattgttaagtcttgtttggctaggaataatttgattagaatctcaattggaccaaagccaaagggaataaccatttgcactaccaaaaactgggatttcgagatcaagggccactttcccgatcgtgattgtagcatcgttgattctagatcaggcaacgaagttgcgcgggtaattattattataacaattatatataaacacatatatacaaccaaattgatcctagctatagctaatcttttttaattatggtgtaattagttaattactgataattaatgaggtgtggtaaatggtgcagattgggattaagaaggaggtgagtgaattgatggataagagcaaggacgtttaccatgtggtggtgaaacctggcatcgatcaagcttttgtttttggagtaattgccactcttgattacatctatggcgagtccactagctgctagctagtatagcttttaacaattcgtgtatattatatattgttatactattaggcactagtagtgcctagcatcttatcgacatgtcgcgttgcgattggctagcaatactctttaaagctattatattaaattatatgagattcgataattagttagaccatattgacaaatattaggagggtgctaggcaccactactggtgtcctttagcattcctcagtgttatacgtatattaattattgccactattctttctcttcatgtaaatattaattaatatttgattaataaaatggtggagctttcttcttgtaattaattatttcctaccacgtacgatcatattatatatgatcacagcttcacacaaggcttgcgaattaagctgtttatagcgcattatatatatactag

SEQ ID NO: 42653 - DNA, 2427 bp, Cannabis sativa
  modified_base (673)..(679): a, c, t, g, unknown or other
tatatatatataaacatcatagcataattgaaaatgaaagtatattattaatatatgtataaaaatgattggcaatcttcttaacaagacattatataattcttgccgaatttttcttttttgacttttaaaatacctttacatacatttctatatatgagatatagtttgtccattgaatttttcttcttctttttttttttttttctttcttatttcaaaatttttgagataacattctcacaaaagatcattactaatacactcctctctctctctcataaattgaaaagcattgctattaagtaaataatactattaatgtctaacactactacgagataatattataattagtaataattagtaatttttaatatgtactaattattaaaattaaatacgtaacaccttgtacttaatttaactaatgacaatatttaacacacttcgtatataatatacaaggacaaacctaaattgtcactacaaaaatatttacatttagtgacaataaaatttgtgactaaaagtaaaaaaattgtgattaattataaattatcacctatgttatgattaaaaggtccgtgactaaaaatattagtcacaaaaattacaatttattgtgactaaaactaaattaatgataatttgtatctaaatattatgtttnnnnnnnaagtaacattttgttgtgactaataaaagtcatatttagtcacaaaaagtttacgttataactaaaaaatcaccattaatttttttttttttgatagtgtgcaaccaaaagagggccaccatagtcgtccctcttcacaatttacttacttttttttaatgaaattatacttaatatcatattttttaaattatgaaaaacaaaaactatgcatttttgtgctcccatgccccctttaattatttttattattattattattattgcattttgacctcttaaattaatggagctgctacttctgtagatggtaaacaccgctaatgctctttattagcatatttctcaaaatgggtcaatagattatgatccattctattttccaccccatatgaaagtaggttgccctttcttcaagctcatctatttctcccctaaagtcaatgagttcatcataaatatgtcaacaaaagaatgattgtagcaaaataagaccatttaatttatactaattgattctcaatctcttcttgatttttccatatgttgatagagacaataatgataccatgaaagctttttaactttatattaatatatattattattgttaacatggcctaattagctttaaccatatagctcttgacaaaaaaaaaaaaaacattgactatagcacatatattgctagcaagctatatacaattatattttatctattgatcatcatgaccaataaataagagatccacttataatttgccacacttggattctaggtgaatgtcaacattttgttttggaatgattttagtaatttagtataatgctactgctagtcttatttagtgacatggtagataaaacatacatgttttgtccagtcaatttttgagttagttttttttagttaactaacttgggtacctcttattttgagttatgcctatataagattttgtatagtactgcttctttaggtgacagatttataaataaatttatatgattattacgtttataatgagcgagtaagattgctaaaaagatgtgtatttgatcacatatttttcaagtgattttatttgtaagatacaagatattattgttgatgagctcaaatcttgtattattgaagatcgaatcaaactttattcttctattattgaagatcaaataaaattttatttctctattattgaagatcgaatgaagcttggctaaagggcagttcctcccaggtattaatcaccataaaaaggtgatgaacctcgttaaacctctattataattctaagcaaatatttgcttagaattataatagagttgttattgcctgattattaatttaaataataataataaaattaaatataatacaatttaattatatttttaaatatataatatttaatctaattttaaatttatacataaaaaaaataccaaactaattttatggaacaacaaaatgagtaaataagtttagatattttaaataataactaataaatttattataaagtataattaattaattaattaatgtctaattcaaatttaaattagaatttatataaaaataataattatctaatttttttatacttttaaattaaatttaaatatttaactaatttttttaaattaattaatttaatagtgttagttttaaccgttaacttaaaaaaaaacttttaattaacaattttcgttaaatacctatatttaatataagagagatcata

SEQ ID NO: 42654 - DNA, 2104 bp, Cannabis sativa
ctgaaaagcacaataaaagtgaccacggaagtccacagatctaccataaggtaacaataaaaaactataagacctcccctcaaaacaatagcacatcataatcaattcatttcctcaaaattgaccatttttggcaataattagaatttagcaaattgtttatcagtatacacagaacacaaacctggaacagtgacaccagttctggcatcttgaaaatagatgatgcatacatcatctccacagcaaaattaatagcaggtctacacgaatcatgaggacagatgttgtctacacaagttgacacctccatgggagaaggcttatgccttcctgtataagcatagttcaagaaaaccagaaaagcttcatacccaacattcccataaggcaacatatctttcatacagtacttgggtttgcctcccttatcagaaatccctcctttatctttcttgaaaagatcattaaagaaactactcctggaagccaatatacagcggtgaactcccactggagtttcctcaacaacaacttcagcatcactgtaatcagaagcagaggcatcaaccaagagtagctgctccaagctagaactcagcttgtttaggcccatgacttcaaggctaggaaacacagcctcagagccagaggaggaacacaagttttgaccatgagagccatttgacaagtgggaagatgaactaaagctcaaagaagatgagggttcggttgaaatagccattattattattttatattgaaattagctttagaacaaaatccccatcaaaccaaaatctcagattcaaatattgaaactaatcaatatctttctctgatggatagaagccaaaaacttaaacttccaacgaaattttaacagaggtttgaattttatacaataattttttactacagaaaggtatccaatctaatggtctctccacaaataattttttaattattaacagtagactagaaaaaataagaaaagaaaaaaaaaaaccaatagggaaattaattttaataaaggcttgtatgaaataaaacttacaggaaaagtcagatcacaaaaattccctacaaaattgaaaaataaaaccacatattcgaagaaatcataatgaattattaattacacaagcatatatctatcttcgatagatcaaacaacactgttaaaattttgtaaaaaggaaaaaaacaaattagaaatccaaagcaacttcaataaaccaaacctctcacccataagaaaaaagacaaatgggaatccaaagcaacttgaataaaccaaacctcaccccaggaatttttttttaaaaaaataataaattatatatttatatatagcttttcggtcctttcccaggaaagttactgagagaaaacagaagaacccaaaaacgggagtgtaatgtaagagtactgatacccgcccaactacgaaacactgagagtaatttccaaaattttgacggaagagagagaaagtaagaaagtgaggaaattagtagtgacgatgggaattggggtcatccccatgaatacgatccctccaagaaggttcatttttcgctgtcgtcaatttaataagagagagagagagagagagagagagcgaaaatgttagagagagagaaaaagagtggttgcaaatatttttgtatatttgttaaaggaaggtgaagtcgtgtatgtgacgactggaatggcatcacccttcgcagctgagctctgctgacgtcacaaatgtcgtcattgtagttgtgcgttagcgagagacgtattattgacttttttatttaattataaaatggttaaaaactatttgtgactcattattgctcctaactatcccataaatgtcattacgtccttaacacttttatattatcaatcaaactacttttctaacacttgggttgagtgctaattataatgaagatttttttttcaaaattaaccaaatgcgagtaaatattattttcaaccttatattttataaaaatgattaattagacaaaaattgaattttatatttttttaaatggtacaaagaggaccctgattttttgtcataataaaatttaataataat

SEQ ID NO: 42655 - DNA, 3321 bp, Cannabis sativa
tagtgatctttatagtttattgtaataatttttaaggtgtatatcgttataagacgatacatctaaaaaatattaaacactactaatattcaataataatactctaacaaaaatgattaaatttaatttcaaaataaataaataaaaaacaaaaataattaactcacattttccaaaaagaaaaaaacctcacaatatttgccaacaaaataagaacatctctattaatgatctattcaaatataatttattttgtaaaaaaattgatctaataatagtatactaaaagtttatttaaatttgtctcacattgaaactaaatctaaatttaaattacaatatgacatgcaaaatttgcatcaaatatgcactatttttaatattttatttaaatttaactataacattaaataaccctaatataaatggaggtccaatataaacatacataattacatgatttagatggccgacgatggagggcagccggcttatcatttatatttgtataaaatataataatatatatgatgaactatcaccgtattataaaagaactacttctttatttatattatgtatagcatagcacaagtgaatttgaaggaagtatacatacgtgcacagcagtattgtacactacatgcaacgcaacgtgggaagagtctatattatatatacatttgtgtacatgtctcatgtgttcacaaaaatacatgataatattatttttattttttgttgagaaaatgataatatgaattgatcgtaatagtttacccatgtcgacaagacatgaatattcttgattatggtcaagcaaagtataaaaccttcacaccaagttatataatatttcatgagagtaatataaagtaatcaaaagtgctaaagaaacatctctaacaatattggcttgctatttttgaaaaatgaacatatgctttgctgtggatgctaagaaatcttaaagggttaaaaagagaataagataaagtttgaaaagcttcattgtcacattatgtaaagttctcgtacaacctctgcctacataaacccaactcagctcgttgtttttctcatccagagcttccaattctccaagaccaataataatattacagctttgtctcaggatttgttgaaatcagtttctggccccgtacagtacaatttgagcttcaatggctaaataccaaggcagagcatttcagctttggggtcttgctatttgtctttcattgtctttgatccccaagagttttgccaccaattttacaattgggagcgcagcaggttggagtgtttccaatgcacaaagctacaatcaatgggcagaaacgaacagatttcagattggagactcgataggtacgtttatcatataatttacttctgtctttttttctgtggttataaatatgtcgatctttatttaattacacctgtgaaagctcaagaaaaaactgcctgtgatcacatgatttgcctattttactttttaagaaaaagagaagacaaaatctttctcatgactaataaattctatcattataaccatgtcataacaaacagaaacatatctttcagctatcagctatcactcatacatatacatgatagacattgatcttttgttttgaatatatggcgtacacagttttcaactacccttctggccaagactcagtgcttctagtgagccaggacgattacaacaactgcaacacagatcaccccatccagaaaatggacgatggccacacagtgttcaccttcaccaaatccggctcccactactttattagtggcaacaaagactactgtctcaaaaacgagaaggtggttgtgacagtgatggctgacagaagctccaacaaaaccagtgcttctccaccgccttccggctcggcagataccaatccatctcctgccccagaagcccaacagtcaccctcgccaccagctccatccgagattaatccgactccagcccctgccagtgaccacactccaccacctccaaattctgcttcttctttggcacacatcacctttcttggttactttggagcatttgctgcttcatcacttatccttgcctaactccatggtttataatttttcaagttgaatttctttcctccattattgacaaacaagtctacatttccttgagctcagtagattcaactgtgctttttaaggatttggcttggagtttgatatgatttattttgtgctatacagtccaataagctgacaaaagtgtgtaaaatatgtgtcatgtatcgggtgtcttttttaaaaaatattatgtgaaaagcaacttatattttctatgtttcgtatttctaaatatatttaatgttacaggaagacattattctgttttccagcttatattatttatgttattaactaaactaggaaacaaactccacttaccatgaaggaagttgcattttgtttgataataattaagtcaatgaaaaaaaaactgtcgaagaaatttgaaaacaaatgttttttttttttaattttttagatactataaaaggtaaataattttttttaaaaaaaaaatgtattactttattaaatttaatttataagcctaattatttaataaatgtaccgagaactccaaagaaatctagacaagaaaatcattatacaatttttatctaaaaaaatcattcaaaagagtatcattaaatattatagtaataaaaaggagagatttttacataaatattgaattttgggcaaaagtttataattttattgttacacagaattttttacaaaaatatactgtctttttataaaacaaccataaaataacaaaacagaacaattaaaacaacagttaaacaactaaaaagcaaccgtaaaaacttaacacagtacacagaataaaacttacacagtattttattaaaaaaatatagtaaaaaagtaaaaaagttagaaatttcaatatgtagtgtacaaactccaataaaagattagcagtcaaagaaagcctaaaaaaaatgaattgtatgatttcaaaattattattatcaacgtatctcttttgtagttgtcggtacattcaaagataatgttaccaccatatttcacttgtgtttgtcattagtgtccaacataatatgtttgttttgtaaaataaattaaataatgagttaactactgatcactttatatatgaatcattttattatataaagtattttttgaagttaaaaataaaatattaaaaaaataataaatttacagaactctaaaaatatttataaaaaatattaaaagtga

SEQ ID NO: 42656 - DNA, 3470 bp, Cannabis sativa
ttgaatgatgttagaaatacattttagaacttctgtctatgaaggaacttaggtggtttgatttagggaatgaaaatataggaataggaatggaaataaaaatggaatgatataaaatttaaaattcataaaaaaacttaataaaaaaaatcattaaaatttttccacttgttaatttgggatggtttttttttttttcgaatagtcattccactaaaatggtagaaatacattccaatactttaaaatgcaactaaataagaaaataaaataaaaatgatttcttttccattctattttattaccttcacccatcagcttaattcattcactatacagaagattaaggacgttattttcaaattataacctcatttcgggtcatcttttggatgattctgtaaagtgaaaatcactttagggttatctcgtaaggcagttttgacattatatatatttgataggtaagccaaattttcatgctgatcattggcaattaactttgtgtcattttgtgaacttgtcattgcagattggatatcgccatatcgattgtgctcaaatttatggtaatgaggctgaggtaaatgcaccttgtcttttttttctttttctttttaataagggttccctagctttaattgtcactctattcaagtcctgttgtgctataaggagttaaactgccttaagatacaatatttgtttggattatgtctatatttttcacttatttaatttaaacagttgtgattctttagacggtaatgttatggccatggatatataagtgttagatgtggctcagtatcatgatcaaatgtcaaatgtctttgctaatctgtgtcattatctaagcttgtcattgcagattggattctgctatttgctaatctgttctatatgtcatgatcaaatgtcttttaaaatttatattttgtattcatgttgttcttttaaaaaatgaagtttgtttcatcaaaaaaaaaaaaaatgaagtttgtcatgtttgttaaagaactcttctggttttctgattctattttctaatagattggcttagctctgaaaaaactgtttgaagaaggtgtggtgaagcgtgaggatttgtggatcacttctaaactatggtttgtgtttattatgttatatagctcttacgttgtctgcccttgttggagcttctttaactttctttacatctttgtttcaatagttcattgtacagttttgaacactattggcttaaacactagtactatgaactgttgataaaatttcttcatattgtgttcgaagcctaaatttatttatttgcagtttgagtaaaataataaagaatattaattactgagtgggtttgtgatctgataaacaaatgaactgaaaaataacaagttgaattctttatcttattcttggatataaattgaaagaaacatagtttaaactcatttatgaatagatgttattggttacacctcttgtttcccactatatccaaacagaggctaagtgtcttttacattttctttacaatccacaggaatcgtgatcatgcaccagaagatgtaccattggcattggatagaaccttgggagacttgcaacttgattatgttgacttataccttgtatgtcttactttctaacttctaagcttatttcccaatacttttatatacaatgcagtgcagaagcaaaaatatgaattgaattactttatttggattgtccttagttctagcaaccaagcttatttaaaatggagattttcttaagcaacatttcaagaggaattctacttagtttggataaacacgattatctttttgaacagtttaagataattattaacaaaattattccacaatctaagttaagttgctcaaattttgaagatacactggccagtgaagatgaaaaaggggtcagtaggcttccagcctgagacccttgatcaaacagacataccagccacttggaaagcaatggaagcactttatgattcaggcaaggctcgagctattggtgtaagcaatttttctaccaagaaactggcagatttgctcgatatagcacgagttcctccagctgttaatcaagtggaaattcatccttcttggcaacaagccaagctacatgaactttgcaaatccaaaggagttcaccttagtgtaagttgtggctaaatcaaattaatttttagatttaaatggttctaccttgatctcaagccaagtagttcaccttcagtttacatatatatcagctgcattgtacatatcttcatatatacttgtttcaggggtattcaccgctcggttctccgggcactacatggataaaaagtgatgtccttaagaatccaattctcaccactgtagcagagaaattgggtaaaacccctgctcaagtagctctgcgatggggcctgcaaatgggtcacagtgttcttcctaaaagcacaaatgaagccagaatcaaagaaaactttggtgtttatggttggtctatacccgatgacttgtttgccaagtttgccgagtttgagcaggcaagtctcttcttgataattttctttaatcatctaatactcacctcacaaagcaaacaacttataattttgcatcatcacctatataaagtgattttactattatgaaaaattacttgtctgataaccaatttctttttttgttaaattttttccgaatttcaggcaagactccttaaaggatcctcatttgcacacgagacttgtggctcatatcgtaccctcgaggacctttgggatggtgaaatctaaaaagttaaatcattcttaaaccaaatggagagaaagaacagcaaaacagaagacaccattggcttgtttcttcatttaattcttctcaaacatttggttgtcattagacctcttctgttttaatttcatggaaaataagtactggatttggttatgtttatggccttggttttctttgaatatggtcgtggtttacaatctggaagtttaagaaatgagaatgtggaaaaatgagctcattgggagcaaaataatttataaacgaggcaatattttcggcctccgaacagaagattcaaatcagctgtgaaatgctgtgtcttaaagtagtgtttaactaattaacattcatcatgtagatctttcgtttgattattactaggtaatacgcttagctccgttattttgtttattttttaatactaacattattattttcaaaaaataaaaaactatatataagtgcaaaaaaacaaaaaaagaagactattttaattaggctaattaggatttttgatcattgaattttgatatgtactaaattatgtcctctgattttttaaggtcattaaaaataccccttaaactattgaaatagttggatttaaggacttttttccaatattagtaaaaaaatttaacatgaatgaaagtttaggag

SEQ ID NO: 42657 - DNA, 3867 bp, Cannabis sativa
gaggtatcagatccaggaagtcttacccaaagtatactcctgcaggtaaacaaagttcattgtacataaaaagttacaccaattataaggaactaataatttcaacttttttcaagactgaggctgaagtcaagagactggatcagttaaaagcaagtaagatgaaggaattgttcttcaaaaaacagaatgagcttaaggaaatatgcaatcgttcacatatggagattccttcccgagcagaaatgaataacataatcaacctcattaactcaggtgggtgtactgataaatccttatatgataggaaaaaggaaaaagataaatgatatttttccaaagatttaagtaacccagaaactgatctgaatttatgtacaataataggagagattgaccatgctgatctcctcgtcagtatggatgaacagatatcaaaagccaaagaagaagcttcaagcagaaaggctataatggagaaggcagaaagatggatgctagcacgtgatgaagaacgatggttggaagagtatagcagggtctgtttccaatatcgttgttttcattaatgtcttccaacacaataaagtgaatcctacgtagaagtttattaaacaagtattaataactgtgtatgatctacattatgtatgtgcctgtgacatttccatactgatttattctttcaggacgagaacagatactcagtaagcagaggtgctcatagaaacctaaaacgagcagaacgtgccagaataacagtcaacaaaatcccaggtaagataaaagaaaatatgaataacaggcaaaggtccatactaaaaagcacaaaactgaaagttagtgatactattgatgatcaggaaaatctcaaccaaagaaaatgtattcagatcatcttaagaaaatgtattagaattctgattaagatgactctctctacgcactgttgacctgcagctctaatggattcattggtagaaaagactagaatctgggaagaagaaagaaataaggttttcctgtatgatgaggtatgatgaactaccttttatgattttatggcaaaatttttgttaaaattttcatttcgactttcaaactcaaagcaccatcttaaaatgcaccacagatttaccatttcgactttcatgaatctagagagtatacattcatatataatgaagtttaagacataaaaaaataaaaaagacacgtatcttactagttcatatatcattagacttaagtccattaccgaagaatggttctttttttttctttgtgaaaacaccgaagaatgatacaataataggaaactttacttttgtgacagacatagctaccaaaataattcatagacacaataatactgaatttgtcaactgtcaattacaatttaaacatcagagttaaattcactaattagattacatcagcccactaaaacttctgatgtcaatgaatcactaataaactgctacaaaatcctacaatttatccattattgattttggttattatgtatgaacagaaaaatgttaatacaaaatttaggccataaaaccctaaaagaaaactcttatacaggtaccactcctggcaatgttggaagaatataatgtatttaggcaggaaagggaggaggagaagtatagacaacgggtaagcattattttaagtatgcactcagaagtccaaataatcactcatatataattatcatacgttttatgtctcactagtgtttgacatcctgaaatttgtatgtagtctctatcatcacaggaaaagaagaaggtacagacccatgttgtagtccaactagaaaattcatttgggccaaggccaagcactggtagtaagcgaatatcagaaaggagcctgaatggaggttttaccagtcctatgcctttaaacagaaggatatctcttggaattcagcaatttggatcaaacaatattagctcaaccactcaaggtatatccttcataaaggaaggaaagaaagtacaaagacaaaagatgttttcacgacctggctatgctccaaatgttagggatgaaacagcttcagtggtatcaacattttccggcccattttcaccttgaatatagaatctattttcccatctgattatcatatcacagaaaatttcaaccccttttaccagcaagaagccaagtaccagaacaggataattggtggatactgacggaaaataagacttaggagcaaataaaatttaggatggtcgatttttttactgtcactagtacaatagagtgtgcagttactgagttcaaatctaaataaaatttaattccagtttgtatttttctccaaaatttaaaataaaacatgaattgagcaatatatgattgccaacatacccatagcaacagcatattgtgtttcatctgtatttctattaactaatattgttccaggctcctagtacatgtatatctttgtatatgtgcaatcaactttaaaaacaatatataaacaatttggttagggttaccgtgctcagatcaacagccataacccaaatgcctctacatgcgctccttcagcactacatgaaagaaacacaaataagtaagtggttcaatcgtgtaaagagtacattgttcttcataaattcaacagccatattggtgaaaaaaaatcaaaatttcggtctgaatttattcttaaataatcacctgaaatggaactcaggaagaccggaacagaagctttcacccattctttgaactctcgaaaattccatatcaaatcaaaattttaacgaaaactagtcatggtcttaatctgtggtagaacttttggtaaagaaaaataagaaagaaccataacgatagcaatagtcaactactcaaattcgccagaatattccaaaaactataaattaacatatatatcagaaccatttagaaatatgacatcttaaaaaaaattagtgatgatgtttccattacagccaaaaccatcaaattatcaatttaagctaactctaatcaaaatcagctgaaattcacaccgactttcagttcaaggctcgcaaggagacgaggcctaagactcgttgatttcgattggggtttcatttgctgacttgctaaagaaatcatcgattcggcgagttccgacagggaccggcttttcagcaacattgcgagagtggttccggtcagatggttgcttatcggacggctgaggaggcagtggaagtgagtcaaggaggaaatcgctggtcggttggtgcctcttgacggccgcccttatgtgttcgagcttgacgatcttgcgtttcttctcgatcgcaacctccgcagacctctcggcgaggaatctgaggaagagttcagtggagcgcgagatgagaaatagagcttctgcgttaaccttcttgatgtccttatctaacttcattatcttcttgatccggccggttgggatttcaggtcgaatcgtctcctccttctcctcgtccgccattgctgagattttctttctttctttctttgttttctctctcttggttgggtggagggaaatttcatgataaatacgattttattatgaaattggcgggaagattaggtcccactctctacgtttaaacgacatgtacttccataaaacgacgtgactctaatataaaacaaaaaaaaaatatacgtttttactaaattataattttttaaaaaaaaattatggattttttttaaataatttttcttttttacattattatggttttccataaaaaataacacaaaaattatataaaattaacatttaaataacatcaaaacaacaataaaaaatagcatacatataacaaaaaattaaca

SEQ ID NO: 42658 - DNA, 3898 bp, Cannabis sativa
ttaacatttataggattaaaattagaaaatatagtattgttgaaagaaagataaatggttgaaataaagagacaaattataactagtgaggcccacaagtgtggccgaccattagagttgatttttgtccattattttattcatttttaatccatataattaaatcctaaactctagttgaagtactataaaaggaacatgatgctctcttctcatccaacaaatcacttcaaccaaactaaaccttagatctaagaaatccatcggactggcatcgggtccctattgggtcccattgggccagacgaaaaaatgtataaaaaatcagaacaaaccagacagcaaccattttaacacaaaacaataaaaaaaaaacatcaacaatccatagatcaatcatgaaaacaacattttaaactaaatataagaaccaaaaataaaagaaaaaataaaaaaaaaatcacttactcattgattgttgacaaaaattgtcgggtgcctcaaaaataaagtctcacaccgaattctctaatttctagcactttgtagtagcttgaagaagttaactatatactaaaaataaaattttagtttgaattgttagagaggatgagagaaaatgatgaaaagagaaagagagagagacaaatgagaatggttgagtgtgtataagagacattttgggtactcaacatatttgtaaaccttttttcaatattgatacatataagtttaaagaattaatttacatccataattagtcaaactttccttcttcttttgcagtcacacaaataatttttcatacatgaaacaatagtgaaaaaactcaagtcaatagttcttcatctttgatgagattcagtctaattaaatgtgattacatttaattactccaattctaattggtccccatgatgacccattatagctttaaatcctcacaaatcaagccatcatactttccttttaatcaatcaaacactaatgagacttgtgtcaaaacatgatagtgtagtgagaaaaccagaaatattatactacaattttcatctattatatacacatatacatataaacataatactgaagaatctgcatgtagtgcttagcttgcatagtaaaataattaaatttgtattatgtttttgtcacttaccttggtttagttgagttgagctggctattcatttaaatacatgttccttttgtttggtggaaatggaatcgattttgggttatatgattagaccatcataccaatcaattaccattaaaaggtattatttatttgctagaaaattcattaattattttatctaaaatcttaaccaaatccacagcttttttttcactgatttttctttttctttttctttttcttttttatatcaaattttcactgatattattatatcaatatatataactttggacaacacaagcatggtaagtacaaaatgttgataaaaaaaactgcaaactaagaatttaacctcaaaacgacagattgatcacggggttaatacagcagccatacttttatttatataatatctttatatatatatatatgaacaacttatggcattcaccatgtgctaaggttgaaaatcacaaactatataccttgtcactttgctaaataaacaaaacatacagagctgtattatctcaacttcttgcaattgttgtttgacacgtggcaactcagtggtccccatcaccacattctttctctatctttctcctaagaagagatacctttttcaagttttaaagctttaatcataaaaacctctcatactctctttttctccaacctttttatttctgtctttcctttttcatatcacaaagacacatttattaaagctttactctactcataaggggcaatcaatttaatcatcataatcatttattttgattattatggcttccttttggtcattactctcaacaatgttgattcttttcattgcttattattctcattccttttcattcccagtagccttggcttcttcttcttcttcttcttcagatattcaattctccaccatttcagcagctccagcaattctaccaggtggtcctggtcctgtaacagctccattacccccatcactttctccggacataactcctctgtttcccactcccgggaaacagaatctttctcctgaagaatcctcactcccaaccattccctctagtccgagccccccaaatccagacgatgtcgttgctcctggacctggaatggcgtttcctccatctgggtctatgcctgcttcttcagcttcctcatctgggtccctcacccttgctctgttcttgggcttttgttggttctttgcataatgttgcagaaaaagaaaaatggtgcttggtgatgattcttatccaaccaaagaaacaataaaaagaaatagagaaataaaaaaaggtgggcaaattcaattattgttgtatgtaagtgtttcagcttttttatttttggtagtatatatttacaagggtgttgtttgtatgtgttttagtgtggtgttaggggtagatgatgatatatatatgtattattcatatacaagtagtacttgacatttctgtgaattttgatagatatggtcactgggatttttctgaataaatattataaagtaaataaagattgttcgtttcaaattatatttatgttatttcataatggtagtgatggagagcttgaaaagtttaagaatactattcccatttactatggctcttagagcattatttttattttattttatttgtagtgggaatgttggtagttgttttgtagatctattttaatgatatctagtctttgaaaatgtattagaatctaacaaccatatgtagattgaacaacaaaacccaatactaggttctcttaaaccaaagaaaagataaaagaaattaatattacattaaattgctttcaaaaactaaaaatattacattaaatagaattaccgacaatattggaagctaattttagataaaggggaaaaaaactatcatctttctagctctctgagttcaggggtcaaaccccaggtagtataactgtgtataagcctatggacatatctataaagactggtggtgtttctacatgctaacactaattgcatatacttgtctaaagagcaacaacaggatacttttgagacccattcataaacatcttccccaaaaaagactcctttaatttgttaaactcaaagggactatgccttttgggggagtcttttacaagacacttcctcagcttcacattatcttccttgagcatgtcaactgccatactaagctgccttataacctgcctcttctcttcatctttctgctttaactgatccttttgagctttgttttcctcctgaagtctctccacttcttccttttgagctttgttcttcgcctcaagtttctccacttcttccttcaactttctcagctcgtcataatcaatcccgctcaaaaatttcatttctttagtttcttcatgaatccgtggggtttcacattcctgctcgtcttcttccagctcaggatcatcaacttctgattcagcaaaatcttcggtgtcacaagtttcagagtagctatcgtaggtctgataggagatcccactcactggcggcttctctacttgatacttggttgaagagaatggggaccttaatgttgtcagtacccgagttccagaatcagactttacttgatcatacttctccgctaataagcgatgggttcgataaaactcttcaaccatgctaaccagctcaggccgctttttgtaatacatttctgcacgttgagcaaaggagtcggcatctgtctcaatcaattttagcatggcctc

SEQ ID NO: 42659 - DNA, 6536 bp, Cannabis sativa
  modified_base (6016)..(6018): a, c, t, g, unknown or other
aaaaaataaacgtaaaaagtttatgtaaaaaaaatataaaaggtttatgatagaatacaataattaaatttaataataaaatattaaaaataacatattcctcctctcaataaaagggaaagacttttcaataaaataataataataataataataacccatatatgtataaattttaatttttcaaaagaaatgtatatgtacatattttcttaggtgggtagtagttggtagttgataagttggtccataacggttgaacaagaagagtttatgaagaattaaaagaagaacactactgcattccattttgagttgataagaatatcaatctaaaattatttgattggtcaaaccaaattaatgtatttattatttctacaagaagatattgatgatgatgatgaacaaggtcaaatgtgggtcttgtttgagctttagatcaccaaactagagggctttaagtttaacaattttcttacaatgtatattatatgctaattatatttattatgtaattgtaatttgttaataatttcaacaaaatagttatatatataaagactaataataatatcccatattcctcctttcaataaaataataataataacccatattcccaaacaaatgattggataatgataatataagttaataaccaataatgtttataatctttacaattattattggttaaaattaaatgtaaatgatgctatttgaattgaaaatgatattattagttttcacgctttgatttatgatcagggtcggtcttgagttgaaatgtgttatagacgaaaaaaatttttaggcccttactataaagataaataatatttttaaaaattaataaaaaaatatgtatattttttaatttaggctcttaaaatgagtggaccctaggtacgagtctaacctgcctatgtttgtggtcggcctgttcatgactatgatgattttttattggagtgtttttatttttcttaaaaagaaattaaaactttatcaagttcttatgttttaaagtgatacttgcaattgagatttttttgtagagggtgtctcctaatagagttgtattatcagatttattaatttcttgttatctatttttctgggtgtatatcttcaacatgtgatgcgaaacggtaatattacagtacatgtgttagcgaaacatgcaagaaaaataatattttttggttggaagaaattcctttataaaaaaatattttatttatttttacatataatttaaaattttaaaaatacttgggaagatcatgacactctctgttctagttccgtcctgatgacaaatgttttattagactctcaacaataaaattatttattacatgaaaaaaatactttttttaaatcttaattaataaaggttaatatatatgtgaaatttgatgaatcagagtatttacgaagtaagtattatttatttatttatttatttcaatgaaggagttcataaagataacttgaattacttgttgaattttatgaaaaatagtcacttttttttggataaaaattgggtgttttatgaagtaattctatcttatgattaactatgatccttataaatattgaataatacaaatagaaatataggacagcaaatattattcatgtgtaatgttatatattaatcttataataccattgaccatttattaatttattattattattattattattttatttctaagatattttaggaacactagatatttgttccttctttttgataagatccattaatatagcttaattagtcatacatacccaataagttaattaattttattaaattaaggtgaaagtctcttaccatttattgttcatcattttcaactcttcaattaacataaattaatgacaaatttttgtatgtttaaaaatcgatacgtaaactacaactcaaaaataaaaagaattattaataataaaaaaaacacatttatatataaccaatatttattaaaaaatatcaacatgtactcttttttttttttttttttcatttccattaaacttaggaacaaagcaatcttttttttttttagtttcattttttttttcaacgaagcaatccattattagataacaataatttttatatataaatatagagaagtcatactttaaattttttaatataatcttttagtcaatcttcgtacctaaaaatacatgtcgatattttttttcatggcagtatttcttatgcttacaaaatcatccttgtaaatttttgaaaattttcgaaaaatttacagtgtcgaaaatacgtttgaagttttttgaacacgcgtagaaaattagaatatatcaaaaaatctatttttggtattgtaaaccattcaaaattttcaaaaatttatagctattatactgtgattataacgtatatcacgtaaaagtaatatttcgatgtgtaatttcgaacatcaaaattaactataaaattataattaacacttcttataaatatatatataatgtttaataaacaaaatttttaatgtgatgaattaatttgactttgtaatagtatatctaaaggagatctcagaaataatatatcttaaataatttgaagatatatatttttgtttatgtataaatataaacatgtagtttatacgatacacacaataatgttattttattttcttaaaaaaaaattaaggcaaaaatttgaaataaattaatctttatatcttttggattaaagtaataatgttattatccagctcaattctgctgtcaattttgttaataccaaatcttgtcctatgtatggtataatttattgatcttactttgtttatatcttaccattttatttttgagtgtatatattatatcaattaatataatatatttatattatcatttagctagaagtaagattttgtcaaacttaaaaatgaccaaacattaattaattatttgaagaaaaactatacatatttatatgaaaagctatatatatttataattaattattaagaaaaactatatatatttatattaaatgtataaaataatgaaaaaaagaaaaaaaatattactgtaaattatttaataacaaattggctctctcattaatacgagaaaagttaaaaagacattagtaatataataccacttaaatatatgttatatttatcaatataattatatattggctcctacatatttttataaataacaaaaaataataactattcttaattaggagatatatatctcatggtactactggacacaaccatacataatgataattataatataaataaataaattaataaaatgctttaagttttgcttataggatgagatttcttatatattaagacaataaaaaaaaatattgacttttattttgtaggtgtgacaactattgacaatttcttcagtttgattttttatttttttaatcagaattttctttgtgaaaacagaaaattacaccacttcaaatgcattaatttataaaattaattaaaaaaacattaaatttttccttcctttttttttttacccaaaaaaaaaaaaaactacaaaaaaatatatgtatttaatttttactaggaatatttaattaatacaacataaaattaatttaaaagaaaaagaaaaaaaataattttttttctttaaaaatcaatggcaactaaatagagctagttggccaatacctattaaatttctcttaccaaacctaacttagtattaaagaagactttatcaaaatacataatatgtaacatcattattaattttttttaattgaaaaagtactctacaataaattcataaatttttatcattaaaaaataaataggaatatataagtaaatcatttagcaaatataataacaatctttttgtaagaaactatctttgttattcctaaatttacaatatcaatggttatagaccaatgaccacaccaatttaattagggaaatagacttttatagccaaattattagagattaaatgcaatctagataagagagataattaatttttctatcaatatcccatttaaaacaatatttttcaaattttatattggtcccacaaaatgaaatttccaacattactttattatatttaccatgcataatatttttctttctaattagaacttcaagttcaagtagatatacattgaataaaaataaattaaatttttttaaaaaaagttagtggatattaaaataaaaagttagtggatatagttaactagttcaatttgaaaacaatttttttttttttttggtttggaaaaaagaaaaaaaaaattaaattagatgcatgttttaaaagttgataaagatacataaaaaatgataatgttataataaaaaatgatactaatttctattatattgtatttctataataatattagatattataaaaaattactttaatataatatatcaaacaagactaatctaaaactaaatacataaagaatttatatatatatcaatggtattttttccattattttttctagtttctaaaggtctttgccgtatgaaaaataataaaagtttattaaattttttaaattgtcatatcgttattgatataattaagtattgagttccatacaatttaatataatataacttttatggaatatcgttaacaaatcgcaaagcgttacttctaagatgttgagcaccactaatacctaataacaatactcgtgaatcgcggtattgtgagaatattcaaaacattttttaaacaaaaaaaaattaaaaaaatactcactaaatacattgtttttcaaaaaaaattacctcaccaaatacatgtgtaactgtgttagttataaacaagtagatgaataatacgtatctaatactcatattttttagaatattaatttatcatttgacaataattattaataataatattattattattttgctataaagtttttaagatatatatatatattatattagtgttagtttcacccttcacttattttcataatacatttttttttttatcttttgaaattcataatatataatttatttaaatgccggcttattttataataacacaaataattttttgtttttatttttgtcacattatattgattattttctgtgataagagagaatttgcttttgaataattgttttaatattattagttaagattaatgttttttttaatttattaattgttactctctcagtatattctactattttgtcattggatactcttatcacccaacacaattaaaaaaaagaattttaaattaaaagtttataaaaaataattatatatgtaataatgttgtatagcctaagaatattctttctatttattagttgatgaaaaatacctgaaaaaatagtcttaaatttagaaataaaatatatttataacaacttcaatttttgttcgagatttataacaaaaataaaagtaaaaattataattttgttagtaaaattgaatgatttttttaaaaaaaatatttgttcatgtattattttatttaattatttatttaaaaataattttgtgtattatctatagccaataagtatgtacataattttcattattttttaaccttcaaaaataaaaattgctgaaaaaaagttattttaagtagttgaagaactaaaatcacctcaagtaatatgaaaaaaaaaaaagattattagttacatctataaaatataacatccttttaatgattaaagtttttctatattacctattaaattaatatatgcatattaacttttaattaataataatatggtgttagatttaaaaaaaattaaatgtatgaacaattctaatgcgaaacaaattgtaacaaaaattaaaatgtaacaaattgtgtatcactagtcattgataggggtgttcaataaaatttacaaactgcccaactcgaataaaccgcccaaaccaaacnnnataaattgacaaaaaatacaacccgaaataatacaataaaaatccaaaccgcccaatgaatatattgggtggtttacaaattattctaaactgctaaattaatccgaataaaccgaattaaaccgattatatattttttaataaaaatgtatatcttatattatataaattacatttattagtgaaactattttgtatttaaagtttggacattttaatttgaaacttaaaacttagattttatagttaataagttttagtgtatttagatattgaagttaaagtttaaaatctataccatattatcacttttttttttattattttatgtttactcaattatatttatgttatattaaagttcttaaaattaatttaaactatagcattttttagcttaaaatataattgatatatttttatttttttaaatttaattacttgaattctaaaaactaacaataacaattatatatatataaaaaaaaagaacggggacgggttaacccgaccaaacc

SEQ ID NO: 42660 - DNA, 1843 bp, Cannabis sativa
tcttaaatctaaccatctcaatagggccaaaaaaattcaaaaaacatgatacatgtcaaaattaagaaaaaaaatcttaattaacctaaatttaattaaactagttttaaaaaaaatatcactacactgcgttctaaaattattatattaatatcggataaaacaagggatccaaaatctaatttttttaactcccacacacacttagcaccagtcctgatgattaaatgcttgaagggtgaggcttggttttagaaggttgatacttgatagagtgatcttgtggggttttgattttaaaaaaacaagtttattggctgtaattttgttttttcattctcagaaactatatgtaatgaccaaacctttgtagttttgttaatgaatctaaaaacataaagacaaatctgaaaaatgtcatttttttttatctaaaactaagtttttcaagtatgataaaaataacaagctgaactctttatattatgaataattactttataggctaaattaattagggcaaaattgaaattcaaaaccctgagaaaatgtttaaagtgcgaaaactaattcttcttaaaaaacaaatagaaagagggggagagaagattgaggctcagatttgcccaaaactcagccaaagagagaagaatcacagctacccatggctgccatcaacgacggccgccgcactggtaaacgacagaaccgtcaagtaaccaagcggagcaaccgagtcgagccgccaggcaacccaatcctttctaagtttgactgattttgaggacttaaaatagcatcactgcctctgaaagagaaagggaaatttgaacttctatgcctaaatgtgacacagtgatatatatatatagatatatagagagagagtgagagagagaaatatttatttatttatttatttattttgagagagagaggtaggggaaatcatcggctccgcatgcgatcagagagaggcaagcagcagagactgagtggccattcttccctgtaagacaaaacgacccgacccgacccggctgcctccatctccgtgagagcaaaacctcattcttaaactattgtacctctggttttcatctccttctccttggatcctctttataatgaaccttgttgtttccggttttgccctcatttccttctgattctaggagagggtagttaggggtacgatggtaaatatgtttaatagatacacatattaatttatatttatttctcctaacaaaatggttgtattcatattcaattataattcattctcatatatgctattttcgcaagactattcgaaatattgaatttgagctgaaaaggaaattgtctctcgtaaaacatttgcaaatattagaatcatacataattgttttctttgttaatactttttgttttatgcaaagaggtttcttgcttaaatgcatgttaaataagactggcgagttaataatttttccaatatggtctttgaaaattttgtaagctaatgaacactgataaattttaaaggacaagttttaggaaaaattcgaagatttagatgaaatacgttccttcactcaccccttcacaaccatgtcgatctccacttctttttttggatttgcatttatttttttatatcagatttgcatttatttttgttacttggatttgcaattttttatacacattagattttatgttttttttttttatgtttacatgagattttatgttgttttccacatcctcgcattgctagaagaactcagtcccattcaaaccttcctttctcaatctttgaaacttttcattgttactggccaagacttccaacgaa

SEQ ID NO: 42661 - DNA, 2467 bp, Cannabis sativa
  modified_base (2415)..(2428): a, c, t, g, unknown or other
gtggtgatgatgggagtgggggtggtggtggtggtggtagtggtggaggtagtggcggtgttgatggtgttggcggcggcggcggcggtggtgttagtggtggtctaccagcctcagatgcccaaaggtctcggtgagttcgttgttgtattaaaggactatcttctaatttttctgcaagggatgattaatattgatgtagaaatgtcattgaaaaacaaacatatcgcttatataatacctcattgcaatgcccatttcttgccgttggttgaagtaaatattctaaaatttaaatcatgtgacatttacgaaacttatatattcacctaaatactaatatcaaactttaacacggtgcatcataaatttattcggaattaaaagaacatcaaaaataagaaaataaataggtatactcaaggaaagtacttaagtgggtacatatatctcgtttcctatcaatagggtaataggatcttaccatgaaagggcatctttaggccgaaaactacaaaataaagcagaaatattgttccaaacaaaaaagtccatgttgataatttgtgcctgggaaaggtaacccggccaaatctttttcctcttcgaacaccccgaatgccattctcattggaaatacctcttttctccaagtaacaattcattgctggtacgcaagtaaggagaaaaacaggcttgcatggcaagttttgatactaccacaattctagcttttagtagtgtctgcggaaaataaacatgattccatactccaaccatcattcacatagctcttcatatttcatattttgcctaactaaacagccttaagtcctttttctccaagttcttcactgaaaataattttccaagaaaatagatttataagttcaaatagttgaaatgaaaaagtaaagtgcttgcctccagtacaatatactaaatagacccgccaaaagtagaggtaaagtaaagattggcatgatcgaagtaaatgcaataatgctttccaagaagaacttcatgttgaaaccaacattaataaatagtatcagcattttgataaactgtgtttgaatagatggtggtatgaaaaccaacatattaataaatagtatcagcattttgataaactgtgtttgaatagatggtagtatgaagcactaaaagcaacaatcaacacctacatagaaaaatttcaaacccacatgctcaccttccaagctagctcctagtcatttgaattgaaccattatcatatttcaaacaacaaaatccaaaagtaaaagggaagaaagacatcgccaagttaaacatggtaaaactttcactacttaagcaacaaggaacgataaatttgaaatcactttaatttagacacgagtgtttgctgatgaaacaataaaaagcaacctcttgcagtgtgcctaaacagagcttctgaacgcgataggggtagttacttacatctacagggttctctaaaaacttaaagaagctacatttcattatttatattatctaataaatattaaaaagatggacagtagatagatcatttcttttacatcaaaactaaagcataaaattatcataaataaatatgccaagtacataagcaaacagagaaagatccttcataaatctctacgaaggatgctcaaacaataaactaaaaaacctatgatggctttctaactcaattagaattaaaaaaaatatagctgaacaaaaaggtccaagaaacttgaaaccttaattctatctcaaacatgtgttcttaattgcccaatcaatcgcatcaagaacatagattatgaattaaggaatatagtttcacgtgctcgagcaatgaaactataaaaacacccagttttaccctaattagaaaagaaaagagaaaatccaagttgtgccagaggaaaaaggcttacaaattaaacaaagcctggttacgattagcaccgacattgcacttggtattgaagaacttaccaaaacacttgcagcagaggtcgattagatgttcgttctcggtgcattcccatgtcccatggaagattttgaagatggagagagagaagaatctctgttccaacaaaaacgaagttgaggaaattataaaagtagttttatttgtagccaagtacactccattaattaagcaaaaacaaaaaaaaaaaaggttacactccattaattgaaaaattaaataataaattaattttaataaaatactttttttttttttagaaaaatgcatttataaataaaactgaaattagacctcatgatcattacaaaagatattaacaggtatagtagatatctctaccatgcccgtaatattgttagcaaacgcccatttggccggggtaagttgaaaaatgacccttttattaatcaattaatcannnnnnnnnnnnnntttatatttatttgaaacatacctctttttatatgtatt

SEQ ID NO: 42662 - DNA, 3084 bp, Cannabis sativa
ccattggctactgccggccaggcccagttccattgctgatactatgccggccagatccacttccattactgctactatgctgtcttctagaatccattgcagccgaactgggcctacttgctaaaggtactttactagagtgcccattcataagagctgatttcctttctgcatgactgccctgtgagtgactcgcgttatttcccaatgcttgtttacttttcatcggcagttgagcagatcgtgcatcttcaacatcagcaaaaaacctgtataagtttcctcaatgaaaaatagaagttttcaagccccatagccaagagcaagttaagatctagcaacacaccagaatttggagcagagacatttctctgaggaggcacctttgcaggagctggaatctctgcatcatcatccattaaaaaggaatagtctcttgtatcttttagtttctggactttagttttaacctgcatgcgccaaaagatccgtcaaattaagcaaaataaagattatgtatgttcaaggaccagtgaaataatgtatgctaaatatacctcatttacaactttcggtttcagactatgtactccgggttttgcaagagcagaggatgaacttgggctcttttttctctgccaagaaaatcagcagtaagaatcttaaacactaggggagggggagataaaaacaaaaacaaagcttcgaagtccgtgcttatgaaaagagatttcacatggacatgtttaaaacctgtgcaaggaactggaacagtatccagcattgcaatatcattctggcagtcctatgtaagctaaagagaatatatcaaataaatgtgtgtgtgtgtgtgtcaaagtatgaaaactaagctcctattcctaatttttattttcattgtatgcttcagcttctaactttaatttttattgttttgcttcagctgcaacacacaaagggcataatcataacaaccataaccaaggtaagcataaaattactacacaaaagacaaaacagatcattaaaaggtaacaaccctcagttaattaatacaggaactttcagtaaaacgaaaaagatcatccagtgcagcatccaattaagtgaaaatcaaatagtaattgcgttacatacaggatgaagggcattggaaagttgaggtgtcaaatgttgattttccaacaatgacttgctctcttgaattactcttgaagcaataactggttgggatgggccaaaaaaggatccataactgcaaaaacaacacaacaaaattacttagcacaaacatcattctgtcatactccagaaaagaaaatatgagcacaccagcatattgcaatgccatatccgaaagcaatacaacgtgacaataatcaaacttgatagtcctaaaataaaataattcttcgtagagaaaggaattacaaacctaaatgctcccatgatgcatactcaacaaactccttaattaaaacttcagtgatcgtccatggtcatggtttaaataatcatgagaaaattcagaaaaaccaaaccagctaactaaaagaaaaaaggaaaaaaaaaaaacaaaaaaccctaccaatatgacttctacaaaccctaatccgtgagttacaaaatttacaaatccttaaacaagataccgattgatcaaaatgttagaatcacatatggggtatggtatacttctgaaacaaaagttccatcaacagtgaactaaatcactcacttatcatacggaagcttcttcctatcgccataagaattgttgggaccagaaccaccttctttcttcctctgctttctgattcgttcttttacacgttgtctgtacgcaaggtactccaaccgttctttgctaagatttggatcttcttcttcatactcttcttcttccccctcctcctcatcaccttcttcctcatatccgtatccagaatcatcgtagtcttcatattcatcttccatttgtggatgccgttcctgtacaaaaaaaattgaaattgccaaatataataagaaaaaaaatagaaaaagaacaatacgcaacaaaggtacagatttgaagagtactaacttctctatcgtacgcccgcatagcttaaaaatcacttcaacgcaaaaacctgaaacgcaaaaaagtccaccgatcatcaaattaaatcgattttgacaaaaatcgtcgaatccaaaaccctaatttcctctcctccgtccaaatcaaaatccatcgacttcacgatggcgttataccaatcaaatagacagagaaacgtacttaaatacaaaataaacatcaaaaccgaccagattcgatcaaaaaaatcgaatttgacatgaaattgaacgaaatacctgaaaatgtggccgaaatcgacgaaattcggcaaaataatgcgatttcagcgtccaatcgcggcgagacgaagcaagtctaggatggagaaaacgaagcaatctcagatctgtgtgaaacgaaggagaacgaattgggcgtcaagaaaaggagataacgggggatatagaggacggaaaccgaaggtcccagaaataaaggggatgaatactagtgtacgcgggtggcgtagtgcgcacccctcaaccctaatttttttttctttttcctttctttattttggtttttccttttttattaattagtttttttaatttttgggtgtttctgttttgcccgcctcttttcgctctcattccgtaagatttgaggtccattatgtttctgattagagcgtgtttgaagtctgggccggaaggtcgacttcatatacaccaaaatttacaacccaaaattttattcattttaattttgtttgcaaccctaaaatttatgaaaacagtttattttgtttagttattttttatgaaaattagctgtattttgtttgatgataaattatatcaaattttatttgttttttttatttattctttttaataatgagtaaatattctactaaaaatagtaaatactattttggaatatttgttttgcaaaaattatcgatttgaaattctattttgttaaatgataaaatagaccctgtattttttaaa

SEQ ID NO: 42663 - DNA, 3376 bp, Cannabis sativa
ggctcccacagcacagatgttgtaatgtatatactttgtagagcttaagaagtggtttaggttaatgaattggtttgaagagaaatttggattggtttattgtggtttgtatttcttaccatacccagcattcaacaagtagaaaagagattgggaattcaattcaatgggggtagctgcatcttcgtaagttcttcaatgctaactgcgaatctctctgtatgaaatccgaatctttacatctttacatctgattatgttttgtattgtatgctattttaaatattacatcctacaacccaaatgtcctaaatgattatctcatattgtggccgatagcgatactaagttgatttgcactaagatttcagtttggtgatctgggtaccttcacagagataatcgattccatatatataatgatattaacattgatttcatttctcaacctatgcttgcacctaaaactgccatgtcaatgctccatttcaggctctccattttcattcatggaaccaaaccctaataccctttcttcaagctattatttttctcctgatttcgtcatccatttggctctatgatgctgctgagatccggccatggacagggaggttgaggttgaccttacacccacattcgcacccgcgagggatctcaaccgtccgatcaatcctgattctacctccgcttcctcttcatcttcttcccctggcttactccgacattttcaagccgccttcaagcgacatcgccctatcggtgtaatgcagtcgaatagcattgggcctaggcgaatgttggttcctcaacgagcagtgtccgcaaaatcagcatcgatgaaatctagagaagcagtttctgttagtgaggatcataaagattcagtaatgcagatgaagggaaccgccaccattggcaaagatggtcaggaagatgaattaactaccccaccttctaattcagagactattaccagagcttttgatgaaaacttaaatccatatgacggacaagatcaaatcaagttcgtgactggttgtaaggacaacccacaatcactgtcgcatgtgaaatcttcgcagtacattgatggtggccagaaaaaggtccaattttcagaagcaagcaagaccactttgccggaagtggaatgtgttgcaggcaatcaaggcgaggcgtcaacggtcattaatcatgagatgaagcaccagaacacagaatgtgatatcactgcgagatctgatggtgggatttcttcccttttgtcaaagagaacaacagctgttcaggatcagttgcaccatttcagaaacttctttagccaacctaactctcaatcttcagttgcagggcaatcttgtggtgccacaaccacatctgtccattcagcttcagcgccgatggctaatcagacaaccttttgctcccgtgtgcattgtgattcgcaacccatggccatgggggatttgaatttaaattctcttcctgtaactcaagggaaaaaaatgcagcaatcaaatccatgtttaaaggacaaaagtggagaagtaaataaccagattgttaatgcagcacaatcttccacctccgcaattgatactcaaatggagagtagtaaggaatatgagatttttaaggaaagtggctttgctggagatcctgttggagcagctgaagggaaacaattagctgctggtgctattgatcttcagtctcatattccatcatccaaaaacttgtcttctaaatcagataaacaagaaagggttgcagttgcagagagtgctaaaggtgcatcatcagctcatcatcgtaaaagaaattatgatccggacttgttttttaaagttaatgggaagctctatcaaaggcttggcaagataggtagcggaggaagtagtgaggttcacaaagtcatctcatcagactgtacaatatacgcactcaaaaaaatcaagctcaaaggacgtgattatgccactgcttttggattttgtcaggaaattgagtatttaaataggttgaaaggaaagcacaatattatacagctcatagattttgaggtcacagacaaagctttgcttcaggaagtcatgaatggatcaatgaataacaaagatggaagagtcaaggatgatggttatatatacatggtacttgaatatggggagattgatttggctcacatgctttcccagaaatggaaagaactcgatggcttcaccaaccagaccaccatagatgagaactggcttcgattctactggcagcaaattctttttgcagtaaacactatacacgaggagcgtattgttcactcagatttaaagccagctaatttccttctggtaaaaggttccctaaagctgattgactttggcattgccaaagccataatgagtgataccacaaatattcaaagggattcacaggttggtacattgagctacatgtctcctgaagcatttatgtgcaatgagagtgatgctaatggaaacccaattaagtgtggtaggccatcagacatatggtcccttggttgcatcctttatcagatggtgtatgggcggactccgttcgcagattacaaaacattctgggccaagttcaaagttataacagatccataccatgaaattgtgtatgaaccagtttcaaatccttggcttcttgatctcatgaaaaattgtcttgcatgggatcgcaatgaaaggtggagaattccccagttgctgcagcatccttttcttgttcctccaattccacttaaaccacatttgccccaagaccaatgtagacttcttcatcttatttccagcacttgtacagaggacgctgaagcttcaaacctatgttctcagttacagcaacttctgggggaggacccagactggttaatgacatctcagctattggcctcacctgacaaacagtgtaagttgctctcccaaatatcacaacttttctctcagctagaaaaacagttgtcaaactcactggcgacaggattagatagatgaatatcaaaacatggtgctcaaaactctgcttcaacaacttgcaactcaacacaaaattctcaggtctgagtatgttttctggttccatctttgttgtttatggtggttttgcttccatattcttgtaacaatatgtaatattccttcctgttgtgttatcctagtttatctcaaaaaagggtcgaatcttttcgttgaggcttgtaattaccatctaatttttgttcttgaaaaacagaacaatggacatgactctgctccaatttaaagaaatgttaggattgggttttcattctaaaattaattggtgataaattaagtaactttatatgttatatttctgatatgttttt

SEQ ID NO: 42664 - DNA, 3664 bp, Cannabis sativa
tataattttataaatattaaattaaaatttatatttagagtatctgtctagaatcatgcaatgtataggagccaaaccagattcaaattccaagacaggtgtgtggagttgaaactaaatcatttgatgtttgaaaatgatgatattttattttgtcattgtgatttcaaaagtatttattatattttgtaaggcttgaagttattttcctattcttctggattataacctaatccttcaaagtcaacaatctattgctgtggaatgaaggacagtgaaatccaacgtgttattgatattttaggcttttgcaagaaagaggtaccattcaaatacttaggcattccaattcgtgccaattaaatttcaagcaaggaatgtaatattctagctgacaaaataacaaatagaataaaagcatggagttctcacaacttattaattcaatattgatgtccattcattcatattggagccaaatcatgatcttaccaaagaaattactcaagggtatataagctaatttttgagcttatgtatggaagggccaacatatgtttcaaggattaggacctacattatggcataccgtttgtcgatctaaggcatcagggggaattgattttaagagacttgcagaaaggaatacaacagccattactaagtatgtttgggcaattataaacaaataagataacttgtagattagatggattcattgtgtctacatcaatagagaagatttgtgagttatcaagctcctgcacatggaagcaagtattggagaatgttgctttttgtcaaaaatcaaatcaaaagtcttattgaagttcaacaattcactaatgattgatacctaatttataatggttactagctcctctacccttttcaaaataaggtcaattgaagtcaagaagtatggggtagactcaatattccaagacatagctttgtcttgtagatatctattcatgacaagttagttatgaacaagggagaggctgcctgcagaaacacaacattatcgatgaagatcattgtcttttcaacaagtctcaaccggaaacaatggagcatcttttctttacttgttccttctctccggtttgtctaaaataggtgaaatactggctatgttggggagctgaattgatgagctcattgtgcaaactcatgagggcgattgaacatgcaaaattcgacaagtttagcaagcaagttctacctgctgctactgcagctctagtatatcatatttgacatgctagaaatgatactctatagaatttggttgtgacaaaggaagatcaagtggtgtgtaggatcaaagaggaagttaataaagaattagttgtgtttggtataaaagtgttagcatagtactactgtaagttttctaagatgtaagaaagaaaacaaataacaaaggagaaaataaaaatagggagcttttctctttaacaatcaatataatgtataaatgatgattctttaggtctttatattgaaaatcctattaagatgtaaaatttttatttaaaataataaatttgttgctgatttaaaaaaaaaaaaaaaaaaaagatttatattatatttggtatatttatacaatttaattgaaatttatattaataataaaacaataaataaattttataattgatttctatgaacatataaatcttataaaaaaatataatatttttcaacactaaatcattatattgattatcatattttaagtattaatattaattaatttaaatttacatatgactaataataattgtaaaacgtaaaggcttcaaaaataattttcaaataccgaatatttgtaatgttgggattgtattaatatagttattgtcattgcttgtttatttttctccaagtgattcatgaggtcaccgtgcctatcgttgagcttttgtcttaaatcaatagggggtgtttgtagtttttccttcctctttctccaggctcttgatgtacggatacgcttttttggtcatcccggtcctgagggccaatgttgtcattagggagcctgtccctctacggacctttttcctttgagaatttggagcagactcttcgcggatcctgacccttattgttcttttttaggaaagatgtgggatttttcttgggataaccttttaagggataccggatagggcttggttcctgacttttatgtcttttggtacttggtgaagattcttgtcttgttttgccttgtccgcgaggcatagcttttgggtgcacgagaatccctaccgtctccatagccttctgcatggcagccattatctcttgtattttcctattttgctctttctatgttgctaggtcggcttcgtgatcagcagttctttgcctcagggccaataattgtaattgccatcatcataggcgtcatactcttcttggttttcctcatactccacatcaattgtttcgtcttgttcttctacctctacgtctactcgtgaagctgcttcttcgtcccccaattctttgagaccctaggggggacgaggctgacgtgtatggtttctagtctccaccattgtactctaaatcttcttatattattgtttgtaagtaaagctttttacaactctcaatgaaatcaccaaaatgttgatcgttatttttcggcaactaaatcattaatgcactaagaatgatttgaagggagtaaaagtaaatatttttacgtgattggggcattaatgagtcttaatccacgagtctctgatatttaacatgtaggtatttcttacagagaatattctgccctcctctttcttttttacatccccattacaaatgtggttgggggtatttatagcagcttttttggaggggaaaaaggcctctattgtcttaagtgtcccccttagccatgcacaagttcccaaatcgacgaagtagggcatgtgcccctactagtaggatgcgtggggtttaggctagataagcccttatccttccttgattgatgtgatagtaattatgtagtcatcacttacatcctcgatttgtgcgtaattgttaaaaaataggtttaatgcgtttgacacatcttttcatatttgttcgtagacatatcctccatattgcattaaatgctaattgatagttcacatccagtatcttgagcctaaaggagctggatgcaacctagctcccagaggtaaaaaaagattgatccctccagacctagctatggctccaagagggagtgttaggtcatgtcatggaatcccctacctgggtaatattctccctcaactatctctagatccttaagcttaatctgccatatgtcatgtcatggaattaccacgtatattgggagaaaactggggcaacatcgaccaattggagaagaaacgagaatcatacaaatattttcttatattttgtatacaatttataaaatcacataataagatggactcgcactacaaaaaatcttacttctagtcacaacaaaatatgtgactaaagataaaaaaagtcgtagctaattataatcattattattgtgttgtgactaaaaagtccgtgattaaagatattagttaccaaaattacaatttatatgtgactgtatttttagtcacaatacttgttgtgactaaaacta

SEQ ID NO: 42665 - DNA, 4284 bp, Cannabis sativa
  modified_base (3380)..(3384): a, c, t, g, unknown or other
gaattcaggtgtgtctagaactgaaaaggaatcgtgtatcgatacaagttatgtgaatcatgataatttagggaattaccaaatgggtgttgatcaaaatagtgggaattatgcgcatcaatatggttatgaaaattacgggcagggtgctgaccagaatgcaggttactatgagagttacaattcgggttttgatcaaaacgcgggtgttcaacatgatggttatgagagctatggtgattatactcaatatccaaacaattgggttgataaatcgtctgctgcagttggggtaccggaaccggagatttcagacgtgagttttagtaattttagaagtggaaagagaggaaggaatgagattcctacagatataattgaggtgaagcaagatgatttgatcaaggaccgacccagggaggaccaggtcaagttaactggaatagcttttggcccttcttaccaggtactatactcgtaaatttttttccttgtgtgccatttacttgtaaactgaacattaaattatgaatcatatgttgtgtatctttgtatattttgttttggattgtttggcagcagtgtgtactttgtgctatgtctaacactcagactcagctataaataaagaaacttttcgacaaactaaaccactttgaaacaataatcaatggattagtagtactggtcattccagcaaactttggaacttgattaaaactcttgattccaattttcttttccaaatgcaagaataacatgaatattattccctattagctttagtaacttcagctctagtcagaacttaaacttgagataccatcattaacttttttactgtcattttcttgaactgaaatgtgattttgtttgcctaaattcaaaaatgatattcactgagttattttagtttatgtttacactcttgggatttaatttttggctggcactcacatggttgtaagttatacaaccaatagttttaatcatcatctttcacagtattactagtttcattgactttcttctcattatttagagagaattctaatggttatggtgaaagcaattggcaagattttaagaagattaggttttggaacttccccaacaagattattgaaacaaagcttctttcagttgggttagggtgaaacaagcagtgctcactgagctcaagaaaaactctagtagctatttattgatttttgtcttacaattataggaaacctatcagacatggaagaactttcaagaatagattgatattgggtcatacttagatagtttgacgtatagggaaatcttggaagacctttttttttcttttctaagctatggttgaatgaataaatcggaggctgatttggtagtccatctgactcacagatactagaagaaagaaagctcttagttaaaaagttagttgtgaaagatggttaattaggagttgtgcgtatgtgaaagcacatacctaaaaagctactaaattactttgccaccatccaattaaataagtgaaaagcagttgatattataatttacaacagataagtatgaccccagtttttcctgtgatatgcaatcataattggagaatcaaactaaactacaagaaggggatatgcttaagattagatctccatgagaccaatttgtccatgtaatcttttgtgggtttattatgtgatggatttagttttgttatccttgttgctaggattattgtcgttaggttatttaactttcttaatcattgatgatcactctgattttttggcatatgattgaactcataataagcatctcacctagaatttgtttcttatgttttcagccggtttcaaccaaggggaagccaacgaaactgcataagaggaagcatcagattggttcattatattttgatatgaagcagaaagaaatggagctatccgaacggcgttctaaaggactcctcacaaaagctgaaacacatgccaagtatggttggtgactaacatttgttaatgttcaaatgttgtattcaatatgtcaagaaataatcgtcatagtatcatcattagtttctttttcactgctgatttcaagaaactcgaccattctgcgccttgtttgttatttgtaagttagaaatggtggtctaaaactggccatttcatgatattaagttcttttagtgcaaaaataccaattgttctgaccacattgttcttaaacgtttcccctatttggaagtgtagcgacagagcaaaacaccctttcggattggatttgctccaaattgatcatctttgaaaaagaaaacatataacgctatcaattgccaactcttgagaacgaataaacggaatttgtaccaaattacactacttataattgacaattatttattaaattaactgtctcactctcatttagttatttagttatgggtgctgctacacgatcgtggtgcccttcccattgggacattccttggaaaagccgtggaatggtggtttttggggcaccccctaattaggtaatatttccagtgttgtactaaaatggtagagtaaatgaaaaaattagttttcatgtctccaatttggtacatgttaaatttggtataatatataatattatgtaaaatttgatgcacaataaatacaattttttaattaaagttttgacattatttattgatgatagatttcagtacacatttttaattaaaatgttgtcattaattatttttaaaatatttaattattgatgatcattaatgatattttatcttttcttttaatttgcatcttaaaatgtgattatatattgaagtaaaataacaaatgctataacaaatattatagtaaatatagcatttgttaattttttttttttttttttgagttaaatttggcataatatttaaatcttacatttcagataaccagctcaacataatcattcaatcaagttgttttacatttttctttaattatacattttgatacatatttgataatttgtcatattggaatgtaggggtttttacataaatacttatatttatgttacttttatatttttacaaatacaaattattaaaaacgttgtctatatttttacaaattcaaatttttaaaaatattattttaaagttgcaaaattataaaaaaaaaaaaaatattgtctcagtgggaaaaaaaactacaaacaactaaatgcaagaaaaaaaaaaaaaaaaacctcaatataagaacaactaacaagcaaccgaaaaaaacacaaacacacacaaaaaaaaaaaaaaagaaaagaaaattattaacctcatcgcaacatgcaaatcattcttagatcaactctaaataaactacaaaatatccaannnnnaaaaaaaaaaaattacatttattaatcactatccaaatataaagaccagcaaaaatacatgtgtattaaaaaagcaacaaaataacagtgacaaaataaatatacatcaatccaactttaactctatatttgatataaggaaaagaaaaatagaaagataggaaattgacaatagcactcctcaaaaaataaaagagatagaaaattgaggtggtagaaaaaagatggtttttttttatcatatttaaaaagagagaatgaaagaaaaaaaaatatatatatgtctaattacaatataataatcttatataaattatttttaattaaaaataaaagtaatcaaatattttagttacaatatatattgtaaattattttttcttcacttttcttttcacattaaaattttgtgaggtccatataattataataggaaattttgatttttttttaatgcttataatgggaccaaaattaaaaaataactcaaattggacaccctaacaagttgatgcgtatcttttccttgatcccgtaagttcccttgcatttgaaacactctccttccatctatctcattttctctctcaaactctctgattccctcctctcatttttttcacggaaatcgatcgagcaaccctatctgaacccattgtcgccaccccaaatcaatccttagagccacgatcgcatgacaaaaccccctttgaaacaccctcacacgaagctagaccctaaacatagacccccaatcaacggtgaaaccaccattcaaaaatctattcccaaatcgtgagactcatccctaggtcgaaacccacgaaccaaaaaaacaacttgaatgagctcttgcacaagctagacaaaaattttggatatgggttttactattttttt

SEQ ID NO: 42666 - DNA, 8395 bp, Cannabis sativa
  modified_base (48)..(53): a, c, t, g, unknown or other
atttgataaaatatctaaatatcacgttataatatgttttataagttnnnnnngtaataaagtttataatagtgtataattatgtaaagttcccttttaaaaattttacttgccaaacaatatgggatgattcgtatcaaaggaaacaaatcaaaaggtgaaaataaattttaagaaaattctacaatgtaatcactaaaagtaatgtattgatacacttatatttatttcgagaatttttttttacagtcgtgcatattataattatttaagatattttataaaattttaaattttttaaaaaaatttaagatgctgaaaataagatttgaattgtttgttgcatgtttaactaggagtgtacttcggtcggtttggtcgatttatagtaaattttattcaacccaatgtaaagatcgggttacaaaaatttaagtgcaactcgcccaattaagaaaaaaaaaagtagtaacctgcccaatggaattggtcagtttggtcggattaactcgtccaaaccgaccactaatattttttttattttcttttatttttacattcaattgttacattttagttaattataataatgagataaatatgtagactgaatttaaagttcaaatcaaccacaataaaaaaatatatattaatttcaactttatatttttttaaatattatataaatgatgatatataaatatatatataataaaaatatataaatatatataaaaaggctctcttaatcgagttggtcggattagttcggattgattggacagattggtattattttcaacccgcccaatataaagattgaacgagttataatttcgtcgggtttttcagtttataatttttgtcgagttatctcggtttgatttgggcagtttacaaaagtttatgtacaactctatgcataactattttattttatacacaagaaaaataaactaatgaattttttaaaattttacaaaatatcttaaacaattatagatggtcattgtattgtaaaaacaccctaaactttatactttataacatctcatatttaaatatttgggtcttaaaatacttttttttttttgaaatgagtcttaaaatactttaattacaaagaatttaaaaaatattattgatgatttgtattttttttagtgtgggtctcatataacttttaaattaaaaattaaaataggtcctaaatgttgttgacctcagtagtcaactacttattaattatgacagtgctttcaatcaactcaatcttttggcagcagttagcaccacgcattacttgtttctctagtcggcaacaatggcggacgtagttctttccccagttatacaagtagtcttagataagttagccgatccgttcctcttaaaggtttcagatttgtataatatcaagagcgaagtcaataaattatggcgaacgttagacatgattcaggcggtactcgccgacgctgaagagcagcaaatgactaaccgtgctttgaggttgtggctggaagagctcaaagaagttgcttctgatattgaagatttgattgacgaggtttctgctgaagctgttatgtcaaggaccgtaaacgggagctattttcagcaggtgagtaccctgatcccttccgcttttgggcaacttttgaactataacgattggttagcgaaattgtgccaagttaaggagacgttagagaatttggttaaagagaaatctctattcaatcttagagagtgggtagttagtaatagtggtgggtataagaataagcgagggaagcaaactgggtctttcataattgaatctgaggtttttggtagagaggaggacaaagagggggtagtgaagctattagtctcaaacgacaggagttgtaggaatcatggggatgtcttgattatttccattgttgggttaggcggtctcggtaaaacgacacttgctcagttagcgtataatgatgagagggtatcaaggcattttgatttgaggatctgggtctgcgtgaatgatgagtttgatatggtgaaaatcatgatttcgatcattgaaggatcaaggaggtgtaagtatgagtttctaggaatggatgttcttcaatttcatctccgggagttgttgaaggggaagaggtacttgcttgtgttagatgacgtgtggagtgaagatcaaaatgaatatgatgatttgctgaagatgttgagatgtggtggagaaggaagctcagttcttgtcactagtcgcagtgaaaaagttgcatctataatgggtactacttgtatctatcctttaaaaggtttgtctgaggaaagttgctgggatttgtttaagcaacgagcatttggcagcaacgaagaacatagatcaaacttattccccattggtaaacaaatagtgaagaagtgtgcaggtgttcctttagcagtgaagactttgggaggtctaatgcgtttcaaaagggaagaaagagaatggctgttcgtagcagagagtggtgtttggaatatgtacgaaagcgaaaatggagctctacctgcactaagattgagttacagtcatttgccgccgcatctgaaacgatgctttgcttattgctcattatttcctaaaaactacgtaatcaagaaggagaagttaatccatctgtgggtagcagcaggctttgttcggtcacaagaaggaaaaagatctttagaatttattgccaatgagtatttcaacgatctagtttggatgttcttttttcaagatatacagaaaagtgacaatggaaacataactgaatgcaaaatgcatgatctcattcatgatcttgcacaatctgttgcagaaaatgatttcatgacaatggaacatgatagtgcctatagagatcactcaaatattcgccactcatcagtggtttgcaattttgaattgcatacaattcccaacgctttgtacgaagcaaaaaagttgcgaactctcatcttattgatcccgaaaggcaacctcgggggaattccttctggtgtattagaaagttttaggtatcttcgagtcctggatttaagtggaagtggcatcaaattggtacatgaatcaatttcctcttttttatttctgaggtttattgacctctctaatactcacatccaaacattacctgagggcgtatgcaagcttattaatttacaggttatgaacctttctggttgctacaatctcactgacttgccaagtcgcctgtcgaatttgtctaaactgagacatctcataataaatggttgtgacagaataaccaaaatgccagctgatattggaaaactgatatatcttcagactctctcaatatttatagtagtaaatgaagcagataaaaaccttaaacaactccaatgtttaaaccttggcggtgatctaaaaatcagacgattggagaatgtgaaggatgcatcagaagcaagggaagctgatttagtaagtaaaagaaacctgcaatctctgtgtctatcttggggaagtgatgacaatggtttaaacaggaacactgattatgatggcccacttgaaacagaagtgcttaatttcctccaaccgcacaaatatttgaaagtgttgtctattaaagggtttgaaggcagtggcttcccaacgtggatgggagctcttaaactcccaaatctaactgaagttactctagttaactgcaaaagatgcaaaaaactcccttcattaggtcaacttccatttcttaaggttctgtacatgcaaggactagatgtagtgaagaatattggtagtgaattctatggtgaaggcactggcatagcatttccgtcacttaaagaattaacccttacagatcttcccaatttagaatattggtggactgctaatggaggacagggattcccttccctggtcagactttcagttagtaaatgcttgagactgaatagcatgccatcatttccgtcactacagcatctagagcttcgttgttgcaatgatattgtactggagtcagctttgaatttaacttctcttaccaaccttatcattgaagaattttcagagcagctgatctctttagatcttttgcttcaaaataatgcccctctggtgtttctaaaaatcagttcttgtcccaggctcagctgcatctcttcaaatttaggaaaacttgtcaagttaagaacactaacaattagctggtgtggtgacctactttcattgccagaagaactaggaaacctcactgcactcgagtcattggagataatagagtgccacagcctcatctctttgcctgaaagtatggaagggttgatctcccttcgatcattatcaattgagaattgcaacaacattacaacattgtcgtggaggatgaaatccctagtagcccttgagcatttaactatcatgtactgtccaaatttgaattctttgcctaatgattggcagcatctatctgcactcaagagtttgtcaatcttgcactgtccggagctaatgtgtctatcggaggggttaaaatatgccactgctttacaaaacatggaaatacgtggatgtcctggcctgcaagctttgccagagtggatagctaatcttacctcgctcagatctctggcattatcagattgtcacaatttgccgtctcttcctggaggattccagagtttgaatttccttcaacatctttcaatccgggaatgtcctcatttggaggagcgctgcaagaaagatagtggagaggactggccaaagataaagcacatttcacatgtctaccttgggccacaacacttcagggcatacgatgatgtttgaggtagctcagcctctctctctttctaaaatttgatatttatttgtttgttattattgagtatgtctgtcctaaaaccccatcaatttattaacactcatgtttgactaaactatactttctgtaagaatagtatatatataaatatatacaggaggaatctattgtgggattcctcaaaggagtcactgggacttaattttagcaaatagagtttcattattttaatttttttttaaaataataacttccctgatcatctctaaccatcattgttctctaccttcaacccccccacaaactccagatctggtctggtctttgcttcgcaacggggacagcttcgccatgggtgatgagctttcagcaggaattcttgacagggagggcttgcgatggggacggcttaaatctctcctacaaattttatcttcctcaagcccaaccccatatccaccaacctcaacccagagtggccaggatcaggtgtgtgacatctaatttaactagtgtaagagtttttcttcttttttcttttctgctgtgctatggtgagggggcgagtttctcaataatggtgtgatgtgttcttgtgttttttattcagaaatggaacgattatgagtttcttattttgatgagtcggatggttcaaaatggtgaggaaaaagcacaggtagagtgctatcaggcattgaggagaagagaatgtcaatcaattccaacggtactaactccttgacatgagtctttctctcatcattcaatataaccaagttttatttttgtgctcatcatttcatttttttggtctggaacaaaagatatttattctttcaagagtaatttgcaccataaatacttaagtttaactcttagttgcaaaaaatacctaaatttaatttttggcggtaagaatcactaagttatatttatagaactccgtaactacgtggtaattaaatgtcaagtcattatacacgtgtcattttcttattggtatatttaaactaattatttttttaaaaataaaaatttaaggacttgaaccaatcaggaattgtcatgtgacaatttacttaacacttcacagtaaggtacttacagaagttccaaaattataacttaggtattattactgctcaaaattaaattcccaaaattaaacttaagtatttatttgtaaacgagagttaaatttatgtatttatatcgcaaatagttcttctttcaaccctgaaacaagtcaagacaagtgtcacagtatttggagcatccaacatcaagtcttgttcatgaagtaaaatatctaaaaattttcagtgctaaatctttctaatttcatgaaacatgaaactattgttttttatttttttgaacagacatgaaactattgtttgatatactcattttcatcaaaatcaaataaataattgcaggctgatctttgatacgaatttcctatcatttaagtgtaaacagtagccaaaagaaggcaaaatagcaaaagaggaatttaatagctaatatattgatattggggtgataagagaacaagttgctagatattcgagagatccagctttctcccaagagctaaagctcacttaactaaagtgattcacaccctaaaacccctctaaaactctaatatatatactatctcaatacccccattacaatgaccaacgtaccttttcatctttttggaattttattttcggatacccctcgactttcgttacaagacattaatgagatcaacgctttttagtcctattcgatcgatcaaaaattgcttccagtaccgattactggaattttattttgaatattttagcttctttcagtaagaatattctttgcttttcttcgatttattttattctttttgttttgataataatttatgcatgatttatttagtaagttttttttttttttgaatgagaacaatcaagcaagaatgatttattctgtaaaattttccagaaatgagactatgatattcttggtacagagcaagttctcggaaaaaattattgaccatttctctttaaccaatctgtgatatatatgtgtttgtagtggggtttaaggaagatgaaagaagagcattgggttttaaggtgaatttctagtgggtaaaagaagaagaggaaggtgaaggaatgagttgggtaagtgccatttctgagcttatagaagatattttagtgagagagagtgaaaatagctacaaacatattatctgtttcattctctatctccacttaccttttccttctttctaacaaaatcatgtatatggtttttctctctaaaaaatctggtggctttagatgtagataatatggagaattaaggatttggtggtcttgaatcttgattaatccaaatgagcatgtatatatccttgtaggtgctctgttatagaacaataaaattgaagtcatgtatatgtgtgaactgtatatagtaatgtatatatgtgtgaactgtaaataacttaaattttctgatcagattttaatttctgccataacagttacgatcgtatttggttgattttgataaatttgaggcaatagttgaatctttgttatggtatttgagatatacaatgtattgtttggttcaatttctgtatgtgtctatttgatgagattgctattatacaaaaaaaaaaaaacttgtatccattagtaaattctaatctcagaaacacagtatactaaagccaaaattcaatcttggtaatctgttcaagataatttttttatctttttatacaattttaatagagggacttactttttcttacatgattaagctttataggctgatctttaactccaacatcagaagaatgattactaaatgttgctggtatgttggattcttatattagaaaaagaagaccaccacatatttggtgccaattgtttatttatttacattattatgtacaacaatttatttgatctccttcttgaattgaaatagactatactgtactaaatttgagtttcttccaagtgtccaaatgtcaatagaaactataaaatagtcttttatgtacaataatatattaggacattcaagaacatatagaaatatcatggtctatagtcttttataagtgtgagatatatatatgtaatactataaatatacaagttagtttcataataagttcaatatattgtcaattatttttgttagttaaagattagagattttgtaggccgtgtttatttttttttttttgttttgagtttatttctaatcttagtattgaaattattttcacagtgaaattatctcaattggattgcccaagcttatttggtgcaatggtctttcacttctaattttacttgtctatatttgactttgagttcaatgataagtttatatgtatgttatgtgtttgtactgttatttctttgagttcaataatagcgtgtttatcttccaactccttaattagattttatgtgatatgttagataacgactgtggattgcacactgagaaatctatttcaaattagagaa

SEQ ID NO: 42667 - DNA, 3747 bp, Cannabis sativa
  modified_base (1467)..(1468): a, c, t, g, unknown or other
atatatatatttaaatagatgccaatgattgcaagcatatactcttattttggggtatgagatttaagtatatattttgacaaaaagtacaatacataattattggatttaaataaaaatactctctttcttttttcttaagaaaagtgaaattatttatttatttaaattaaataaataaatgcaaatccttaattctaaatttggttataaactgtaccatagtctaatgatagtcaaactattcttttaataataaaatttaaactataatctcactttaatatgctaacataatgttttgtaaaataacctttaagaaatattttattaataaaataactttacaaaaaattgtattatattagcaaaataaccatgtatatataatcgcagaaatacgactataaattacattgtccaaccataaacgattattatttatagtgcaaaatgactgtaaatttatatagtacaaccatcataatcgcataaaataagcttattttataaattttaatatttcacattgttagtttgataaattttacattataacatctatactatttatttttatatttttgtgatttgtacaaaataattttataacttttaattaatttagacttcaaaattataaattagttgtttctgtataattctatataaataaataaaagaaactcattttaatttatttttaaagatcattacattttaaaaaatataaaaatttacataataaactaaaaatttgaaaaaaaattacaaatatgtcaacacaaaaaaaaatattttcaagctttgaactttttatttacaaaaatacatcttcagtaaaaataataatttcttttttttttttgttttattgtttacttatagctgtattatagttgttttgggttgttttatagtttatttatagttatcgtgtgaggttgattttttgtttttttttattttttgttgagaaaattatatttttataattttaaaattttacaatcgtatttttatatattaaaactttatatcgtaaaattataaataaaacaataaaaaaatattgttttaaaaattctcctatatatattgtataagtaacaaacaatctaagaaataattttaatacataaagctgtcaaatagaagtatttaaaaggaatgaacttgacaaaaaaaaaaaataataacatttactatccagtatttagaatcagaataaattaatggagaaatataacgaaatataaataaaaaaaaatcgaaatcaatatttataatatgttatttactaaaattacttgaaaataaaataatagtaatttatcttgtttactttatcagaaaatgtagtcaaaatatttaattgactaaattatcctttagagttaaactatagttattttgtaagatatatttttaaggataaaattgtcattataaatttaatattaaaanntaaaataaaaataaataaaaatcattagtggcaattattagaaaattagtgggggaatttctctttttttttctctcccttaattaatcaagttctcttttctaaatttaataataaattaagtatataaatgtaagggaatgtctcctttaccattctcaatgcttaataataaatatattattttgaattaatgcctttaataaatttataaataatttttttttaacaaaatggtatattctaatttcgatgctgtaaattacaagctatacgtcatagatcattttaatttcttctagtagtgtagcctaatttgatagagagagtctttcaaaagaaaaaaaaaattgataagagtgagagaggtggcacttttcactttgaatttaatattgtgtaatagtgcatatatatacatatatatagtcaactctagaggtttaattaaaataaatagtaattattcaaattttgaataataataattaatcaaaatgtaagctcttataaaaagaatgaatatttaagagatgagaaatggaattttatatttgaagcatattctataaagtgccaacccttgtgttgtgagccccactcacaaattgttaataacccaattaatatcagttcaatcttgatctaccctttaaaaaaatcatattaatccaaacaactttgcttaattaagtggaaatcccctacaaaaatatatgatccaaaaaaaaattcttggggaaaaagctaataagcactttatgagatgattatttcattaaaaaaaaaaaatagtagctagagtcccaaataatcatcctagaactaattaatttgctaattgattaggctacataataattaacatatctttaattaattattttcgaaagggatggaatccacaaaaggaggcaaagacccccacttgtacagactcttccatatgtaaaagaagattagagaaaacttgttaattaaaattaaaaaagttggaatccaagaatgtttaggccaataatatgaattaggtgattttggaggtcttttagcacttgttaataattttaatgagaatgtggataagactttaagagaaggaatagttttttcttttggactattatataataaaatcattaatcaatgtattggtgggtttaagtgggttttgcctcaattatattccctagtagttacacaaaaagatttgtaatataaattaggtttctaaaaagggctttaggcttcaactttgagatatataactaattaaagtaccaaaccctttttagtgttatatataatataatatattataattattattagtcacattattatagaaaagaaagaaaaagagtttccaaagtaaaatcaaatatattaaaaaattgatggaaatgacaaaaccaaattgagatatagtactttctgaatattgtggggagcaaaaacatgtttaatatactcacaagcatattgactctttttataaatattagtacttgttattattaattattaatttaaatcataaatagcattccaacaaagcatctttttccacacagaatgtttaatgtgtggaaataaaaagaaagaaaaaagattgcttatgaattactcataaaatgatcactctctttacaaggtggtctaaaatttgacttaatatttacccttattttaaatgttattttaacagtttttttttttttttctgcatgaagaaaaatgaattcattcacttaattaaaatgggttaagttggaaagtactcaaaggagaaacacaattctcacaaacaaaatgacttaaagctaactaggtctaatgtaatacattaatagaataaattaattgaaatataatgaaaaccaacaataatattaaaacttctacaccacaccactactaatatagatctactagatgagtcacatattgtagacatcttaaaattaagaaatgacactccttgctaaattgaggactccaccaacaatccaagaccgtatgaagtagggggaaagctcaaaccaaaattggctaaaagcctaagtctttgccaagtgtaacgtccgtgctaagatggcacgttacaagctaagtaagctaagtgatgcctatacaagttgttcaagtagtggtcaagtggtggcacatgttaaggtgcatgctggtgacatgctgatacttagtttgtaaggcagtggcatttttgtaaatatcttcaatattgttcagaacgggacgagacttggtattcgctattt

SEQ ID NO: 42668 - DNA, 7614 bp, Cannabis sativa
  modified_base (26)..(51): a, c, t, g, unknown or other
cttgatttttttataacaaattagannnnnnnnnnnnnnnnnnnnnnnnnnaatagaggttctactgtataaaaaaaaaaatgtatgaattttgttattttacgtaaattttcttattttttattagatttttattattatcgtgagcataaaatttaaacaacagcttgtgagagacgcagtcaattctctagttatttgatcaaatgcacaatacaatataaaatgatataggctctcatatcaataatcacaataaatgatacttataaaacactcataacaaataggcaaatatacaataaaattatatttattttgttataataaataacaaattacaatatctcagtctatagggtcacactaccgctcaacattttcaacaattagcatttggaaaaagaatgaagataattataacatcaacacgagaaattcacagtagaagaaagggatccgtaaaacaatggatttgccttatattgaagcagcaaaaatctccaacacaattgagtatcaagcaatgccaaagacatatacatataaatatatataagtattatatatatttatacaccagtttgaggagagcaggaaggagcataggctgcgcattattattgtgtgatgttggtttcattggtgtaaggcttagacagatgacaaaggtggctcaaccacatcgcccgataccagaattgggtctggagactcagctggtggcatataaggaggtgtaataagttccatcagactgccaggctcaacagggctcatgtaaggtggtgtgttgtcacccaatcccaaacaacggttacctgcatcaatatcaaaccccctcaattagcagtgaacttcacttttggcctctaaaataagcataattctttacataaatgaacttgctattataaaaaataactggttagtataattcaatagaggctgatggtcaaaagagcattaacaatttaacagaaaactacgtatacttacttctgtatctagcagtggtttttgggaactctgtgattataccatcaactttagctcccatgacataagaatttatttccacagttggatcggataagaaatcccatgcttgtgatacaaactcattgctgaatgtttgtacgtaaacaggaagcttgtggctgtgaatctttttcacaacatctgtagcaccagtcaaaaataacatattatctgggtagatagaggatttgtcaacagtcactgagtgagcaaacttcttgatgtccttcaaggaaagatcatcaaaacttcggatttgctcatcgattctgtacacgagttcataattgtttttgccttggaactcttttagaactgaactatgagtagactgtatcataacttttaaggctgtctgtttgtcgaaaccagctttgctcagggcgctacccactgcatcagtaacgcttaagcttagctcttctgcaagatagggtgcatgctggaagaaacaatatgacaaaattatcatttatgtaaaaaaaaaaaattaattaaataatttatgtgaaatttgaattaggatctggtggctttgcaagaacacattcacaacttcattagtagatcagctgggaaatttttattatttcgctcatcgccaattggtttaaaaatgaaaccacactgtatttcaactacatttcacattctaacacagtatcaagagaaaaaaaaaaaaaaaaaaagcttagtgtgtctggcattattttctacattaatagtgtgtggaaacttaacacatggacagctccactcatcattcatcaccaatcgattttgagataaaattccatacttcttagcctacaccctatttcattttccaaaaactacatttccacaatctaacaaacatgcaatatagccatcgaaaaaaaaaacaaactaacatgcaatatgtatttgtcttctatttgagtaacaaataatagtgtgtacataaaatgtgcacaaaaacattacaaagtggcaacttttatcaaccaatcatatagttaaaatgacttgccatgtcgtgtgtaatattttcgtgaacattttgtaagcacttatcattactcttgttttgcaaattggtttgaaaaataaattaatgaaagtcttttatgaaaattttactaaacatacaaagaaaatttacgatatatagctttgaaaacaaaactacatacaagtttttattgttaaagtagaatagtttcatctcacaactttaattaacagttccttgttaccctataaaaaactatccaatccaacaattcaaagtgtatacatatcaaaaaaagaaaagaaaaaaaaactcacctctatgctaatcatgatgccagtaagagagctggaattctttgctatggctaaaaagtcagataatgacacaaaacggccttcattaatgttcgctggattccggtataatgtgaatgatgaataggggcttaataaaacagctacatgtaaacagaaaagaaataaatacaggtttcaaataatttttcatgagacaattcatcatttcctgcctaagaagtactacagcagtacatagatagcacaacttatattcaagaacaaaataagaaacaaatcacgcaaatatttaacttgctcagaataaaccatatctaattgataaaaataccaaagacagaagcattaatatacttgatcaaacattttaggtaaactcattgatagcctttgaataaataagtagtttaatagattccaccagttacttgattagaaaggaaggaagtcagtaagtcctttgaatagatattttaaaaagcacactatttatctcctaaaacagtctatttttgttcaccaagtacactccaaagtctaagacgaagtgcctaacataaacctcttaaagaggtaatcttggtatccagtcctgcttttgggaagatgtttctccaacaaaaacacttctttctgtgataaggactcatttttcgacctagtacaactcccacaaagcacttaatgacatgaatattgtaaaatataggtcatttatcaataatgataaaatcacaagagtattatatctaaatgagcaagcacatgagaattgttatattgtaaagtaggttatttttctccacaaagatagaattacaagacactacaggtaaaccatcaagagcttgacaacacttacgttttaacttttgaacatcatcccatgtcaagttgaaggagaatattccagtgccattctcaatgatctgtggaacactcattttaaaattgctaaaactagaattagccacatttgtgctacttaatagatttatagaggttaaacaaaatggtatcccatcctttgatagttggactggacagtcaagtacatccacaccatcattaattgccttggcataagccttgtcagtacaaccaggatagtctccacttgctccgcattttgagataaccaaaggctttgctggatcatgatcacattatgcaagaaacaggtaagaaatgaaatgaaaagtgacaagatcaatcagaaattaataagaagaaacaatttaaacagagtaataccttgttttgtagcgttgtttcctaggtgagcaaagcattctgtagtgtattatagaggagtcagcagcttgaaatgatcataatttatataagacacgggaaaggtttcaccaaaatggttttctagtatttttcccattttgaaataggcaatgaattaagccccttatttttggtcaagctatatgtatctttctacatataatgaattaagctcttaagagagttcaaactgcattgagctaagccagatattttgggatatgtttttccagagggcatactgtacgttcaatccaattcccctagtactattccctcttcaatgcaagtttatttgtttgtaaagaaaagaaaaacaaattgtaagctttgtttcttatgatagagagaaaaaacattacctatggccgctgatggagtgataggaaaatcagataacaccccatcaacactgaatttcccattgtcaaagaagttcaggtactcagctactggatcatgactataattatagcttagagggacatcattcataaactccgatgcatatacctccaacccttctttgtgagcatccaagacaagagaagtatgtggaagcaaataagattttgtgttggtaggccatatgtaacttttaggaacaataattccagaggcaaacgttttaattaatttaagatttctcaagaaaaaatcatatgtccggtttgatgaaggatcaacctcattttgtgctggaaaccgaaagactagctttgtcactgttgtattgattttttgcttgatattgtttaagaaagccatctctggcgatgagatataattgataactgccctttcagatagcgagagtacaaaatttgtcatacttaaattgtgttttgtaaagaacgaatcatgctgcaaaagcagaagaaatgagaatataataatagctaaacaagagtaggttatatagttcagaaatagagtgacttgaaatctggtttaaggtaagccaatcacttacttgaatatttaaccataagttttttggtttgatttctttaatcatctggtcaactgagagaattgagaacgcatttccatcaaacttattcgtgcggctgaagacaccttgacgaactgttaggaaaacaaaacaaattaagatttaagaagaagagtttctcaacaaacataactgaatccatcaagcacaacaaacccatgtaagagctagacaaccaaagaaaagaaacacttgaaaggagtgtatagtacgtagttaccagagaagattgatagctgtttgaatttgtaatccaacggaaaccatccagtgatagatttgccattaacaaggtacgtctttggcttattcctagagaactcattaatatcagtgccattgtctagcctgatatctggaaagcaaattccaataccatctttggttaattgcacgtcacaccacaacactgtattgggtgaggtggctaccgatgtgaacttgtacgcagcatagcttgaatcaggaaatatcccagaaaatccaccatgggcaatcaccacaggcgattttcctgaaatttaaaacaaattttttcaaaaagaaaaagtaagagattaatcttaggctttcaaaatcattatgtgtattcattaattacaatccagagtgttttcattgaagaaaaaataaatctccacctagcaatgataaaagaaatatttaaataatcttaatgaaagaaaaacggtgactgctgagaaaatccttttaaccaagaccccaaacaaacaatactcagttctaacagcataagaccagaatgagagccatagaaacacaatatacagtaccgttaagagttagccatggaccctgaggttgaacagagaccgaagctagtaccaagctgaggagaagacaaagtgagagtagagggcgtgcgttgcacattgtcagataatagacctcgccagggagctacttgagcttctgcaatttccaataaatctctttctctttctctttctctttcgttgaagcttgtggtaaaatgtgggagattttttatcaggtgagatagcctcatgatcacatataaatatagatatatgtgtgtgttgatcaaaattgagagagaagagaaagaaggaagggaaggaggagagagaaataaggagttgtgagctctgaagtcagaacgtttcagcatgctaactatagcaatatgcgttttcattcccacgtaatttttgggataataatgtcctcattctctgtcaacgtaatttggactttatatctatttttacacaaatactctcaaattgcctaaatttttacacttcaccttcggaaaattaccacctattttttcatacataacaattactgtaataaaatgcacatttttattgattcaatactatatttataaaaaataataaaacgttttaattttttttattttattcaataatgagttttaattttaatctccactatttatttaacaaagttggtgtctttattccaaaaataaataaataaataaataacaaaaacaaaacaaaaattggtgtcttaaagtggtttcattaagcatttaaaattggtaaagtttgatgagatagatataaatagatcaaatttagtacacactcgcctgactacttagaactaaatctatatttataaacattttcgcaattcactttagcttatgacgttatgactctcaccaaatgagacacaagcacttggttaaatatcttagagcactcacatcagcttctctactctttttccataatatctcacaataatattatttttttttttgttttacctcaaactttaactttacacatattgtggaaacggaaacaattaataatttacgattcagtttaccgaactaacaaatacacgacacaatcaagaaaaaatatttcaagagatctcaaaattcaagtaatgaattaagaagtaaaacaaaaaagaataacatcaagtttaacgagttcgagtcatgtacaatgctctacatctcgattggaacagcaaagatatgatatcagtgtttacaaggttataagaatcctcacaaactctcaaagattacgagaagaagtttctctctcatttagactctctctctcaaccttacactatcataatttccactcaaaaaaatctgatctgattcacacacagttacaaagatttatatctatttataaatttgtattgttgtcatattcatcaatcttcattctgagaagttcaattttagtagcgtggatttttgcaaaaaccttgggtcgtttttaatttcaacatgtttcaggaattctcggtagtttgtatatagttctgtaagtgagctctgatccattatagttataatcttaagagcaaaaataccaataataaaatatacacgaagagttggcagggggcaaagacttcttcaatcaaaatttcatcaatatggtatgaacaatactttatatggtgtataatcccaagtttggaaatggtgctcttacgattttcaaaaagcatcccgacatgccagtgaattgatttagaaaatattcacgaatgtgaattggtcatggttaataactctcaaaagccaattaccaccaattacaaaaataaaagcatcccatcctttattcgaggatggttgttgtaatattttgtacacacaagtgcacgtatcgttacaagttgtaaactcactaagagtgaggtatcgatcccacaagaattgtagtaaagtaagttaaaattcatcttctacttctatttggttaaataaaaattaagaaaaaataaaaattagaaaataaaaatagtgcaagaataagcaattaaattaaataggaaattaacggttgataagaactagggcttcaactttaattgtttctattgattatgccataatatgattatctccctattatcaatttctatgcaataggaggtttactaag

SEQ ID NO: 42669 - DNA, 8502 bp, Cannabis sativa
atttttcatcacaattaataatatatttgatattacgattgattgtaagttatcactctacttagaatctgaaagtaagaagtaattctaagatgatagtagaacaatgcaaaaccttaattagttgtatatctaacaagaattcacaatattcatagcattcaaatagaaaaatataaataatttaatatgggagaaatcaagaacaacatttattatcatgaatcaagaaatcatattttaaggttttgaaataacactcaactaaaaagaaaatactccatactaatcatcataattaaaatcataattaaaaagtaaagaaataggagaagaaaagaactagaatgatgaacaattggtgatgtaatcttcttcttctccactttttatgagtttttttttttctaaaaaacgcagtccccaaaaatgataaaaatcttatttatatcctataaaaatcctttgatttaaattaaaaataaaatttaaaatttcataaattgcgctctcgccggggcaaaggtttatgctcgttgcggcaagagcctcctggagaaaaacctaaatttccagtcgcacgctcactatggcgaagctttaggctcgctgtggcgagaacctctgctgaaaaatttctattgcatgttcagattagtattttaaccataactccttcccttcaataaaactcgctcgaaaaattggacgatttaagatgttctgaaaagctgagaacgagatctacaacttttatgttcagctccaagtccagtccaaggtcttcaaaatttacaattaagttctgttttgtaaaactgagctctctaaaattatttttttttaccaaagtacgctcaaatcattctaaaatattctaaatacatgattataaaattctaaaaaattaaaatcacactaattaaaagtttaaaaaattaatctaataatgagagaaaataacctaacttaatggacaaatatacacgagctaacaaatattaaaaaaaaaatagagttgattaaataaattcatttatataattcatataattgaatgacatgccacttgttggctttttttttgaacgtattttgtgtgatgcaggctgctatgttgcccatttcccactcttcctcaacattcctctttcaataacatactcagtctcattgttaatggcgattcatctctcccaagtaattggattctggggagttgtgacgtgatataaaaaaaatatgaacttttgcaggctattcactactttattacatcaaaaaccttttggaggtaatgggcatgccctgttattggattccaacattctcaaacatttgaattctgattcagcttctccttcacagactcgaaaaactcatgcttccctgctcaagactggcctcttttacaattcccatctcaacaccaagctcttatcactctatgctaataatctctgttttgttgatgccaacctcatccttgattccattcccaatcctgatttgttctccttctccacactaatacatgcctttgcaaaacgcaaccattcagttcatgctctccgtatctttactcgtatgttagttcatggagttgagccagataattttctctttcctagtgttgttaagtcctgtgctggattactatcactggaagttgggaaacaggttcatggctttgcatttgtgtttgggttttctttggatgtgtttgttcagtcctcattactgcacatgtatcttaagtgtggtcgtgttcgggatgcccacaagctgtttgatggattgccccaacgtgatttggtgtgttggagtgctttgatttctggttactctaactgtgggcatgtagatgaggccaaagagcttttttatgagatgaggaaaacaggtcttgaacccaataatgtgtcatggaatggaatgatctcgggtttcaatcgtagtggcttgtatgctgaggcgatggccatgtaccagaaaatgcattcagaaggctttcttcctgatgcttctagtgtttctagtattcttcctgctatttcagaatttgaagatttaaatatgggagttcagattcatgattatgtgatcaagcaaggatttgggtcagataaatgtgtctttagtgcacttattaatatgtatgggaagtgttcttctgtacttgagatgtcacaagtttttgatgaaatggatcaaagggacattggttctgtaaatgcttatattacagggctctcgcgaaatggtctagttgacaatgcactgaaggtgtttagaagatataagggtgaaggagcagaattgaatattgtctcttggacatcaatgattgcgagttgctctcaaaatggaaaggatatagatgcattggaactttttcgggagatgcaagttgaagggttgaaacctaatgccgtgacaatcccatgcttgcttcctgcgtgtgggaatattgcagcgctaatgcacggtaaggcagcccattgtttctcccttagaacagggatctttaatgatgtatatgttggtagtgcattgattgatatgtatgcaaattgtgggaaaatacaattatctcggctttgttttgataaattgcccactagaaatttggtttgttggaatgccattatgagtggatattcaatgcatgggaaagctaaagaaaccatcgagctattccatatgatgcagaagagtggacataaacctgattttattagctttacttgtgtgttatctgcatgcagccagaatggcctaacagatgaaggatggcattatttttctaacatgtcgaaagagcatggtataaaagcgaggttggagcattatgcttgcatggttacacttcttagtcgtgcaggaaaacttgaagatgcgtattccatgataatggatatgcccgttacaccagatgcttgtgtttggggagcattgctaagttcttgtcgagtgcacaataatgttagattaggtgagatttcagcggaaaagctcttcgagttagaaccaagaaatccagggaactatgttattttatcaaatatttatgctgcaaagggcatgtggagtgaagtagatagagttagggatatgatgagtcagaagggtcttagaaagaaccctggctgtagttggattgaggttaaaaataaattgcacatgcttcttgcgggagacaaatcacaccctcaaagagagcaaattattgacaagctgaatcaattgagcatggagatgaagaaatctggtcactttcccaacatgagctttgtgcttcaagatgtagaggaacaagagaaggaacatattttatgtggacacagtgagaaattggcagttgcatttgggctgctcaacactcctccagggtcttctttaagggtgatcaagaacctaagaatctgcggcgattgtcattcttttataaaattcatatccggctttgaaggaagagaaattttcgttagagacactaatcgcttccatcatttcaaagatggagattgttcttgtggggattattggtgagttgctggcctgatctagtcaaagattgcaacctcactgaatgaagtatttcaccacattgagaaaagacaagtacacccatagcatccctgaaggtgagggaactaaagttacttgactaatttcattgataatgaagtggtcatgctttaagtttttgtttgccttgtctctatattttttattttttatgttcatccttttagctaactttagtgcatgaccggtcctagcatacttcatgtctgtcatagttcaatctacttgcaactaattcattattaaatgatgcgtatctgtttatggagttgcatttgggttacagaaacattgttttgcctactctattttagttttttactaagcgtttttgcagccttgttatgcttaaacttgtgttgccttctaaggagctgagcttgttgttcagaaaatcgttgcgaaagaatccagttttgggaattggacttcgaatgttgaaggatgttggcgatccaacaagtcctacccattccctccaaaaggatgtataaagtacatttagacccattttgtttggaaccatgaaaaggaaaggataataatagattaaaaacagtacaattccatacttgggattttcattggaaaggctgttcagtcaataatgtggaactgttattcattttacaaattttgggtggagcagcaataaaactccatgtgttttatcttgtgttcaaatatacttcctttgttcacttgagggatggatttcaacagcccatcgatgctgttgttgatgcacaacacagtcctcgacgttgacgctcagtcgactaggctctacagttgaggaagccaacactacactagcaccgttcgggtcctccagttgtgttcttgatgctcacggcaaaggtctctctcttcccgctttatttatgtcaaattcattgggattattctctttaattacttttataatttcctctctgctttgataattcaagttagcctgaaaagctttatgagctcaagtaagttactattttgtgtgtgtttttttttactggaaacgcttattcaaactaccattttaagttctagttttagtatatgttgatctaagaatgatattccttgcaaatattgctttgcttctcatatgttagctgaagatctgccttaaaagataattgcttaattggtgttgcatagagcattaacgtgtgcacattttcagctagacagtggacatgcaacatgaacaacagagtgagcgacgggtattgtgaaagtgcttcgcaacagaattgacaagaatggcaaggacaccaggttgggttgggatcaaggttggacataaaggacggctgggatcctatatataaataatacatgtacacaagtaacttatatttagaagatacaaagagcaatcttagcatactgcatacatgtatttagcagaatataggatcctattttgctcatatactcacaaaaatattgggtatctggccagtactacaaaatatgcttatgtacaaagtttaggctttccgagagttgttagctcaatgcacaaactgaagatcttccaagttcaagctcatcatccaaaattttataattttatgcaaaatagttggtttggttgtggcatgcttaagatcaaatcaaccatccccaacaacatatgtgtcaagcttgagatacttaacacataataatcaaaggtcaatcattttctgaacacaaaaattggtctgtcgaatccagttttgctgccagacaagccagaagttacatcctccactgttctaaaaccaatctgcaattccttttgacatcagaatcttgctaaacaattaactaaccatcttattaaaagatgtcttaaggccccgtgcagctgagtaaagtaaaaaaagaagtttcacaaactcataaacagatgtggcacataccttgtcaagaagtaactcttgaaaacattctggccggaagataatcttcttaaaattttctgcagttgtctgcaaagtaacaaaacaaagcattaggctgggggtgaatctacttaaatgataacatcattaagtagtagaagaaaaacaaatgaaatttaatatattcaaataactaacccaactagtgaaaaatccaacttcacattaaaactagactcagggtttgacatgtatgagagccgaaggcagaaacaaaaattgcttattctaaaccttgtaaggcatttagctgatcaacaacaaaaaaactaattaacaagaataaaagggacatctttaaatctgctgtttaataagtttttgtgtctgaggtgtccagcaaagttttgatttgtccttcaggttctgcttatgatcatacctaacagtgttgcataagacatgaatactcatatgagataaggaacaaacaagtattatcacctcagatacacgacgattgttgtcgtatgatttccaaggctgtggttccagtacaaatattccaccctgcttacgagaataagaagtaaataaatgcttctccaaattcatttcacatattaaagttctatttcctattcatatccttgagtagaataaaattaacagtttattgcaaaaagcatgaaaagacaagaggataccggattaagcagcttccagatctttgaaaataatgtaattaatccatcatcaccccagttcagatgaatccactttgaaacacttaaactgtattgcatgagacaaactaattacaaaacaagtaccgcatcacaataaggtcaagcaacaacaaatacttgagcatctaagccttattactatattctacaataatagaattctaacgtgcatgaagttttcaatcaaaagttgagcaagtccaaattttaaggtttctttttctcataattttgtagaaacaaacgcgtttattgatatgcactataagacgaacttgccataaaattgcatcataaaacttctccggaggatgacgactctggacaaaattttcttgtcggaaagatactatgtcagatagattttttggcagagtggtactaatcttcaaattctgtttggtctcctcatctgatgatgctgtgatgttattccctagaccgtttgcatcttcagaatcctttgattttgaatcctttccgtgtatctttccagcactgtctatctttacaaattttctcaggtgccaatatgcatcttcaatgcgatctggcagataaagttccaagagttaatgattagtgaccaacacttgttctgtcaacttttatgaagaaagcttcagcctaaatacaaagataattaaaagaaaataaataaataaataaataatgacaataataagaatcataaaaagaggcctaattacaattaaaaacttacttgaatcaatgtctactccaagaatgctttggcaatgaaactttttggctaaagataaaaaagaaaaattgttaagaccctttatttcacatttaactcattggctagtatcctttataattcaaggaaaggagtaaataaatttagtgaataagtaccaatctgaatggttataattccattattgcagccgacgtcaagacagtccttgccttcaaaccattctttcttcatgacctttagtctaggatcttcctcaatgtcctgacctagctgcaacgttatatagaaataacatcatcattgtttaacaatagggaccttaatctttggaaaactaatatactcaagcatatcaaaatggacatatcacccatataatcagaataactaaaggttcaaaaaactaaagcaaaagggccaactaggtcgtcgatactttccaggctaaatcaatccatgattgcaaaactctagaaaatgtatttacatacatcaacaaatatactcctgacctcaaaaacgtgcagaaaacaattacaaaaaaaattaagagaggtaagaggggagaattacccgatatccatagtagtttctgtagttaccgtaagggaatatttccttgtgctttttcttcttctgttcaacttctttggtgcttctctcttcaccttttctcttctccgctttcattttcttctctctcttttccgaattgcccatttggtacacacaagtagactggattgtaaaagataggatcagatagtattctactttatcctgagtttgttatagaatttaattgaactgcttttaaaattaaattgttaaggcttaaaataaaataaaaaattatataaacatatataaaagtacaagttataataaatctaaaccatcatattttgtcaaatagaattacaaaattcatttctccaaatgactagttctttttagctacctaattcaattcatggttgtacgcagggcacaagttttgacataaaaatgcaaagcataaaaggtaaagttttgctaatagaatcattaaccgctcctgtaatcagcctaaattagcactagaaaccaaaattagcactataacaagagtcatatagattttgaacctttgcttccgtagcagtaaaacagctttacgcacgtggcaaactagcaaaacttaacctgttaagcaaaatcctgttgcagaataaactagtggataaagaaagattcgtaaagaacctgattttcagagactgagcgactgaaatgggcgagaagacaagagcatcactgagtttcacagcaaacggcgataagtaaccagcgacgaaggcggacccgaacagatgttgggcgaggttgaaggagagaaagagaagcagcggaaggtttagggtttagttaattgcgagggaaaaaaggaggcatattagcggcgaaacgccttgcagttgttaactgtaaaaagtagtctgattatgtagtttagtgtaaaatcttttattttattttattactagggaatagatccgcg

SEQ ID NO: 42670 - DNA, 3183 bp, Cannabis sativa
ataatcaactttctaaatcatttaacagaagtgaatgtatgtaaactaattcaatcaaggggattacgttagtgttctgtccgatacattctattactaaacacaacaggaaatgttataaaatgaagaaatatgtttctgccctgagtacaattcaagataatttttcaaatattataattttatgttatttttataggtgtactatagatttttgggcgaagaaaaaacgcaacttaacgaaattcattttatggacctaaacgaaatgcaaaagaggcaatttatgcattcactttgtgcatgcttgaacatatttttgtagctttctactgcctaatagatcattaaacaaaatatatgtagaaaatgaatactaaaataccatttattggaaacctctgggcggcctgaattgaatgaaacaacagggtcaccaaacatactagcgctctcatatcttcttaagcacatggctgcaaaaagaaaaggtttgaagaaaagtcataaaagaaaacaaaaacaaagaaatattccaatgtcctaaatactaattaaaaataaaagaatgacaaatagaaattggtaggaaaaaataggaagaattgttggttaacttaccaattatgcatcttgacataacaatatttggagtaattccatcctttttggcttgagaataaagctcgaggcctacatttagatcatcttttctacatacaatatgcacagagcatacaataagatctttgaagttgaacaaaactatgggttttcttctagataatcattaaggatttatataataatcaaaacaatcttcagagtaactcacttttcgctagccacaagtagaatggagtatgttatactatttggagacaatcctatggttttcatttccgatagaatttccacagctttatctagttgatcaccatcacctgcagtgaagttaaatgacttaataacacattaaagtttgtaaataactaaaatgtaataatatcccacattatggatataaatttccaaactgccatttctaaataattaaaaaaaaaatacaaagaagagaaaataactaaacagtttaataaagccatgggactcacacagtgcagtgatcaaagcattgacagtggaaacagtttgcttcaccttcattgacttcagatcctcatatagctctagtgctttctgccagtctttagcctgaaaaaaaaaagaatgtgaatgttattacagtaggtttagcagcacaattaagcttgcatttaagcatcatataaaatgataaagaaaaaattaattagtcagcaatttctaattactgatgacatgacatgatttgttttgtttttgttatgtggctagctgagtaaagatcaaaagacttaagtggaatttcctaaaccaatactttactagtttcgtgacaaaggcttcagaaattacacttgttatggtccaagttgcaaatacattacagaaagattttacaaatggctaatataatttaggcagaattgttttagcacgtgagatgtaagattgcctagctgagacatacattgctacaggctcccatcaatgaactgtatgatacaatgccaacttttactccttggttcttggcttcacgtaaaatttcgaaggcatcttctagcttcccagcatgccctgcagcagctattaatgaactgagaaacatctgcaagaaagaccacaaaagaaaaactaagcaatctccgcacaagaaaaaaagaaaactgaatgcagagatggaaagaatgacagggacataaatatcaaatcatctcccttctgcacactttagttcgttgtaaaagattaaattcttgacaaatgaaccttgtctcagtaacatcctgctacaactatatctgtgcaaaatgcagcaaaaaacttcaccaattcttttaatgttgataacattacctgatcagggatcacgcctttgctagtcatttcttcatacacattgtgcgcaaactcccagttacctgtttggcaacaagaattaatagcaatggtgtaaacctctggcgtgcccttaatgttgtattgctgaatcatcttatatacttcacgtgcccgatcaacctgtaataaatgttgagttaactatgtaggaatttcaatggaaaaagaaaacgaataataatacccaacagcatttgtaaggaatggaaaacttacctggccagcatttccgcatgccttcatcaatgcaccaattgtgacatgatcaggatctataggatgtatctctgcagacatttctgccaatacatcaaaagcacgatcaacagctcctgattgaccacaggctgtaataagtgcattgaatacaactcgatctggcttcacgttctactgcatgttatcagacgaacacttaattcgaaatcattgcacagaagaaacaagaaaattagaaaacacatttatgctagaacactgataaaaagtagcatatgcattatgcaactataactatttaaatttataggtctcccacaataatcataccttggacctcagtataccataagcgccaaatgccttcgcaacttgaccagctctagcacaaccatcaataagtgccccgtaagtgtgaagatttggttccactccagcattaaccattttatggaacaccttaggaggcaacatcatatagtagtcaacatgggggctcatcatcattcatcataaattcaatggttactccaacaagacataacaaaggataacaatttatcatgtggctcctctaacattagacaagttagcaaaaatgtctcttaaaaagcattaatcaggagccagacagtgagagaattaatggaatataacagtagctgagaagcaattaaagccaactacaccaacagtgaataacaacaagtattccataattttagagaagtttccagcttcaagtgtcccaactaggaacaatttttatttttttataaataatatgccagagggaatcaacaccagcatcataagaattggtatagtaggcctaggaaaggcatcaattattacttaaaaaaatgcttcaaaaataagtgaaaaattccaagggaatatcaattttgaaacaaaaggaaaatacttacttcgaacattgaatcaactttgccactc

SEQ ID NO: 42671 - DNA, 2608 bp, Cannabis sativa
ttagtgtcaaagactaattactatttataactaataataactattctaattcttatattgtgtgttttacaattgacttacttaaaataaagtaacacttttatctttatttatgaatagggattttttacatttgttttgtgctcaataagaattcaattttgaattcctttttagtatttaaattaagttagtggatttgggttgttttcttttgcatggccatttggaattaatatgaaactagtaggtttgaaagtcaggttggacttgggcaagattcttctaatatataatattaggagggtactgcttcttattttaacctccgtccccaaaaatatacatatttgtatattagaaccttttttccaattttattttatttgttgtgctcattgtagttacgatatttttttttttctaaatttttaaacttttttgaaaaatttataataccaataacggagtttctaatataatttaagggatacgattttgtctcgtgatgtacttttacggaatatattccgtggtacattagatgggtctcagggtacgttactattttttaaccctaattaaccctaaatcaaccccagccctcagattaaataactctcatatttaacggatgtcgtatatcacggaatttattccgtgaaagtacatcacgagacaaaattgtgtccctatattttaattaatcatgagcgttcaaaaaaattcatcattgtaaactatatgaattttttgagaatttacaaaaaaaaatatatatatatatatatatataaatactattttggatactgtgttttgcaaaagttactaattgcaccatctgttttgttaaataacaaaatggaccttgtatttttcaaaatggtaaaaataggactctgggcttaatttttgacaattttttttttaatataaccaatttgaaggcaattcctaacacgaacggatacagaaaatgtaaacagttttatcataacatctttagatcagattattattaaattttattttgacaaaaaatcagttcaggcctttaaggtcctatttgtactatttatattatttaacaaaaatccaattaataacttttgcaaaacacaaaatttaaaataatatttaccttaataaatatcaccataaaaatatatatataaatatatatatatatatatatttaaagatgttggttgagaaataagttgaaataataaattgtaaattagcactactttggatttttattaaactggttgttttgattagctggtatttgtatatttcagggggtcccaagatatctaaatccattgggctgtcccatattttcagttcattaatggtatgagaactgagaagttgatcatctaaaagtaaagaaaaatctaatgaattacttatcatatttaaccaataagttaatattaaaaaataataataacacatgaaatagttatagttttcatagttgttaataatttaatcatgacataaactcacatacgtgtcttcaaaattctaatgggctaaggaactgacattgtcttataacaacaaaaaacggattggacaacaagtttttcttaccaatttttaaacaaaaaaaaatcatatttttattttatcaatttcagaattgaccaccacctttgtggttgtgaaaacaaatcttttttttaaagataaattgaatggaaatagctttaacctattagataaataaatataggttttcttagactagactctatttctttgaaaggaaaaaagggtcattaggttgagtcatgatgaaataataataaaaatggttaaacaaatcccaacatgttcaaaatatatagtagactttttattattatatgaatccaagccttttttaacaacttgagaggtttcttattatcattattaattatttttaaaaatatatacataatgataaaaaagtaaagaattgtgtaatcaattacacaaaatgggtattaggaaaaaaaaatggaaactaccaattttcttttttgaagtttgagattgtgacaaatcataatgtgatcttgaattaattcatataaaacataattaagaataaacatttgttgaagaaaaagtagactttaaaacatagactagatctagagagagagagagtcaacattatctttttatttggttatttaacttatttcatatgactatacaaacaaaaaaaaaaaaaaactaattttaatatgataatattaatgcaatgcaatggaggcttgtgttatggtttcgtaattcttaagttaacacagcttgcttgcatgtaatctagtcagcttcaaatccaatccttaattacaaaagtgaaatcactttttaattgaacatgatatttaaaggtgaaacaacctctaattaattcctcttatcttaagattgattaattaaatatcctataataattaaaaaaaaaaaacatttaaaataatctggtctaagagatttgaattattgtttagggaaatttgaatttctatgcttacattaaggaataattttttccctaaacttaaaatatggaatattagtaaaatgggataac

SEQ ID NO: 42672 - DNA, 2909 bp, Cannabis sativa
aaaaaaaaaaaaagaaaaaggaaactttggatagggtcaatcaatctcaattttttagcaaatcaagaaaagaaaaaaagaaaattaatatgtaaatgataggccataccaatatttcatcatcattaatgcctgcccatcttcttcttcttctttttttttttttgaaatggatcttcttcttcttttagtaaatacatatattaatttttatttatttctcattaatgcaatttaatttaatatttataattctctgctattctgagatttttcaattattaaacaaagaaaggaaattttacctgaatagtttaatagcatattctgacaaatcggcatatcaactacaaaaatagataagtaacaaatatttgcccataacaatgaaaagatctaataatcgttataccaatttattgtgataattcataccataaatatagcttctcaatacatttcacataaataaatatatcatttttcttgatttcattagaagagaagatcagtcttatcacagagtattttactttattttttttcgtttccttttgttctgcacattattacatggctcaagaaagagaaactttgacaaagctatttagtttttcaagatgagttgattataaaaatattatagcatacatgaattagtgtgacaatttactttaaactacaattttccaatcaaaattgctgttgctgtcgatgatgataatgttatatattactgcatattatttatcaaatgctttaaattttcaggaatgttgaggaaattaataggtttgttctttgtgggaattctttcatatgcataccaagcaatccaaccacctccaccaaagctatgtggctcaccaggaggtcctcctattacagcaccaagaataaaactcagagatggaagacatttggcctataaagagcttggtgtgccaaaagaatctgccaagtataagattgtgtttattcatggttttgattcttgcaggcatgacaatttcgccaaattcttgtccccggtattcgctcgcctcttactctttctttgcctctataaactagtacttacatgttaccaaactctgcatatgatttttcaggatcttgttcaagagctaggtgtgtatgttgtgtctttcgataagcctggttatggagagagcgatcctcacccgaagcgtacggtgaagtgcatagctttcgatatagaagagcttgctgatcaattggggctaggatccaaattctatgttgtgggattctcaatgggtggacaggctgtgtggagtgtccttaaatacattcctcataggtatgatttgctctaatcttgaaatctattataacagttttgtagatctttatgttctgaggaaatatgttgtgataaacaggttagcaggagcagcacttatagctcctgttgcaaactattggtggactggttttccttctaatatatcgaaacaagcttatgatcttcaacttctgaatgatcagtgggcagtaagtgtggctcaccatgcaccgtggctcgtttactggtggaattctcaaaaatggttcccctcttctagtgccattgctcacaatcctgctgttttctcaaccaaggacatggaacttgtcatgaaaccacattggcaatcgagaatggaatacgcggtgagcagtaactaacctactaaacatgttctctgattagtcttgtttcttaagttaccatctgaacttgttgaacacacactcatttctgcaggcatacataagacagcagggtgtgcaggagagtctcaaccgggacatgattttgggattcgggaagtgggagtttagtcctcttgatttggctaatccatttccaaacaatgaagggtctgtccatctatggcatggagatgatgaccagcttgtgcctgttttgcctcaacgctacattgtccaacaactcccatggattcactaccatgaaatgcctggtgatggccatttgttacatgaagctgaaggagttgctgatactatccttaaggaacttctattgcaaaagaaatgagcttagcttaattttgaatcttaattagaacagatcagatatgataagcattatgagttgggcttttacaactttgtttagccttatataaaaaaaatatgaatatagtaacatgaattccgagtccaacttggaattgaaatgaaaatgaagaatttttattccttcaaaggtaatgtgaatttatagttacattatgtggttggtaatagtttgagtatgataatcttcattgtttaggactaaagaaagaaccttattaaaatcatttgggacaagctatttcaaaatattactaaaccaaattttggtaaattaaaattaattttacaaatcgaaggaaaggtcaaaaactcaaaatttgaacttccacaaaaatgacatgattaattaatttttaattatttgatgctttcagtaagaaaggtttggcttttgtaaaaaaaaaaaaagaacagagactttttctctgtcgctgcactagtgcgatctcttttctctctctaaaattgtagtatattctctcaattcaaaaccccattttgtatcaaagcttctgtatttctgggcttgtttttgtttcgttgataatggcgggaggagtgaataggaagatttctgcagcatcagcaagggctcacaccagaaaagccaaacaaagcaattcttttcagcttccttcaggtggagttttgtttctccctttcttttttcaggaattgggtgctgagatttaattttttttttttttatgttaatctatggtggactccctcggttttgtcgaattcataaccagaataaattgtttgaaaagttgggtctatgcctaatttttgtt

SEQ ID NO: 42673 - DNA, 8868 bp, Cannabis sativa
tccacgagtctgtgtatttatgaatgtattgaatacagagaatgttcttggtggtatttactcttcttccaattatgcaacccaaaaattgtctatttatattttcatataacataaattgtctatttatttttcttttctaaattaacaataataatgtagaaaaaaattgatttttttttttatgtcttcaatcaatttttacaattatttttatttataaacttataatcaacttttatatatgcagttggcattacaattatcaattacaatagacttctaaaaaaaatattttaggcacatacaaaataagctctagcccaacttactttattttttggcatcttaaattattaattttttttttaatattgtaggaggttctattttttttttttttttgagagagaaagaccattatattaattgtaataaattacataatattaataagtggaggtggaaattcctctaacaaaaaacagtcagtatccaccgtaagagcaaatttagccatagcatggacgtaagtattagcagatttagaaacatgattgatttgtgctcgtggaaaaatactaaaaagttaaaatctttcaagacagtgtgaaaagcacaattacaaatattagtagctttcgatccctaaaccaccataagtgagtctgtttcaatgtattctgtagatagatggagagagataagccatttaagagttggagcaaggcctagaacttccatctcttcaggtttgaaacaactctaaggggcttagataaagtaacagtgatagagcctatagaatatcttaatactgccccgatacctacaatcccattcgttttgttctaggttgcgtcaatgttgagtttgagcttccctgttggtggagctatccattgaatctgtgttggagcacctattgtgatatcagctgaaggcatatcagtaatagcatgtgatgaagaattcataagtggagccttaacaacataatatttttccagatatgcagtagcaaaaaggagaattgcaggtggctattttactagtttaccatggtattcagcattgcgttcgtaccatatactacagcaaagtacaagaaaaagttcaaagtcttatgctgaaatgtttgcagaaacatacagtaaaaattcctcacaggttgttattgaagccagcttaatattaaaggacaggtgagagaggtgccacacttctttggcccttgtacataaaaaagtgcatgattgatggtttcattatgtgttttgcacaagggacatattggagttgcaacaatatgctttcaattcaattttgcagcaatatataagaccatatgaaaagctttccatacgaagatgcgaattttaagagggatttttaacttccaaaaagttgtccaccaactctcaagagaagagttgttgcttattttcttttgttcaacaagagaagtagcaaattagacaaatattccacaccaaccaccaagcacttaaaaaaaatggaagcagacagtaacgaaactgaacaaaagagatacaagaccagtgcaagaaaaaaatagtggagaaacaagatgacaaagagaagcataaaagttcgcacaatctcatgctgttgtttgacgctcacgcatcatgctctccaggagcttacttcgttgaagtgatagagaattgctcttaattcactgctttgtagttcatcggtagttctgcaacttctacaatggatccttccagtttttgtaacttgtttgaggactcggtccagatatcgcacaacgacattactttcgcacttaatccaggagaggtagatgaacctcaggaggccaaccaaggcttgctgggaaagataataagttgccaaaggtttggaaaaacagccattcaagggtctctcaaactctcctggaactccataaagggctggaaatggaaagaaatagaggatagcatcattcaatttacatttgcaagcagagaggatgcgttgaatgtattagctaggcgaccttggttcgtctctggtgcactaattgtcatcatgccatggccggcttggttatccccaactgaagtcagattcgacaaaaccccgatgtgggtgcgcattgaaagcattcctcctttctattggaacctttctaaccttaaagaattagcctcaaaggcctcccctgtctatgaactccctctggcattgaggacacagttggcatgagtaccctcgcttccgagccactatagatatcaagaaacctattttctcggggttctttctcaggtgccagcgtctcaaggatctgtggctacagtacagatatgaaagacttcctaagttgtgcttcaagtgcggagtattaacgcacgatcggagtatctgtttcaaatcccaaactgtcatcaaggatgctaataaaaatttctacccaatgtttagggtttggttaaagagtgatgctccagaaaaatccactttcacagcacctctcactaaatggttccaggattgggtactacgaaagaagttatccaatgatctactcttagaaaccagataaaagttcataaggctatacagaacagtgaggcagctgaaatgagggagtgtagaagacaatacccggggaagaagaggattgtcactgaggaggatgagaccaccggtgacccgaagtccgatttggttattacccaaattgccctagtttacctcccaggtattggagagattgccccttacggaaataattcaaaaattgtatccatccaagagctgcaagaggcggctgagaaatttgcagctacgaaggccaataataaggcctgcagtgtaggtgaagaggcgtcatctagcatgcaagctgcaacgatggagatggagacaactgggaataattcctctttagagaagaccattacttatcgcaaagaaagctaccaaacaaatatcctaatagagaagttgactggggaaatgccaaaaattcttgaggaacaaagtaagtctttcgtccaaaacgaaagtgagagaatcgagggatcccactaaccactataacgactctctcctgggatcacaagcccaattcattaattggccttctaaagagtgttgggcccagcctaaggcccgtgagttattattgggtgctttaactgttgataaatatcatagagtgccaacactctttaaccatatccttgatatagaggatttcaaggtccatgaacacctaaatgggccaagaaagagaaaggcctcggatggaatactatacagacctaatgctcagcccgacccaactcaaactctatccacccaaacgaattatgctgagaatgatgtccccagcaatcgcgatgtacacgatgaagctgcttcccagacaaagaacatcccagcgtcgaacactgaagaaatactgaatggtagaagcttttcacatggatccaatgaggaaccgaagccatcatcgaggagaggaaaagggaaaggaacagttcgggcggccatttctgaaatgggctctcgtaaaagaagagggagacccccaaaaattcaatcccccctagctgccacgccaaagtcatttaaagggggaaagaatgctaaagcaagaacgggtggaaaatttacaactaccagtcactgggatgatagaaccttcgatctccaggtaaacttggacaaccattttgttatcattgagaaacagcaaaatccaagcactagctacacaatcactgaaattaaagaaggtcgataagagacgatggggattaactgttcagattttcagtttggggctatggagacttgcccggaaaagtctccaatgtcgccatgaaaatcttagcttggaactgtcgcaggctcgggaataccgtaatagttcgtcaattggcgcatcttgtgcaccatcacaaacccgacttgatgatcctctctaaaattcatctttcgcctgaaaaatttaacaaaacatgttttcagctccactttatggatacgcattacgtgcctcttgttggtctttcggggggttgggaatgtgctggatgaaaggagtcaggtgtaacgtccaaacatcttctaaattcttaatcattggagaaatttcctcagatcctcctagaataccgcagcttctgctgggtacttatgggtcgcccaacagtatggataacgagcagttttggcaaaatgtgggagactttgctctaaaagctacgtatctgatacttatgatgggtgatatgaatggaacattaagggacaatgaatgcttccactaccaaggaaatatttctagatacgcttttgacttcaggtgcatggtccatagagcgggattgattgacctgggattccaaggcccgggtttcacttgggctaaaggtgggagaaactcggggggtggaagggctatgaggagggctagacttgatcgtggacttgcctcagctaattggagaattttgttccccaatgcggttatcaaccatcttgtggcctctgaatctaattactggcctttgctgctcaatactatggagggtgctaagtgcaaggggcgtcaatttaagtacgaaaatatgtgggcacgcgatccccgatgtttttaagtggtcaaggaagcttggagagcgaggttacatgccaatcccatggtcaatttccacaaaaaggtgaaagccacaagcagaaaacttcagaattggaacaagtcacaattcatgaatttatctcagcaagttcaaagagcgaagtcccaactgcaggaggtagaaaaaaagaacccatataatcttgatgaaatcaatactgcaaaacaactactttgagaagctctactaagggaagaaattcattggaagcaaaaatctagagtacaatggctccaaaaaggggacatgtgttttaagttttttatggcatctactataataagaaggcggaggaactatatccaatgcatcaaagacacttcgaatggagattggataagagaccaggatcagattgcccattgttttcttcataagtttaaggagatcttcaagaaaaaccatcctgaccccgcacctctatgtgaaggcatgtttcagaaaatcatttcggagcaagataatgttctctcgaacgctatcccgcagggggaggaagtgaaggcagcaatttgcgacatgggaaaggacaaggctccgggacccgatggcctttcaccaagcttctatattcatcactgggagacagtcaatgaagacctcacagaaatggtgacccactttttcacacatctagaattgcccaaattcattaacgacacatcattggttctaattccaaaaaaggactctccatcctcagtcaatgattaccgtcctattgctctgtgtaacgtggcttacaaaataatttcaaaaatcatcgcttcaaggctgagatatattcttccaaagattatatctccaaaccaagcggcgtttgtcaaaggaagacatattgcagagaacacaatgattgcaagagaggtggtacactcaatgaacaaaaaaaggggaaagcgtggattcatgcttataaagcttgacttggaaaaggcctacgataagctcaactgggactttgtcatctccgtgctacatcaaattgggtttagtagttctttcacagattgggttaaagcttgcatctccgtttctgaaatcaaactgctcataaatggttcggtggttggaaaatttagtccagagaggggattacgacaaggggatccgttgtcaccctctctatacattgtggctgtcgaaccacattctcgccttctggttagaaaggagaatgagggtcgtctcaaaggttttaagctgacgagaaatggggtcccggtaacccatttgatgttcgctgatgacatcatactctttggttaggctacaatccgagaggcaagatcattcttggattgtttagactcctactacagaagttcgagtcagacaatcaacttcttaaagtcctctgttttcttctccaagggagtgtcgggtagaaaagcccaagtaatttcacaggcacttggaatgaggagaatgaataggagggctacttatttgggactttctctcttcagatcagtaaagaggacagagaatactcaacatatagtagaccgggttttgaagaggatacaagggtggaaagttaggcttttgtgaaatgctggcaagacttgacaaattgttatgagacttctggtggggcgatactgaggaaaaacgaaaactacacacaataacctaggcacgtctttgtaaactgaagattgctgggggattggggtttcgaactacagagacaacgaacaaggcgtttcttatgaaatgggcttggaaaattctaaccaatgaagattgtttatggcgccaggttatgaatgacaagtatattaagaacaggatttccttcaattggaagccaaaccgtctgacacttttctttggaaagcaatactccgcacccgtagtgacctccaaaaaggaatatgtcggaaaattggaaatggaaactccacgtccatttagtttgatccttgggtgccaggagataatcggtagccgaccccatgtgtagatgcctcaaaaggagtaagtctggtaagtagttttatcactaattatcaatggaatgaggaattaattaggaaatggttcaggagggatgatgccaaaagaatactcaacattactctacctagtagtatgacaaatgactcttggctttggctaccggaaccaaatggagggttctcgattaaatcagcttgcgaattgttaatgaatcccaacccaaatgtggaagtggatagaaaatggagaatcatatgggggccaaaattcacaataggctcaaattactttagtggagaattttgtctaattgtctccccaccaaagggaaggttggctccatctttcaaatatctgatgttgtatgctctttcaaatatctattgagagtagcctacatttgttctgggagtgtaattatgcaagaacaatttggttcggttgcaattggagcatgagaactaatgtcactacggtttcaaagtgggaggagtggttacagtggttttcaaagacggataacaggccaaccagcctggatctcaatcagttcctgggaggagctgctctaatttttgagagtatttggaaagagaggaactcacttgtccatgagaggaagtcaactccaataaaggtacaaatcgattacatcaatagtagacttcgagaattggtcacaatccatgagccaggcggcctctccaactctaaatagaaaccacctcctgaaggatgggtggcttgcaactctgatgttgctattgggaactctcagtcaacgggggtggctgtctttcaagatgccactggagccattctcaacatcctctcgttccgaacaaaccactgtgaccctttgccaggtaaggtttctgctatctacgaaggagctgcagctgctgtcaagcttggctacaaaaatatcattttctagagtgactctttgaaagcggttactgcattgaaaagaaattttactgaaattcaaaagttgcattttaacattcaggataaggtaaaaaatttccttgatctcactggaaacttcaacatctatgaggtcctatggacccctcgttcatgcaatggtgtggcccactcggtggctcaatgggcaaatcgaaacaacaagtttggtttttttgatttggccaattttgatgatttcctgcaggtgattactgcaaatggtcatgtctccacttaatctatttcctttcctctgttttgtgttgtagtcgtttggttttaatatgactgttttttgttacttatgttgtagtcgttgttcctggatttgtttggcctgttttgtttggcttatggccttttttgttttgattctcgttgtaaccttaataaaaaaaaaataaaaattgataccctaattttactgtgtaatctcctgaagtagtgccgttccaaaccatgatatcttttgtggggaaaatacttagaggaatgcgaaagattctgttgatgtcagtatggccaaagttagcagataaagctgtttaatcccattgtctatgctggtcaattagatcaataatttgcagagctggatttgaaccttcaaagtaatagggagtgaaacaagtatggtcaggaagccatgagtcttctttacaattaattgaatcacatgtgcccaccctccatcgtagtcctttgattataagttcttttccccaaactatgtttctttatgtcaaagatggacaagctcccaagtctgctgtaagaaattggtcattcaaaaaatatctatgatgcgaaatgcgactgagaagggagttaggaaattctaacaaccaccaagcttgtttggccaagagtgcttggttaaaaggtatgaaattatgaaagcctaacccaccatgtattttggctttacaaaggaaattctaattttttcaatggattcagttgctagatgatgtagagccccataaaaaattagccatcgtactttcaatttggttacacaatgtaataaggaatctgaagcaactcattgcatatacaggaatggcttgtaccactgctttcaacatgacttcctttccaccaacagaaaataattgctccttccaactattaaggagcttccatatcttatccgtgattccaccgaagtttcattttatcacgtccagcaaaagatggtaatccaagatgttgttcatgacaaggttgtattggcata

SEQ ID NO: 42674 - DNA, 4657 bp, Cannabis sativa
ttttcttctaattcgtgatcaactcattcattcttctgtgtttttctctaatattttttaatccaattctatccagcatgcccatattcttaggcattaattattttattgaaaaaatttcagttccattcagacatggtgagcgcataggtttcagttacttggtctctcaaaaatacaccggtgatagtgctttggtgaaagttcttcgtaacaaaaagatactagaattcaacataaggcttgcaactcacaagcgactcatccctgctcacattaagggcaaacctcctccttactacattatcgctggatttgtattcagtgctgtctcagttccatatctgcgttctgaggttagtcatttacctttcatgctttcccttctgtaggttttgtaagacaagtatctacgtatagagctgtatagtcctttccacgaactagaactttttgattcctttgggaggtccttttgagacccgaaatttactgtcttacagatgtgacgtgctttttttttttcttattcaaatgggaccataccttatccaagaggggtagctcaaatggtcaggcatgtggtatgctcccacaaccacaaggtctgaggttcgagtccttcttgggtacctacatagcaaatgttatagttttctagtccccaagtattggcgagttaagcggggatcctagtttctaaaaaaaatgggaccataccgtgtacatgagtagtcattgattatgtctttatcgtcatttgtgtaacaatttacaaaagaaaacagttgttacttttctatacatttgcgacaatatattctcttttcctctttttgtgaattataaatcttgatctccggcagttcgctggtctttttcagtatggaaaagaatatgaatttgatgctccagtgaaactattggacaagcatttacatgctatggcacagtctatcgacgaacaagttgttgttgtttctcaggtttctccctcatcttgtgctttcattgtttctagttcatcctgctttcacggctctcatttgcttactgaatttcttcaggttcttgtagcagacattaatattggatacgaagacattgttaatacacaggtcagtctttatttattattgctcacccttactttttctcatccttgtagttattctattattctattcacattcactcgttaaaatcgtgactctgtctcttcagattcttaagttcaatggtaagcctgttcgaaatcttaagacgttggccaacatggtggagagctgtaaagatgaatacctgaagtttgagctagaatatgaccaggtcctttctctgccattttctctctagataaaaccctgttgatgatctgagagcgttgtttctaactttttctcggtgaaaactgcttctctgtgcagatagttgttctgcaaacgaaaacagcgagggaagcaactctagacattcttgcaacacattgcataccttcggctatgtcagacgatctcaagaaatgagagaaagttgaactcttttgccatctgtttcggttctttgcatgctgcagcagctaccccacacgattctctgatgcttgccaaaattactttttgctcctagagagagagatagacagaatagagttaagaggctgtcgttgcatgtagcgcttcgatacaaatttgggcaagatgataggggtttttttttcttgcatggttttttgtaaaaaaccatataggcatttttacccatgttgaagggagaagagggatacataacatttgttttcatacgtgatatatttttactattacttctacatgaatgagcttttagttttgagattcagacagaacaaattgattttatgtaatatcatcgtaccaaaatgtttactagtgagtagtcaatgaaattacaatgcttgatgtcctaattagaaatatttagctggaatttattctgattgggtatctattattggtaaagcagttatactatttatttaattaaaatgtgtgggatcgggggtaaacatgtaaaatttgattcggtcctatgttatttggaattcaaatttaaataattttttttttggtataatattgtttgttgtagtggtaaatctttgggtaaagtttaagaatttgaacctagcaataaatttaaaatattaattgtttattatttgatattttgttatagtcaattctataatttttattaaatgttgaatggagataatataattaagtattgttattaagtactgtgatcttgactaactctcataaatatttactgattcgatattaaattgtagtaataatttataacattagagtactaaatatcataaatgcctttagtatttcactataaaactacataattagcccacttaaattttatttctaattttacccatgtattaaattgtaatgtaatgtcacttcttatagtatttgagactagaccttaatgtttatcttaatgttcttatgatcttgttattcttttcgttaaaaatctaatggcttacatgattgttttgtttacttgtaaaatgagacgtgaagtgaattacgttcacgtaattattatcattattatatgtaatttctaatcaaacgacaagtcgttgagaaagtgacataagacgatatgtcgttttcttaccaacaaaaaggaagaagcgtgtgcaattcttaagatagctaatagctatgtaacaattctctttcctccactccacaatccacacgtaacaaagaatatataaacattttgtaacctgttacttttctacttgcaattttacaatacaccatgttatatattacatatgttacatatgatcatatattataaattacattttttttaatggaaatttgatctctattttttgtcaattttgtaactttgcaacaaaggggtcttatcaataggtggtgattcaaggccctcaacacggtgatactcttctatttcttcattcacatcttcttctttagcttttccccacatcacagtataaaacccaattgatatcatagttgctccaattacactgttcattcaaaaatcaaataccattaataaccaaaaaaaaaaaaaaaatgcatattgattcatatattaaataaattataatatttttgttaccttccaagatgaagagaatccccaagaaaaatgaaagtcatggcagctgcaattgcaatagagaggggcttaaacattgccacgtagacaggtcccttcaagtgcaatgcccaagtatgcactgtattattcaagaacgatccaaaaactccctatccatatataaaataccattgttaataacacaacacgatcttaaaattatcaagttttatttgttaaaattttaaaaattaacatggatctttattttaatagttttttagcaaaatccgaaaaattattttatcacaaaaatattttagggtaatgtaagcagttactttatactgtttttattatatttttttatattttggaacaaattttataaaaattcataaaatgtgtaattttttttatttgaaaattaaactaaataattaataatcttaccgaacataaaacagaggctaatgcaattccaggcttaagtttccaagcattggaatcagtctccataaccaagcccacaattccagcaaatatgctcacatatagattgtagaagaataccaccgtcaattcattagggtactctttcataatctgtgtctgcatgtattagattagatatctcattagattatagtatttccactcaaaatatgtatcaaaatatttcaaaaaattccgagtaatttctaatgcagaaaataaaaattacatattttgttgcatgcgcgacagttttttctttaaatcttattttcggttattcagatgtttctaaaaatttagagtgttctaaatgccgaatgagatagataatctactagaacgaccttttaggatggtctactacaaaaatttcctaaagtacttttggtgcatattttaagttagcacttagcacatattaaattattatgaagacttcacaaatgtgaatatatggtatatatacctgaacaatgtaccaaagtggaaccaaaatgtattcagctgttagaagaaggccaccaataacccaattggaatttgaagagttttgatcatgaagtgtacttgaggattgataatgataattatgaagtgaaacattagtatatggagctcttatgatgggtgggccttggtatagagtagccacaaatgcacctccaattgaaactatagtgcccaacatcttagcttgactgcttgtgcttttcaaggctactttttccattctttaaatccaaaataaagaaattaatattgaagggtcgaattaacaaactctagtagccacaaaatatttaataataataataaaagaaaaagattgtacgacaactttttaggctaattaaacatgtatttgttgtacaacaactctattggcattatcactaaaattgaacattaggatattgcataaaaaatacaaatgtattaaactaaacaaatatttaaataactctattggcatattatagtcaggcatgtataatgc

SEQ ID NO: 42675 - DNA, 8770 bp, Cannabis sativa
  modified_base (8715)..(8722): a, c, t, g, unknown or other
tttttgaaaaagaagatcaaagactaaagaaaaacaagaaactgagactatgatcttcaaggagaggaacataaatggttccaaattttctctttgtccgttccaagggctgctcgagcaaggtcgtgggctgttgtgtttgttgtccttgggatgtaatgaactgaggcacctggaaaagaagacaaagaggagacaatcgtggcgatataacccgaaagatcagaacgatccggagagaacttctgaagacgatgaaccgaattctgacagtcggaagcaataacagcgagaggcaaacgaactacacgacactaaagcaacgccccgttgagagcttcagcttcagcaaaaatcagagggagccctgaaattgaaggagtcgaaagagtggcaactactgaaccctgacaatcagtgactgcagctccatacccgtgtttgttggaagatggggaaagggctgcatccacactaagatgatacatgttactggggacttgtagccttgtaggaggctggtgggaactgggggaaggggaagaaatgcaatgttgagcgtccctgtaatcctgcaaataacaactgacagaattctccaagttgaaatcagtggtactgttagaactaaagatagctctgtttcggttattctaaattgcccaaagcaaacccaaaaaaaaatagcaagttgatctttagcaaaacaataaaatcctctgagcataaattccttaacatcacaatttttattattaaaataaaactgagaaaaggatgagtttttccaaactttacctgctctggaacattgaatgagagagtgggtgttggaatcatgatgagaatgacaaagagagcagtatggggagggggcagacttacgatggaagaggttgagattggaaggaaggatgtgattgaaagctttccagacaaaatgcttaattttaggagggatattggaggaccaaaccgaggcccaccaacgtttataggtagcaggattcgaaggaccaggagcagagaaggtggaattagccaaatgataagcagagttaacaatgaaacaaccgattctgttatattgtaatgatttgtttggttgcttaattgaatgtttcttcctttctaaaacaaatgataacttgcgctcaattatattacaattttggtggggaactaacagtgataagagaaaaattgtgtgggtgaaatgagagtgtttgtcagcctaagtctaagggagggttaggatttaaagatttagagttgtttaatcaagcaatcgtggccaagcaagtttggcgattgctttaagagcctaattcatgacctggttgtgttctgaagcataagtatttcctgaactcgtctatcttggaggctaaggatagaaaatagctcttcccatttgtggtcaagtttagtatgggggttggagctactgcgtaaggggttgaggatgtttgtgggggacggaacaagtattgaggcttttcgagactcttggctgccgcgacctagaacaattcgtcctataacacctaagcctggggtggattggttagttaaggagttcattgctgttaatggttgttggaatttaccagcgttacatcatgtattcttgccgatggatgtagaagtaatacttggtatctcgttaccaagtgatgcttatggggaccgttggtgttggcattatgattccaatgagtgttatacagtacgcagtggttatgctctagctttagagttggtgagagaggagatgggttgttcttcaatgaatttaaccacatggtggaatggcctgtggactttaagagtgctgcagaaagttaaaatctttttgtggcgaatatttatcgggctcttccaatgaattctcagcttattaggtggaaaatactagtcaacctgtgtgtgagaggtgtggggagaaggttgagaccctagaacacgcgttagtattttgttctcctttgattttggtttggcattatttgggggtgtgggggcagctttgtcggtgtagacatggtctattttctgagtcctagtgtggctatttaatgtcttggattgagataagttcgccatggtagctatggtgtggtggtggatttggtatgatcggaactcggtgttgtgtgggaatacacaatcaagcttggatgtcattgctgacctggcggctgtggctttagaggagtttcttactcctagttcttctggtgtgcagcaacaactgggggagcgagggagggtggttcggcgtgagacggtggagcatggttgctatgagtcagggtcgagggtggtcgctggtgttggtagcaagtgggttcctcctaaacccaaggtgttggtgctgtcaactgatgcggcagtaacgccttggagatgctttactggttttgaggggtagttcgtgatgcagagggcgttgtgtgggcggtgtggtcgattggttgtgttggtgaattttgtgtggtcgtggcggagttgttggctcttcatattggtctcctttaggcttctaatttgagttttaatgtggggactggagagggtggagactgatgcgtcaactaatgtacccagttttttcataacaactctagatcatattattattattaaattttatcttgacaaaaaatcagtttaaagtactattttgtactattttaaaaaatacaatcaacttagggtactattttatgctattttgaaaaatataaagtgtaatttgacatttaataatatggaaagttcaatcaatatattttacaaaatacaaagtgtaaaatggtattcacctttcatgcctatattctctttgatgctagctacaatgaaataagaacaatatatgaagaataagaaaacaatttttggttgaggtttattttttttttagttatatgtttgatatattgttttttctttagttcatttttgatctttttcatagtttaatgtatatttatttgttttcatagtttaatgtatgtttaaattgtggattaagaagattaaaaaaaatatatatatatatatatatatataaattgtggaataagtattattgtgtataaataatgtgtgtttttgagtgtattacaatcttataatttattgatcaattacttattttttatgttttttttttataaaacattatggttcatttggttattatttggtttttggattaaataaacattttttttattaaaactaaaaactaaaactaacattactctattaaacactctacttattaatttctatctacttttaattaacttttaaataacaataactgaatagtttgtgaacaaacatacaccagtcccacatcactaaaataatgaaatatattactattactctatataaatatgaagaaaaaaacaatcctaactataaccaataattttaaaattatatttgtaaaatttacttaatttgttataacatttaaatttttttgttctatataataagttaaattgtttcttggcaatctatgtggctatatgacgaaattcttagtttaaataaaaattatatagatattttatataaaaaatttatatttacatttaaaatacttaaaatattgtagatatttttaactatatttttaattttattagtttaatttacatgcatatattgcacttaacatcaacaaattgaacctaattaaaaagaaaattaattatacgtgcattgcatgtaacatcaaactagtatacataatgtattcgtgtgctaattcttgatttttttttttataaaaaaatttgaagagaaaaaattgataaatttattttgttgggttaaaatttagaatagatacagttatataagttttaatataaaaaaaaaatggatctagaaatctagatatgatctgattgagataaatcggattagatgagatccgatttggataaatgatccagcaagacagggcaagacagatcatcaactaatgtaaattgggtcatagtcggatcggttctgaattgattcatttcaactcttaactgagagtatgttatcaggtttaaaatcacaatgaacaacatattttagaaaattaaacaactgagagttgataaagttgaagagagatattataaaataaaagtttattatcactataaccaataaaaagttattttctcataacaaaacatctttcttctatatgtattttggtacaatcctcttttcttactattaagtttgttcatatcatgtaggtgaaagtatatgtatggctaatacataaaagggatatgtgcaacaaaattacatgattaacaaggaaatatttatagtgaaaatacttaagttataatcatatttgatgttgcgtagttagatttaaggatttttgaagttgatctccattatacccaattttttttaagaaatcaaaaagttaaacattaaaactttgaccaagataaaaaaaaagactatacgggaaaaaactcgaacgatggaccacatggcatcccatttgagtgtcacatggcacataggaaatgccttgcaagtattgaccattctttagtgtcagtactcacttcttggggtttcaaacctaggcttagaatttttcgtaaatttgagatagggttattcgtcctaaaactctaatccgagaagaaatccaacattgttgcaactgaaaccttctcgatcaccacaatctgatcacacatgccatggacatttctcaccataaccgagaacagagccttatggctctcacataatacacacacttttaagcactgaacaagagagagatagaaatatatatagagatataatatttacacaattacttctttatttcatgtaagaatgattacagcaaaagagttagttttaataggacttagttaagactatttaaagaagaacttaactaatgtacatagatagtttagtaaaaccagaaactaaactaactactaaccactaaatatattaactactataactacttgtcataatacacaacagttttccaccttgacaagtagtttacatatggtaatagtaagtacacatagaaccaataaagtgttatacaatattctgcagttgggtgcagtaattgaattttgttgttgcaagtgctttggtgagcatgttagcagggttttcttctgtagaaatcttgcagagttgtattttcccttctaaaatgatgtcccttataaaatgaagcctcatagtccttacatggaacatttggttcttgctcagataaaggtcactctaactgtcacaatagacatgtagttatttttggtctatgcctagctcccttgatagtccttttagccaaagagcctccttaattgcttctgtgcatgcaacatattctgcttcgatagtggataaggaaactatggactaaagatttgctttccaacttatggtgcagccattaagttaaaaaacatggcatgtttgggaccttctcgagtcaacatctcatgcatagtcaaaatccacaaaaccatttacccatgatttgttttcatcagttccaaacattagaccaatgtccatggtgcctctgagatacctcataagccattttactgcattctagtgctcaacacctggttttcccatgtacctacttaccacactaatgtcataacacaagtgaggtctagtgcataccataacgtacataatgctaccaaccacacttgtgtaaggaattttatccatgtagctgctatcttcttctattgtgggagattgggaacttgacagattcacttgtggaatgataggagtagacattggttttgaattggagaatccaaatttgccaagtaacttgtaaatgtaaccagcttgtgacaactttagacttcttttgtttctgtccctggtgatttctattccaagaattatccttgccttccccaaatctttcatttcaaattctttgctcaacaaactctttacttgttgatctcttctagatttttactagcaataagcatgtcatctacataaagaagaagatagacaataactttttcattcttaatgtaaacacaactgtcatacaagcttctttgaaactacattgaatgagaaacacatcaagacacttgtaccactgtcttggagactgttttaaaccataaagagatcttttgagcagacatacatggtcttcttttcctttttcttcatagcccctaggcttcttcattagggtttcttcttctagatcaccatgaaggaaggttgtctttacatcaagttgttaaaggtccatatcttcagtttccactagactaagtatcattcgaatcgaagtgtgtttcactacagggaaaaatatttcattataatctataccttctttttgagtgaaacctctagcaaccaatcttgctttgaatctagccttttcaacaccttcaatgacttatttgtacctgtaaacccacttgcagcttatgacttctattttccttattcctaataaggatcaatgtcttattcttctttaaagaaaatacctccaagtccatggccctcccccactcaacactattctctgactgcatggcttcatcataggagtttagttcatctatgcttagtttttctatactcaaagcataatgaactatatcaacaaatccaaacctatttggggtttgattgctcttctactcctatctctggtgagctgatagtcttgagtgtcatctaaaggctcttcatgctcagcttctggtttagcttcaggtttaggttcaagttcattttcttcatccaaaacttcttctgtaatagcatgttcctgctagttatccttttcttttccttgtatctccacctcaaactgtaagaaatcatctacattagcaccatagttttctagcctggacttgattacatccttgtacatcttatcctcttcaaaaactacatctctgctaataaaatacttttgttgattaccagactcaatgttcatcatcgtaacctttaacaccttctggatacccccaagaagatgcactttcttactctaggttccagctttccttgcctcatgtgtgcataagcaatacaactaaaaattctgaggtgttcatatctagctacatgacctgtccaagcttcaattggagttttgaatttaattttcgaagatggacatctattaattaggtagcatgttgtcatcacagcttctgcctaaaaattccttggcataccaaagaaaagtaacatgcatctaactctctctaggatggttttattcatctgttctgttgtggagttcttggcacggttaggtgtcttcctatgccaacttatttataataattgttaaattgatccacacataactccaatccattatctgttcttaacttcctaatttttctttcagtttggttttctagtagggttttttattctttaaacttattaaaagcatcattcttattccttaagatggaaatccatacatgtctagaaaaatcatcaataacagttaggaagtaccttgctccaccattacacttgcactatcatatccatcattatccccatcagaaattatgtcaacatttccattcttttgttgattgtaatctttcagaatcgggcagtctctcctcagatggttggtcaaattacatacaaaacatttttttttttaattttgaacatgccttctctttctctgatttgtattcacccttattctctttcttgaatggttttccacgaatcaaaaggccatctctagtgctttcttctttcagttctgattttctctttatttcttttgacatcaatgctgactgaacttcctctaatgtcaaaaagtctttaccatacatcatggtatccacaaagtgctcataactttcgggaagagaactaagaactatgatgacttgatcctcattttctaccttgatctctatgttcttaagatcaagtatcaccttattgaaatcatctaaatgatcttcaatgtctttccctgacatcatcttaaaagaatatagtttttgtttgagaaataacttgtttgccagcaattttatcatatacaagctctccaatttcaaccatactccagcaactatggtctccttcaaaatctccctaaggactttgtcacctagactcaagattatggcactatgtgctttctcaagaagctctagcttttctttctctgtttgtccttcaaggatattcgactcacccagtaatgcagcttgcaatccatgctgaaccagaagggccctcatcttgactcgccacaaaccaaagtcatatttacccgtaaacttttctacatcaaattttgaattttccatcttcttactcgattgatcacatggtcttggaactactttctctaatcaagatcttccttcttgcatgatcaagattcttctttgaatgctccaagatccaccttcaatcaatcctagctttgacaccacttgttgtaactgaaaccttcccaagcactacaatctgatcacacatgccagggacaccactcaccataatcgagaatagagccttatggctctcacagaatacacatacacactttcaagcactcaacaagtgtatatacgagagagagagagagagagnnnnnnnnagagagagagagagagaagtgcagtggttagggagggtcgtaccccat

SEQ ID NO: 42676 - DNA, 3014 bp, Cannabis sativa
  modified_base (568)..(583): a, c, t, g, unknown or other
tatgatatataatccaaacgacgttccaaacgagccctatcgaaattcggaagaagacaacaagggcctatgccagaattgccaatgtgatagatcacaagaatgcaatcttaataacaaattatacagaagtatctcagttcttaagcttaatcatcaactagatcctcaagagttttaccataggaatgagtaccaagtgatgatggaagctgttacttttcaattgcagagtctaacaatactgaattatggaaaatttgcattttacaaaattaaagaccaacaactctctttccaaggaatttattatccaactatgaaacttaaattcagtaatttgtattcataatcagagtttgctttcctagagttcaggattagttttagcacttcatgtaactatctacattccttatgcatatgaatccattgaaagctctccacaaacttattacaatcatctatggccacagtatattataacatattaaagtacagtttttcagtaggcatataagcatagcaaaattagcatactgctaatctagagagagagagagagagnnnnnnnnnnnnnnnnagagagagagagagagagtaccttagcatcatcactatcctttgccagaatacaaaggatgataagaacccgttttcttatctcgcgatttttcgcaccaagaagttggatgagaattggaatgtaattctctaggattacccattcgcggtgctggtctgtttcttcacagagagcatgtagctctcccaggatattaagaatttcttcttcttcttcctgtccagactcaagtttttgtttcatggaagcaatcataatcatggtatttctgcccttccattcttcgattgattgcctcagagttttatttggccgtaatattgatgtgtctaataaagtcatggttaggggacagcatttatgaccatctgctaaccatttttctatagcacttctctcaaatgtttgtcctgaagaagtttccactggatccatcataacatcccttgtgatggggcagtaaaatgattgaagtggttccaatggttggttacctaaggactttctcttactaaagtacctcatttctttctcctttgatgatgaagttgcatcagccctttctaacaaagcaattatctggtccatctgtatagcttcagcctgatctttcctcaaccgagcattctctatctcatttttaaattcttcaaactccttctttaactctgatctgctggttgagattccaacagcctctgcaatgagagccagcaaattatttgcatacaaacgatcaacattcctttcctgtatgccggactcaattttctccatgatctcttcttctgtaatcgccactcgaaactcagacttcagcatactttcactaagcttttcaatatctgcaacaattgctgatgaaatatcaagtgtggtcaaaggaagaagacttaaagcccggctaatctctttcgacatagactcgagacgctttgtaatccctctgcaattcatgaagagatacactttgcttttcttggtgcaatccagcattaattgcttagccgcctttgtttctcggttgagaatctcaacagcattcttcaagctctcagaatgatcaatatttttcttgcccaactcttttaaaacaggcactactctttccaagtaacctgtcagttccttaaaactttccttattaacgaggacatcattagcagtaacaaaaatctcaagaatgatttctattgtttgagaaaggacttctgaagccggaatagccgaagcgctagagaccacatccagtgccatcttccttaaacccaacaaagctatgaaaagagatggtgttttccccttagactgtttgactgaccaacaattgcacaacttggtagcagcaaaacagcttcaactttctgacccacaacagtttttgtatccatatcaggttcaaatgaaaaatgtcttctttaagcttggatttttctgccaagtttcactacttattcctaagctgcaaaccctagattagcagttccactgtttctttgctgttaaaaaagaaaaatcatttgagttttgaggagtgtgcacttgaatcataatcctttagcaattggagagctttacatgcccattcctcaaactcaaattcaacaaattcacatgggtgtttataggtatatacccatgaataaacaaaatcaaaatttcaacttcaacttgaagctcaaattgcaacaaacaaaaaggaaaaaaatggtttcccacccgacatttaaacgcaataaaaacaccggagaaagatgaagcgatgaaaaaccaaatagtcaacaaaaaagtcttcagaaatcccagaagagaaataaattacactaacctgaaaaagagctaatgcccatcaaaattcagctcgccacgaaaatgcattaaagctttctggtcaaatatcgatctcgtatctggaataaaaaccagcactttgaactgagaaacaatataacttatgtcacaaacacaaaaagataactttggaagagtatttctctttagttttcataaaaaatatatatataaatattttttttgtaatatagataaagattattattattattattattattttcctttttctcgtaaaattttttgttggtagatcatattacgttatttatctctctgtcgttgtagacactgaattgggaaatcacctttctgccagtctcttcccacagccattgcctagcctgcccccttgacttgttctgtgttctttgaagattattcttttgtatgcaattaatttaattgtttaatgtcaaaaaaaaaaaagaagctttgttttctcacttcaattcgagtctttactcattgaccttgtagaatagtcgtataaactcacttgctagcgaccaacgaccaatcatattattattataaatataggtaagtgagtttgcaaaaaaaaaaaaaaaaa

SEQ ID NO: 42677 - DNA, 9876 bp, Cannabis sativa
ggtagtttgtttaaaaattttacgacttcttgtattgaaagtataacaaaatgttggcacaataaaattgcaaagtaaacaaataattaatttttatatatgtggaatatatatttttgaatactcattagttagttggtaactgaagtgtttaaatactaattagtaattatttttttaattaatacaaaactacatattatcatattataacaaattattttttatactaattagttctaaattatataataccaataagcagttaatgatatgataccaaattatttaaaatagtatgattatttttttgaaatagttttaatatgatattgaatagtatgaattatatatcaatatattattaaaagaaagtgtgaatactaaatattaatattttaatactatacttattattaatattttaatactagttttattgtattaaattaaatcaaatgtatcacaacaagataccaaatggtattaattaaaaacaaaacaaagacatcatctatcataaacatcataaatatcaattttcatcatctaatagtttttttttattattattttaaataaataacaccatatcgtatctaataccaaaatataaactcaaaatttgttataaaaatagtatctagttctaaacaaaaacaaaaataatcatattagttttttccaaaacagtcactgtctttaggacttttttttattcatataaatatataaagaaataaatagttagttttacgaaataaagtaattcaattaaaatggtaagtatattaaggtttacgttacccattaaaaaagtaataaatatataatatagttgataattaaactttgaatgttgttatttatgttaaataactttcaaatttgggtataattaaatatgtctaacaaatttgtaattattttaagggaaatttgctgcaaaaatttccaaaagttcacgttgatgcagattagtccctaacctccaaaaatagcggcaatagtcctccaaaaaagctccacatataacaagagtatgctaatttattatcactaaatattaacaatttcttacgtaattttggttaggagtgactaatatacctaattttcattgacaaggaactagaaaactcctcaggacgaatatacacttagacaagcgaacttttttctttttctaccactaacggtgaagataaaataaggtttaatggctgatgtgtgtgattttttttaaaaactattttaaaagtaattaacattttctatttcataactatttcttacataattttggttatgagtgactaatgtacctaattttcattgacaagaaactaagaaactcttacggacgaatatacacttaaacaagcaaacttatttctttttttaacactaatagtgaacttaaaataaggtttaatggatgttgtgtatgaatttttttaaaaaatattttaaaagtaattaacattttctatttcataacaaaataaaacagtttttcctatattaattctttgatggaatcactagttacaatagtttaaaattttagtatatccctattcttaatttacatatatccagtgaaaaagaagagcaatttttatatttgtatcagtagtactatatgagtccaccccaaaatcagagataaatcaaccacatttacacctaaaatagaaactcctaatcattcgtttccacaaatgcaagaacaaatatagatgaaaatcaagtttttaatatactgattgaaaacccaaacttttatttctcctaaaatcaagcaaatatgatcaacccaactctatttatccaatccccaaaaaataaaaatccaaccaaatcaacaaacagatatttctttaatcaaattgaacaatgcaagtctattgcaccaaaaatgcataaatcaaaatacaaaatgacagattcgaaaaaaattacagtacaatgcacacttcaaaattagaacacatgaacagagagagagagagatacctcaacagagaaacagtaactcccttgaagataaagtcgtcgatacatgagagaaaataggattattaaaactgcatcatttgtatcaatggagtacacaaaaatgaactacaccacattcccttcaaaaaagattttatttttgattacccacagtgaagaacgaaaaagtatgaaaagtagaaccagagaaacttacttgtagaaccaaccgtcgagacccacgattgtaacaaccacaaaaatggcagaacacgaataatgtacaccacacacttgctccctcagagtatgtacacgaaacgaagtgaagaaaatggaaaatgggagttttgcctactttgaaacgaaaatggaaaatgaagagttttgtcctaatgtaaaagaaagaagaagaagtttgaagaagaagaagaagagggtgatgagtgaagaaggaagaagaagagaggaggacggttggggttgatatgattgatggtggtcatgtcaatttttatttttttaaatttactaattttttattacaaaaagtaaccagttactaatttatttcatcctaaatatccctagattaaccccagccctcaaatcaaataactaatccatctaacggtcaggatacatcacgaaataaatacctttaaatatattaacgacacaaaatcgtgttcctataaatatattatttgagtacaagcattaaacacaacataatttttttttctcccattcaatttgtttggattatttaaactttttttttctctttctatcgttttatataacgtgtgtcttgctattatgctatacccaaaatacattcatatatttgtattatttattttaaactaatatatatgattagaattataaatatgggccgatttttttattttttttttaccctaaacgaaaaaatatgaattcgggtaagacataacacgatactgtaaattggcacaatatgacataaaaataggtttaagcaccacacgatgcgataaatctaaagacacgacatgtaaacacaaataaactagctcaaaaacaaaacatgttaaaaattattataatttaacaataataatatgtatgtatttaatgataaatattcaatttttaaacattctaattaatatcttatatcattatacgtaaagtattattaaaaaattatattaaaacaattaaaacaataaaaaatacatgtaatttagtgattaactcattaattatatatataaaaaaaaattgaaaaagtgaagtctaagtttgacctgtataagaaaacgggctgactcatttataaaaagcgggacggtccgagtaaagcacgacacgagttcgagcacaagacgaatatgtagacttacgaaccgtgtcgggcttaccctttaaaatattgggtcgacacaacacgactcatattattgcagatttttcaaaatatagacctcgccggcacaacacaaacatatttacagctataaatatgattatctttcaaattgttttgtaaaaatttgcttagcataattattattaaaaaatgatgacatttaacaaataggtttattttctaaaaataaattattgaaagttatataatgcactcttaaaaggagtttacagatgcactctatttgtttcggcattcaagagaattttttagtctacattgcattgtaattatttagggcatcctatcctacgaaattttgaaaaattcaaaaaaaaatcaacgcactgaaaatacggtttaacaatctatttcacacgcgtacaaaataaaaaagtctcgcgtgtaatatactgtttgaaccttgttttcaacgtattaaattctttcgaatctctcaaaattttacaagatgtgttaaataactactgtacaatgtaaataactataaaaaaatttctcaaatattaaaacagataaagagtgcattagttctaaattatgtactcaaagtttttctatgttttttaagctaaggttttattttgactacagtagccacatgacatacatatgttatctcccaatcatgcacaccaaccctctcaggtgtatctaaatcccaatttttaagtcaaagatctcaattcttcaaaattacaataaagccccgaattttttcaatgtttcccatcttagccccaaattcaatacttagttttctaacacaccctttcaagccttctctttttcaaaatgcccatagttctaaggtttttgtttacttttaagccctttctcttctaccttccggtaagcctttacactaatttggtgtaaaatctacactaaatctgtatataaattttaacttttcatacaacaattctaataattcacaccaaataaatacattttacttaaaagatcttacattttatattatttacatgattaacccaaaataactatttataatataatcatatcataactactagtaagaatttaaaattttaaactaaatttaataaaaaaaattattaaatcaactaaacattacacattttttttagaaaaaacttcaaataaaataacacctacataatttaattttctaaattattacggtgttcccacacatgtttaattaatacatttcgaagaacatagtgaacatccatatccttttgtctatgtcagtcaagaaaatattatactattttgatatttttcaaaactaagatatttaagtaatcaatttgactactaaattatcattttacttaatgtttatttttatttatattgttctttttaattttataacttaatgttatgttattttaatttcatttaatattagtatttttgttattattattttatattttttaatatattagtgcttgaaatcaataaatacttttgtgataattttttatttgaggactaaaatgttaagattgtcttttaaaataaagattagaataataataataataaaaaagttctacaccaaattagtgtaaatttaaaatcaaataccattaatgtgtagaatttggtgcacaattttgtgtgaaatgatgtgaagattccatactaatttagtgaaagagcattgataatattggcgccagtgctgtctatcactttctatatgtgttattctacaattgattaacaatattcctaaaagttattatcttaaattatatcaaatccgatatttaattacattaataaaagtatgacatcaaagaaaatgttaagcaccaatagtacattttaacatttttcttaatgaaatggtggaaatgttctcattaagtcaaagatctcaactcttcaaaattacaataaagccccaaaaacttttcggtgtttcccatcttagccccaaattcaacacttacttttccaacacaccctttcaatccttctcggtggttctagggtttccgtctacctttaagcccttgctcttcctccttccggtaagcccttctctcaatgcctccaactccgtttcctctttcttcactctcatcagttttgagaaaaatatataattattcttatgatttgaggctttaagctgtaatttgtaggattgatttttttttttttttttctgtataatttgttaatgtagcgtttgtagtgtattaatttggtgtttgaaaattctgggtattctttttccataaaagctctttacatttttcatagatttgctctttgaattaatattgaattggttcagtttattgctaaaatattttgggttgacccaccatggaagtactctgccccatcaaattttatgaatcattttgctataaaaaaggttgtttgggatgataaaaccctcaagccattttttgttaattatattgtaatgtgataaattctaagtgtggttactggttgttatacactgaatttcatattgatatagtggatataagatcaggggctgtgaaattttgtgaattcttacagtatgttgaacagtgcgtttgtgttttgtaaataaatatgattttattgtctcaaggtgacagagaaagtgttttttgctctgttattcggctatgctaaagtgttgtcattagatcatggactggtatgagggtcatatttttaatgcttccctgtaaagaggttcaatgctattggaacattttgtgttgatcacataaagttattattgattttggaatgataacagtctagagatgatattggttcatgattttgaaaccgtgatgaagaataactgcattcatatttcacgtttttctttaagattatagttttaatttctttacttgaaaatgaaatgggtgaaggtcttgatggcaaggccaaagcttattttaatctgccagtctcttggtaaattcgtcacaaatgaggacggaacgttattatatgctggtggagaggcccatgcagtagacattacccctgaaactttattcaatgatctcaagttgaaactagctgaaatgtggaacttagcctacgagtccttgtccatcaagtactttcttccaggaaataggcgaactctgatcactttggctaacgataaagatctgaaaaggatgtatgagtttcatgggaattcagtaaccgctgatgtttacatccaaggaaaagcaggttttgatcgtgaagctttgagctttcctggaaggtatatttgatttcattttgtcaggtcgttgtgctttttttaggaccacatactgctgttttctatttactaaatgtttcattgagaatctcacttttcagcttatactgtttgtattgcatctgaaattaaaagtttcatacattcatttgatactattttctggttttaatggaatgatttcagcacccttcatactgtaatttgaatcacgatttttggtatatcacaaataatatgcattgaatcgtattgtttattatttgtaggactgctggattaaaagaagctgaagccataatgcccgttgctgcctgtgtggcagcagctcctaccaattctgatattgttgttactcctttagttgtgaagcattcaatttcagtgccttctgttgctaatctcacccctgtcactccagtttcctcgttctctcacactacatcaacaccaggtgattattatatttgtcgaagatgttgttaaaatttccagtaaattaaacttataccttttgaccacttattttaccatatgactgatgcaggtgctgctagttccactccacctgattccacatctgatgccaatgctaaaaattcaccttcagttgatatggattctacccctgctgaaactgttaaaaaaagaagacgtgctgcatctcggaaaggtgatgccaatggtcctactattgttgcaaacactaatgatggcgggaagaaaaggaagactacacctcggagaaaaagtatctcaaagcgtaatactgatgcagttgaagatgatgtggagcagaaacaagataattctagtggtaatgctgctcttgttagttctgctgatgttcccccagagagattaatggaattgtggaaagatggcatcactggtgtaggtcaggaattcaaaagtgtctatgaatttcgtgaggcactgcagaggtatgccattgcacaccgttttatgtacaggctaaaaaagaacgacacaaatcgtgcgagtggcagatgtatagcagaagattgttcttggaagatttatgcatcttgggactcatcaacacaatcatttaaaataaaaaatatgaatgaaacacatacatgtggaggtaaatcctgggagtctgctcatccagctaagaattgggtcgtaagtatcataaaagatagattacaagatagcccacatcacaaaccaaagcaactagcgaaaagcattcttcaagattttggggtagagctaaactatacccaagtatggcgcggcattggagatgcgaggcagcaactgcatggttcatacaaggaggcatataatcagctaccttggctttgtgagaagatgacagaggctaatcccggtagcttaattaagcttttcattagtgatgaaaaaagatttgagcgcctctttttatcgtttcatgcttccatacatggctttcagattggctgtcgcccgatcttgtttcttgaagctacatcaatgaaatcaaagttccacgaggttctgttgacagcaagtgcattggatggagatgacagtgtctttccagttgcatttggtgtagttgacaacgagaataatgataattggcagtggttcttggagcaattgaaatctgtacttttaatttcacaatccataacttttgtctctgacagagagaaggaattaaagagtacagtgcttaatctatttgagaatgctcaccatgcttactctatataccaccttctagaaagcttcaaaagaagctcaaaaggtccattcaatggggaaggcaagaactcattaccaataaattttttggctgctgcccacgcaatccgacttgacactttcaaactacatactgagcaaattaaaaaggtgtcttcccaagcctatgattggttaatggatgttgagcaggaatactggacaagcacatcattcaagggcgaaccttataaccatgttactttaaatgttgcagaaacctacaccaagtggatggaggaagtgcgtgaagcaccgatagtacagaagatcgaactgctgcaatgtaagactatggaattaataaatactggtagaacagattcaagtaagtggtgtacaaaacttacaccattgaaggagcaaaaactccgagagcaaaggaataaagcttatggtcataaagtactgttttcttctgacaccctttttgaggttcatggtgattccactaatgttgtgaacgttgagacatggagctgtagctgtcttggttggaaacgatctggtttgccttgctcacatgccgttgcagtcttctcttgcaccggtcgaaacatttatgattactgctcaagatacttcacagctgatagcttcaggttaacatattctgaaaccataaactctgtaaattccaatatgcagtcgatgaataatgatgataagactaagttagagactacccttgttcttcctcctgtaacctcacgctcaccaacccaaaacaagaaaaaagagagtgaaacaggagcagtgaagagggttagaccagttacttgcacaaggtgcaaggaaacagggcacaacaaagccacatgcaaggcaaactaataaagttctttttggatttgttttcttttgtatagttcttgttcatatttttctcagccatggatgtaagtattcagctccatcacatcaaattgaatttgctgtgtacctctctaatttgagggatactttttttgcagttagacttttagtggtaaatgtttaggattttctttcatgtgttatttagtcgtgcatgatagctttttaaaaatccaaatccaattggtacatttttatcaaattgatccattttcctgaaatgtattattattatttggaatttagcaattctcatcttggaaagtttattggatgtaaatttaagtgaactttttgaaaatatagaaattttgaagggtttattgcattttgaattccatgttttgacaaattattagtttggatcttatattttttaaaaaattctattctagaatctgtatttttgtaaaagattacaattaggactctaagatcgaaatattttaaaatatcaccaaaataactttagtgatactaagagcaataccattttaaaccctattataatgaccacatcttgaaaattctatcttgaaacaaaata

SEQ ID NO: 42678 - DNA, 8514 bp, Cannabis sativa
aaaccgcaccgcactgcactattttttgcgttgcagttttttagtttcgcggtgcgggtgcggtttgggaaattgaaaaaaccgcatgtgcgggttggtttgaaaaaatagtcaacaaccacaccacccgcaccccgaacactcctagtactgactgtggaaacgctaatgtggtcttgatcccaaagaagaaaaatccaaaatttatggcggatcttcatcctattgtgctatgtaatgtcctctacaaggccgtctcaaatattttggagaccctttctaattttaaaaagtatgtaacaaaaaaaattataatttgcaaataatattttaaatatttatattacgaaaatatattttacatatttaaacacccaaaaactcaaataattttattaaaattgttattatttccaatacaacttcaagatatcaacattctatttactatttaattattaaatattatggaaaaaaattaaaagggaattaaataaggaaaagaaatcaaggaataaaaatcatattgcttttttttttctttttaatttggcatgatagaatgttgggttaaaaaaaagatgacatattgggcttttttaagttttgggacctgttgttatcaaaaaaaagtttggggccctctgtatcaacacttcttgcacgggtacatggccgactctggtcctctataaagttattacaaaggtcatgtcgaaccgtatgaaacctttcatggatagtatattgtttcggagacccaaagtgctttcatcccaagtattttatcttggataacgtcatggttttctttgaagtcctccactatcttaaaaggaagagacaaggtttacatagtttttatgacattgaagcttgacatgagaaaggcttccattagaattgaatggtgtttcttagaatcgatgcttcaaaaagttggttttgcggacaaagtgggttcaattgattctcaagtgtgtttccctcggctcgatactcggtggtacatgggggtagaacaatgggccctattattccttctactgatatcagactaggtgactccttatttccttatctctttattctatgtgtggaaggtctctcggcgctactaaaaaatatgaaagacgtggttggattcatgggtgtaaagtggcaaatggagctcctaaaatttctcgtatgctttttaccgatgatagttatctttactacaaggcaactgtacaggaggcgctctgaaagttcaagaattgttgagaaagtttgaatcggcttcaagtcaaaaagttaatcttcataagtcatcaattcttttcagttctaatactcatgagcatgctaggatctatctttgccagctagtccaaacgcagccagctgatgagaatagtctctacttgggtcttccgagtactttaggtcgtaacaagtcaactattttggggcaccttaaagaaagagtctgtaaacatttacaaggttgggaaggaaaatttcttttgaaagttgggaaagaggtgttggttgaattggtagctcagtcattacctagtaatgcaacgaatgtatttctccttctattagaaattacttgggatattgaaagtttagtggcaaaactttggtggcaaacgtccaactcgcctcaccagggtattcattggttgtcttgaaaccgtctttgtaatcataagaacagagggggcatgggtttctgagacctttaagattttaatttggcccttttgggaaaacaagggtggcgtctgcttactcgttcaaattcgcttgctacccgtgtattcaaagtaaggtactttcctaggggaacttttctcaatgcttctcttggtaataatccaagttttgtttggcagagcatttagaggctcaaaatgtagttcaggatggtctttgttggtgtgtgggagatggttcaggcatagatattcttggtgaaccttggtgttcgataaagtgaacccatatgtttcttcatctcatcgtactttgctcaatgctcaagtttccaattttctcagtatggattacttgatctgggatatgagagataatctgatcaacaattaattctgaatattcctcttcgtgtgtctaatgttaatgatcactacgtttggtccttaaaagtttctagtttatttacagtcaagagtgcatactctctgctccaaaagaatagaggtcgctactttgatagtgaagatgtagtgttttggaaaaaaaaatgtggaaactgaaggttcctcccaaagtaaaaaacctgctatggcatgctgcaagaggctaccttcctacgaaaattcaacttcagacaaagcatgttgctattaattttctttgtcccatctgcctgcaggatgatgaatctatcttgcacattctagtcacttgccaaatggaacagagtcggtattggtaccaacatagtttatgctggtaatttctttgactggtgtgtggagtcctttaaatcgctggattatgagattcaatgcacgcaggaatgcactctagctatgctttgttggcaaatgctaggaatgatatcgtttggaatgggaaaatttttaaagaagagaatatagttgcaaaagcaagaatttttcttgatcactagagatgtgctcataactctgattttgagtcgtcatggcctagttttcaggcaggtgatggaacggagcactggactttacataggtaaataacattaaggtcaatgttgatgtaactttatttgattcggatcataagtatgggttgggactggttgctagagatgaaaaggggctgcttattgaaggtcatacgttattttcacatagaacgattgagccagaattagctgaggcaatggacattcgagaggaaggatagatagaacttaatcatgttcaatcagacactccataacaaaaacctaatccttctaattcatttgcatctcctgaacacaatcaaaccaaggtgtcctatacacataattatggaatctcaggacatatagagaagtattataaattgcattgatatacacctggtcataagtttttttagaaaatgtagtgtggtatagttcctccaaatgaaaatccagcaatgtgcatattgaccccactagcatttagtgcttatctctcttcgtctacaatttagtcaattcaaagtcaattacaactgtcaaagggagaagtggactcttaatgaggattttattttgtgttcaacaagaagaaagattgaagcaagagaagtttgaaagtgctcatttggcaagcacctctaaagataagggcaagaaaagaaagaatgaggcttctaaggataagggtccagagtacataagaaataaactcaaactaataatgatgatggttatttcttttgcaacatgaaaagatacatgaagaaggaatgtgctaagtacattgcatggcgagcaaagaaaggtacttttcttacttttgtttgttctgaggtaaatttagcttcagtaccaagaaacacatggtggttagattctaatgctactactaacattagtgtttcaatgtagggttgcctaagttaccgaaagccaagtgatattgaaagaagtatttaagtgggaggcagcaagccagtgaacgtggaagcaatagggtattttaggttgttttaagtattagttacaatttagacttaatagatacttttgttgtaccggtatggagttatgtttttgtttcttgtttggacaaatttgattattgttgttcatttaaaaatacttattttagtttatctattaattcaaatattgttgaaaatggttctcttatgatttatgacaagttatatttgcttgacattgttgcttcttataatgaaaccttaaatgtggaatcatgtggtactaattgttaaatggataatgaaaaatcaagttctttgtggcacaaatagttatgttacattcctagaaatagagttgagcgacttgtgtctagtggaatattaaattcaattgatttttcagagttaaatgtttccattgaatgcatcaaaggcaaacagaccgaaacaaagaaattgggtacaaaaagagctacggatgtcttagagttgatacatataaaaatttgtgggtcatttcctacaccttcttggaatggtcaacaatattttgtatcactcatagatgattactcgagatatgcatacctatctatacttcatgaaaatctcaagtcttggacgtgttcaaatcttttaaggttgaagaaagaataaagcaagtcagatctaatgtggtgataagtactatggtagatatgacagatcaggtgaacaacgtctaggaccagtgtcgaattgttccacagttcactatgtcaagatctcctagaatgaatggtgtttctgaaagatgaaatcatactcttaaagatatggtaaggagtatgattagtctttcaaccttaccaaaatcaccctggggagaggcacctgagacaacagtctacattttgaatagggtaccaactaaagtacttgcaaaaacaccttatgagttttggataggtagaaaacccaatcttaaccactttcatgtttggggatgcctagctaaagctaagccttataggctaaatgataagaagttagacctacatcttcagtgcaccctatcttccatgtttcacagcttcgtcgagcatttggtcacaatgattcttctcatttgctacctccacagttaacttccaatttagagctcttgtttgaacctgctaaagtattgggtattcgcaacacccactcaaatggtagggggagaaatagaagtgctcatcaaataaaagaacttgtcggtctttgaggctacttggaagaattacaacaaccttttacatcaatttccttcttttcaccacgatgacaaggtgatagtttgggcggcgggtaatgatatgccaccaatttgttactcctatgccggaagagctcgcactaattgagatgagatattgatagaagtttataattaatttctgaattagaatttattttgaattatttgtttctgtttataaagaatctacgtctctcgaatattctgggcaattttctattttcaataaaatatccctattttcctcaataatttactttgtatttttttttctggtttgactcaatacagtattagtgtatatcaaagtatatttcaagaatttgttagttcatttgtgattcctcgatatcttgaaaaagcatgaaaaaacatattaaatcaagatttttagccaaagccaaatatagggtgatggcaaatgccacttgtagaatggtttggttactcaggaactccattgcgacaacaaatagctctacacatagctactaatatcatttttcacgagaaaacaaaacatattgaaataaattgtcgcttagtaaaggagaaaatcaagatgcagttatcaaggcaacccacattgtctcgcaataacaagcagcaaacatattcactaaaacaatgtttccacaacagttgaagtacttaagacataaagattagattgcaaagtattcccaatatatcttgagggaaagtttgagactatgagttgcataatgaattgtccacttgtgctgtcactatactgttagtttagaattagttagtcatagttttagctaatatgttaacatttttagtaactcaattagtcctcctaattgagactaactcatatataatgctctttcttaatttcactctgttctctttagtaaaaatatggtccacataaattattcttgaaaatgttcataccattatgagccacgaaaagaaaccacctttgtttaaccatttcttctactgttgctgaaaaaaaaaacaaatgaacccatcataactaatttggtgttggaggccctagctagctccaagtgtggattcttgtttatcttttcccaattcacaagaggttgtttgtatatgctggtgtattctgggtttggagcaattttctaaaattgagagtattcaaaccatatataccttcccaaaatttcaagttatctctccaccaatatggatttggctctgtgctatccaatttgctaaactagtttaatgtttgatcaatacattattaaataaatataaatacacattggctagagatgatcaaacttacatgatctgacataaccaaagtggcatgaccaattgagttcaaatagcctcaaatgtagaaaacttcacaaatattgtgtcatcatttttaattaaatggcactagtggcaaagatattgaaacccaataatccaaagataataatttcactcaaaatacactgctcattaaattatcattgtgaggcaattacagagataaacacaagttaagaacattttgtgctaagactgctgtcacaaaactcccctttctttctttcatagacatcctactatatatacaaacctaaaaagaaactaaaatagaccagcttcataccctaaaaagccccatttagtcagtatttcttatgttctaagatctctaattttctctacaatattagtgcaacttactttgcaaatcaagggagaaagaggggatcctctttgttcttgtatatttcgaaaagctgcttagagtagtttgttgcaagtgttctacacagtttgacagccttgggatcatacttctccaactcctctacagttttcgttaaatggccttctttatctccatcagtaagataaacagccaaattcgtgcccctgttgcaaaaatgaaggtttacatatcaggaaaataagtgtgattaacaaaaccaaggatactaattaatcatccaccatagaatactagcaagaaagaggtggctaatggatattcatagttgagataagcctataagaaagagaataatggtatttggaagtgattacttagtatatgtattcaaaagaaaactagctagaacatttcattcaaaatgaacaaaacaaaaatcattataagcaatataaatctcaaatttacaaggctcaaatttgtacctgagagcatcaaacttactaaatccacgattattataaaccaatgttcctttgcagatcttctcgtcagcagtctgctggcggtagagagcacatacagccttcatgcacaattcggtatccttcccaaaatcagcaagcatgtctgcctcaaactcccacttaaagcttttatcttttttcctttgaagattagataaaatctcagaaaagtctattttgtcatctgaaagatctactgattcactagaagattcatgatctcctgattcactagaagactcgtgacctccagatgcatcactgtccttaacaataaagccgcccaagctttcaccttcactgtctgagcaaaccccatctgactcatcagtttcggtatctgcatttgtaggaactccttgaagacgattagttttggttgtatttttaggtgactcttttcttgcaacatctcttcctctgcattccttcaatggtactaaacgccttcttcgaggggtcactgctcctttatcattgttaacagcagaagtagtagcattctcaaaggagcccctttgatcagggcgaatacgttggtgatttatcctcttaagtctggcaattggcttattatcatcactgttgctctcctcatcagagtcactcataacaacatttaacgctcgttttcttttgggagtacaaacatccatacttttttgtttacatgcagcaagatcttccatgttgttctgtcgacactttgtctcaccagtcatctccattgcacaagtaacactccctactaatgggctgacagcctctccatttccacttccctgattgtcagcagacactttgacactgatattatcgaattcctcatcactatccaaaatatcgacagtgttgagagctgaaagtctagccccacctggtgtagatggagccatattcttacttgggctctcttgctcaagtaccagttgtcttttaacaagttgactagcagtaaattccatgccaggctcaaaactaaccccttttgcttcttccttgataaaagcatcacttttacatggcgtgcgaaaaaaagctgaacctgcacaattcaaagatgataaaaatcataatattgtatgccaattgtactatgaaaggtacagttaataatcacataaacaacttgctaaaaaaagagattccaacataaaaatttcaataaccgtaaaggattctacagatctcaaatagccacaatccaatataagagatgatattgctaaataaagattgatccttaaggtgcttgtgaaaatcacactttcctcaaacaaatttaaagatgaggattaacacttgaataagcaattataataacaattgcagccacttttagttttcacctaaagctttaaggttacacaagaata

SEQ ID NO: 42679 - DNA, 3790 bp, Cannabis sativa
aaaacaatattgaccaaaagtgaattggtttttaaaacagaaaacaacgttttggtgttttcaaaacgcttattttttgtaactttgttttctgaaaacagttttcaaaaaacaaggccaaacaagcactaacacttttacaatgaaataaacaatgtaagtaagacgtttgaagaaattacttgccttggtaagccccaagagggcagttttagtaaccccgtacattgccacggcagggtcaggtcggaaagcagttatagaggaaataaaaacaactgaagaaccttttgtcatgtgaggagctgcatcctgttaacataatcgagttgaatcattttattaacatctaggttgtgtgatgtaaaggataacaataacaaaggagagaaaatagaagaggcaaaataaagagtaaacttagaaattggaaaatgaatcaaacattttattatcactagaagttgtcttgtacatgaatctcccacttatttataggattgactcttactaggaatgtaacgatggataatattgtaatcatatcatcttgtattcataatcttatccctgaaaaagttatctattcctcattacacatgtttactaattcgtaataaaacccgtagtggccataaaatgaagttttttcatgacctctcatttcctacaaacctttctagttgcaatgctttaaattacagattagtactaaatatgccccgaaaatattacaagctcaaaatgagattgtgaatataaagtgatgactcatgattatggtaatctaggtgaggatcagtaactgtaacgcaggtcacaaacaaaaccaatgaaaaataattaagaccatatcatgctacctcactcagaaaacaatacagcatatacttcttctcatttcctactctaattacctgtaaaacaagtatagaagctttgacattaacctcccatagcttgtcaaggacggattcttgggtttccaaaatcgaatcaacagaaggattaacagcagcattcgatatgaacacatctatcttcccatatttctgcgagcaaaccagcaagtttcaaacacttcaatagaatacataaataaacactaactatactacgacctttgataattgatcttaaaaaatcaaaggccaaaccaataacgcaaactatgtctgatgtctcacctgaacagttttgtctataagattcttcctttgctgtgcatttgaaacatgacaaacaatcccaaacgtctcaattcccttccccctaagcttttcaactgcatcatccacgtttttctgggataatttgataagaacatctccattaagttatctattctcaattactatttcttagcagggaaagaaatcaaatttgatatgggaaagaaaatccaagtgcgtatatttcaaatttataaaagcaaagactgaaattaagtagtacggcgtagaaacctgctttcgggaagagatcacgacggaggcaccttcgatgccgagacgctctgcgatgctgaagccgattccctgagtcgacgccgtgacaatcgccaccttcccttcgaatcttctcccaattttatgtgatttctccatttttttcagttattccaaagatgaaacaaaagccgaaaaaggaaaatcaggttttgaaacaagtgaagtccttgtaggtgagatgatcaacgtaccttgtttttatctagatgcaaatttggctttctcttacaagttgtataattttataaaataatacgatttttttttatttatattttaaaaaaattatttgaatgaatttttatttattataaaattttaccagacatgttttaattttcaacatttcaaattataatttaccacaaatttaacctttgaaactaattgcaatgttgtcaatttacttgaatttttattttgataatacgtcgattcagtaatgagccacaaaaataatattaatatagcgattagtttgcaactacatattttctagtttaatcactaaatatggataattttttttaagcatttcattacaaatataaagacataatggcctgctcattctgaaaagaaaagtgttttttagctaaaagtctaacgaaaaaatagagtaatttatatttgattattatttccccccatttaaactaaaaagaacaaaggataatttcttacagtgtaattgttaaaaattattattgttgcctagcacactctgaagtgtcatactactatttgtgtaattaagtatcgaatttcatataatataaaaaaataatttaaaacatatcttataaaaatattagatgcgaatattcaataacagtactcctagcataatagaatattttactataaatgggataatatttgacatggtatagggtgtacaagaaaaggactagtatcttcatggcaattagcaagaaaaaaggagctttatattggaacacaatgaaacgtttttgaattaaattgaagaaactaactcaaaataaaccaatacacattcgtttgtaaattgtaataccacctaacaattttttttttcttttttcaatatcatagagtacaaaaaccacctaacaattattttagtcataaggattcctaaattttttcaggagttctggaatttcataaccgagcatatcatctacaccttggatcaatttaggcttcagtttctcaaatttgtcaatgctgtaaccattcaagacctctctaaaatgctcaacatttggaaaatcaccaggcggcaaatgaaactctctttggacctaattagcaaaaccaaaagttagtatatgtatatttcttccacttatgaaaaccttctatctaggcatacataagagacataccttcgcaaactcatcttcaagattatcaataagccgttgttgcgtcttagctttacccatcatggccggcatctctttcttgagatgactaattatgtaagcatgcatcttagccgctcgggcacgtttcacaaattcattgatctgcaagacgtaatcagctcgacgtaatcagctcatttatgtgacaagtagaagattttgaaaaaagcataaaatacgtatattctcctgcaacacacaaatataaatttacagaaaaatattatcatacccgacggtcacaagccttctttggaatatcaaccaaatctgccaggagatcatcttgctctttttcaaagagttcttggcccatagggcctagagctgattctttaacaggtttgtcgttgaatgagctacaaagacaataaaatcactcatgagttaatgcttgaaataaagatttagttgtgaacaattcacataaacaacacagtctagaagctagtacattgggcaataatctatttcttttgtgctatacaagttcaagcacacaatgataagttttcttgtaaataattggtaggcaatatataagagaagatatacatgtttttggaaataagagagaaattttgtgccacaaataaactatgtcagctgaaattacagcatggaaggcagggagtggaatagcatacccaatataaacacgcgaaacctctggtgtattcaaaacttttccaagtgaccacatcaaagctccatatactctcatgagctataagttataatataattaatgatgtcaaagtagacaaatgcagtcatcaaaagtcaaagatatctaggagaaaaaatattcaatagagtatctgaacgtctacctgttgcgtgtcaacttgatctgccttattg

SEQ ID NO: 42680 - DNA, 3890 bp, Cannabis sativa
aaaaaaaaaaaaaacttcatttttctccgttttatttgttttggtaaacactaaacgcgccataaaagcgttatactctaatcgaaatccgcaaaattactcgttcaaatcaaacgcaaaatcttaggatgtcgacggagtcagcggaaccgttcaagccctacaccctctcccaaaccctaaccggtcacaagcgagctatctccgccgtcaaattctcctccaatggccatctcctcggctcctcctccgccgacaagacccttcgtacctactccgtcaatctctccgatgccggcgccgccctgacccctctccatgacttccacggccacgatcagggagtctccgacctcgccttctcttctgactcccgcttcgttgtgtctgcctccgacgacaagaccctccgcctctgggacctcaccacagggtctcacgtcaagactctccacggtcacaccaactatgtcttctgcgttaatttcaatcctcagtccaacatgatcgtttctggttcgttcgatgagactgttcgcatatgggatgtcaagaccgggaagtgcttgaaggtcttgcctgctcactctgatcccgttaccgccgttgatttcaaccgtgatgggtccctcattgtttccagcagctacgacgggctttgtaggatttgggatgcttcgactgggcattgtatgaagactctaattgatgatgaaaacccccctgtttcatttgtcaagttctcacccaatgggaagttcatccttgttgggactctggataatgctctggtaagcttttctattaggtttagtttgcaatattcagttcaagtttgagttatactttattaatttatatgtttgtaaatataaaaaactatctttgggtttggctttttagaaactgaaagctatagtgggaggtattgttgttacctttgatattctttaagtacacattgaggtttgtttccatgctcttgctctagcttatcacattttccttgtttagtactcccaatctagttcgctttattctttttgctatatgcttgaactttctagcttaggacttactcttgaagcttggcaaaagtaattgttaatgcttatgttcaatttggtcctgttgctagctttgtatctttatctttagctcttgttttatttggaaagcttggtcttggtttcggcatctcatgtaaaggggatttcgtataatacactctcaatttgcacactcaaattagtattacacacacgtatgaacctgcaagtaatcttaaccatgaatgtttttaagtagagatcacatcatatctgtcaatatgttgatattatagtgtatattgaaactgtatgtcattactcttttttgcacgttggcagttggcaccgatacattttaagccaatttgactagtttatatgctcttcgaccatggtttcctacccattccatccatagtggtttcttttcactctaatgtttaaagctcattttttaaacttgattttgtgttaacagaggctttgggacttctcaaagggcaaatttttgaagacctacaccggtcatactaattcgaaatactgcacttcggctaccttttccgttacaaatgggaaatatatcgttagtggatctgaagacaacagtgtatacttgtgggagttacagagcaggaaagtagtacagaaattggaaggtcacactgatacagttatatcagtaacttgtcacccaaatgagaacgtaattgcatctggttcactaggcaatgacaagactgtgaaaatctggactcagtccaaagattgatctatttctccaaatggctgtgtaatataattgcgcactggtggcaatggctgagattttgacctgagcagaaagattggttatggtatttagcacaactcactttttagaggaattataggtaggtcgctgctgcatgattctcactatgtaacgctgttattcttattgtctcatttgagacattatattccttctcaaatatcaggtagaaattctctcattgtatttagttgtttcgtggatctttttgtagtctctgaactgggatcatatgtgttcatatgctaatgaaattatgtcttggggtcaactgaagaagtttgtggttccaagaatttatatgtggtgttgaggacaagtgactgagaaaagcacactcttggaattaataaatgcattacaatggttcaattcatagcaattgtagcagatctcactcccccaacttacgcactctcaggactcacatacgaagcataaaagagttaatttcattggacattgttttttcttttaataggtaaattgatattatctaatatctattcgattatgctgatgtagaaatagtcaaatagatgtaggagtctttcttcttcaaatcatatcagcataaaagtaaggagttacaatgcaacgacgagttaataaagaatcacaaaatgttggatacatttttattgacacttctcgagtgaggtacaaaatgttgggtatttatgtccccaatttgatgctgggtatttttgtcggttaacttatcttgaaaatttacatcaaatatttttttttggtaaattttttatctaaagttatttgttggtttaaagattttttttttttattttgaaaatagatagaatgttaacgttaaatgttgaaaaaataattaaataaattaaaaataaatattaagaatcttttacgattgaagaccttctttaattgaggactacaactcctttgttctctcaactcattctgactcgcttcgatttaaacattgtccttaagaaaactcgattctaattgttgcaagcctagttctgttaactgtggacctcgctcttcggctaccactccaatctggagtacattatcacctcaaccggagagcagaatgcggtctcagatcccaaagctgagtcaaatcgtcttagatccaaattctccttggattgtttcacccaagagaaggcgaaacaactcaggcaaaactcagtgatcgcttctagactagcgttgattagaagaaccaacccaagaagtaacggttcttgttcggagctctggtaacttcctcgttattttttttttttaatttggcaaggtttggagtttttggtttgtcatgttgttcttggcttggcataatcaataaaaaattaggcgatgcagtctcacctcggccggattccgcttcggatcccgaggctgaggagatgggtcggagagagcggaagaggaagacgttgttgaagctcaaagttgggaaattgaccagtgagagtatttatcgaataccttgtgtgcaatggaggaaactacacttcagctccaacaacaacgacgtcaaacggtaatttcagactcttctctattacttgaggttgcacgaaacctctcaagcttaccgaaaaatggtttacagatgatcagagaacatgcagagcgacctttacttgacctactttttagtcgcaacatgtcacactcaagtttacaagaacttatagaagccaccattatgaatctagctacctcaattgtgtctcaagactctgatcaactacctgattcattcttggaatctgatgaagatattttcacactcttctcttagttggcttcacaggacctaatgtccagatagacattatcagtcccactcatccacaaatattaaagccaaattaataaaagtatttattttctagaaactatgaccaaaatgctatattttcagaaatttccaccatactttgagagcttataagatgatttggatagattttatttaagttttattttttttttgcgcatcactgaattattttcataat

SEQ ID NO: 42681 - DNA, 3011 bp, Cannabis sativa
  modified_base (2936)..(2965): a, c, t, g, unknown or other
atttagggcataaaattccaacaacttctcccacaatgacacttttgtcataaaagctcaaatttccaacaaaagagtttctcaagtcctgggggacaatggaagctcaatcaacgtactgttcaagttcaaatttcaggcaattgggctaacagatgctgatttgtcaccgtctcccatccaactcgaagggttcaatggagattaactcatgtcaatgggaaagattcagcttctgatcacgctgaaaggggagaacaacatttgaaccttcaagcattgcaccttcgtggttgtggattgctccacagcttacaatgctatactaggatgtccaatcttagtcaattttggggccataacttctattaggcacctatgcatagtgttggagtgctcagaggtgactagagaagtgctagaatttgttataatgttcctgtccagtccatgttcatggtccaggaagatataaatttttctctcggaatagacgttcaggtggaagcttaagctgtctgggaggagtatgaagatgaattagatcccatggttataatagaaagaacaatagaaacactagaagatgtggaagaagtcattatttgtgacttagaccccactaaaactatcaaggaaggaaaacatttatatccaacgatgaggaaaaagatcgtggctacagtaaagaagaatcaggatgtgctagcatggagccattttgacatgatgaggatcaatccaaacactatttggaatgcccttaacattgatgaaaatgcaatacctgtctaccaaaaaaggagaccactggatcctgtaagtgcagaagaagtgaagatagttgataagttgacttccaatgaatttctacgggaatcattatacccagtatggttggcaaaccctgttctagttccaaagccaaatcacacatgaaggatgtgcatagactttagagaccttaacaaagcctgtccaaaagattattttccccttccgcggatagatcaaatggtggatgccatgtcagagtatgaactattaagttttatggatgcctactctggctacaactagatcaagatggatgtcatagatcaggaacacaacagcttctaaatggacaaaggtctgtacttttacatggtgatgccattcatattaaagaatgctggttccacctattaaaggttggtcaataagatgcttaaggataaacttgggaggaacatggaggtatatgtagatgacatgcttgtaaaatccaaaacatctacaaagcatggtgatgatctcaaggaggccttcatggtcatccagaaatgtagtatgaaactttaccaaaaaaagtgtacatttggagtgtcctctgggaagtttttggatttcatagtcagatcttaaggaatcaaagctaatccaaagaagattacaacttttattgaaatgccttctcctaagaggcaaaagtatgtacagagtgtaagcgaaaggattacaacccttggtcgattcatttctaagtatacagtcaagtgcatcccattttttaatgtccgagtgtcaatcaagggataggccctagctaattttgtagtagagtgttctggaatgaacgacctcccaaacaaactagtcctgaaactacgagtttggaacggctacgttaacagagcatcgaatgagaagggagccgaagcaggacttatactattttcttttcaaggatatcagctctaaagtgccatccactttgaatttctagcctccaacaatgaagcagaacacaaaattattttagctagcttgtaattggctaaggaagtaggagcccaagttatcaaaagtgtacaatgattcctagctcatggtaaaccagatatctaggaatatcaaaccaacggtgagaagatggctatttatgtgacacgatctagggaactgttgcacgaatttaaaagttccaacattttctaggtctcgagaaatcaaaatgcattcccaaacatcctagttaaacttgcagcagactcgaagatcgtgtaatactaagtagtgcgtgggccatttaaatgctccgagtattgaaacattgggagtaaatgccgtcattgatcactcaagttcctggataggcccaatctattagtttctaagtttagggtagcttttgcctaactaggcagctgccaaattcagtatcaagctcttccatacgtaattctagatgggaaactttaccgcggggggttttctgtaccatatctgaggttcatagtcaggactgaaataagggcaattatccacaaatttcatggaggtttttgtggagatcacacctccagaccaagcctgtcaaaaaagatttttcgtcaagagtatttctggttgacaatgaagaaggatcgtgttaagtatgtccagaagtgtgaatagtgtcagagatacgtgaaggttcttcgtgcaccctcaattgagatcactctcatgcacaatccttaaccttttgtagtgtggggaatagacctagtgggatcacaaccaactagaaaaggaggagtaaaatatgcaatagttgttgttgattacttcaccaaataggtagaagctaagcccataaacttagtcacctccaagaaggctttggatttcgtcatcaacaatatcgatgctcttttgggcttttcacataaaattgtgtttgataacgggaagcagtttcacagtgtacattttaaggatttatgtgttcaacatgaaatcatcaagaggttcttcgccgtggaaagaccacatgctaacggacaagtggaggccgtgaacaaaattctgaaaatcacattgaagaagaaacttcaatcttgtaaagcccattggccaaaggagcttctgcgagtcctttaggaatatagaactgttggaaattattttannnnnnnnnnnnnnnnnnnnnnnnnnnnnnttattaacatcctaaataagaacattctaaaacgataaattaaaca

SEQ ID NO: 42682 - DNA, 1358 bp, Cannabis sativa
cgatacaaattatggacgtctcgcactaactttattacctatagtaataacaatatgattaattccactataaatatgtgtgtaactgtccatcaacattggagggtcagtgtaatttttggtcgaacaagagtagtgagtaatgataacattaatttgttatagtcatatatacatatgatgtttctatatatatcatcgtgattctttataccaatcctacatagtcaaaatgatagtaattgcatgcatgtgataccacatgggatctttttacaccccaaccagagtaattaatccttttcaaacaaactagtttaaaaccataaatggtaaaggcatggcttatttcactattctatcgtcaatcttacatatatatttatatatcatagcttttcaaagtttaaaaacaatgtccatgtgcggagaaaaaagctaaagagaatattataataatttcaaatgtgttttgatgatgagttcaaatgtcattctcaacttacagttcccaaaacatggaaaacatgtttgggcttagaattttccatgcacatacatatattcatgttgtttgggcatggattttgctttaggcagaaaattaaattatttatactaatgaacagtagtacagattaaagacaagaaattaatgtcgttgtcttaattcttgattattaatttgatggataaaaacaaagttatagttttgggagggttctaggaaccttggttgctgaacattgaaggtacacgaaagaggtcaaagtcgcttgtttttatgctcttttcatttctcccaattttcatttgtttgtctttactctctttgctcacttggaaatttctcccaactgaaacgttttgggttagttggggccaactggggttcaatctttttggtttgcttatcgaaaaccacttaaaagaaaagtcatattattggaattgacatatagtatgccactactcttcacagaagcttcctcttcttgaaaaaagtgggaaattaatggaaatatattagatatattcgtatatggaaaaagaaacgtatgagtgcttaggtcattgatgggtcatcagatattactattggagagtaaattaatatatgtttaaaataatgtttaattgcggtttcaaacaaatatatatttaaatgtatatttattttttaaaagaaggaatttatttcaaagaataaaggattggtgtgtgttgaaggtcccaaagctcgagtcttaaattatatattgtaatatataaacgtttaattcaacaaaaaaatggtcgactgaaataaaatcataccaatctcataaggaaacgatcaaagaacgacaatccatatt

SEQ ID NO: 42683 - DNA, 5929 bp, Cannabis sativa
  modified_base (32)..(39): a, c, t, g, unknown or other
attcatttatcagaaaatcaattatttatttnnnnnnnnaaatagaaaatcatttccttaattagaaaataatttccacaaataaaaatattctaatataatgaccatttatcatgtctctatatgactaaatatttaatgtcgatatgctagtttcgaccaatactcttatagtttttagccataaatactacgttgaatctatcataaaattttcttaatggcctgaaaatgtattctgaactctaggcctagtatgaaactctataatacaccatacacgagatgtattcttaaaataataaatgaatctgacttttataatagaaataataattaagattctttacgctgcaacttagtggtaatcttaagtatttcaattaaataaattttttctgggatcaaatgtgatagtgctcacacaaagttaggtgagtctcaaaatttcaacaaatgaataagtattcctatgttatgggagactcttcgtattatcatacactatcagttctctcttttttttaaaaaaaaaaaattcataaaagttccaaagtaatgcttttgtcaactccatttccaaagttccaaagtttttttatattgccttttaccatatgttttagttggtttgtagccaaacctcatctcaaaagttagttatggtccatttcctcctgtggaagtggttagaaataatcaaaacaattaattaaccatttccaaaaaaaaaaaaaaaaccatttccaaccgtcacttataatgtgtcaatataattaacctatcagttttatttcgcagaccaaaatttcttaactcgtaacttacattcatgactgtctaaatgggattatacattctcatcacaatcattactttatctctgcccttcaatctttcatatgaacttagtatgtcatcaactttttcattcttttttctctcaaattcttagaacacacttatcatgttatgattaactttcgtttttctctttgatgtgtttgcagaagtaaacaaaggaaatccaaaacctgagtttgcattcagttggttagatgacaaagacacattcaaagccggtgacattgctactataaagattaaagtgttaaccaatcttgacaagattgacaagaacacttttcatcccattctaattgtcaatggaaagattgggaacagttcttacgtatctggggttcttacagatttcaaaggcaacgactctgatgattggaacatcttttttaccaccttaactgttggtctattcaacgtgatgatcaacgaagatcactaccatgtttttgattcttcattgcatttcaaagttgaaccaggttttaaatttgggaaacaatgctttcttcatttaactgaatttatagtgtttttttgactttgatgtgttctgttgaagggaaaatttacccttctgtgtgtttggcttcatggatgggaaacatcaatgagttcgaagcgggttcaagagctagagttctaatacttccaaaagatgcatttgggaacaatgtcacttcaaatagtgaagatctcagttcatataacttcactgtgtcagcattatatgccaatggttccatttctgattctccaaatatcaatggaattggatggaatggatttggttatatcattcttgagtttactgtggttaaagctggagagttctttttgcttgttcatggtggcaaccacatcttgagtggcactcttcttccatttagggtgaaaccaggtgatttatcaaagcacatacttttaacagttatttgactccttgtaatgaagtattttgagttgtttttatcaggatctgttgaggtttccaattgtgtggtgaggtggaactatgaaccaaaggcatggcaactattttccaagatggaactcttcatacatcagcaagatcagtatggaaatctagttccaggactctatgaattcgatgctgaagtcatcgaaaaagaagcaaacttgtctatacctataccagatttgtacttcgaggaagtggagcctggaattcaattgttttccttcagcaatctggagccagggaatttcttgctaaaaatatcagatatgaagcacaacaagagtatctctaacatgccatatccttataatgtctttgtaggtgtgtttgtgtgtgtgtgatgtttaatttcttagttaattttcttaccttctttgtaaaatgtgcttatgcttttatgtaattacttgaataggttattgcaatggatcaaacagtgttgtcaatggaactggtttgaacaactctattgcaggagaaatagcagagttctctgtatatttgaaagatagtttcttagatccttctcctgtagaagtagagaggcttcaagtagaaatcacaagggaaattgactcctacagcataatgccaaccatatctccaatacagattatcaatggtacataatagaaattcccttcttttcttatttgataagaaagttattgctttttcactttacaaaagtttccatctttgtttagttagtgcactagcaagggagccgagatttgattcgaatgaggcagaagttgctccttcaccatctgtgaaccttagaaatccagtaagaagtacattcatatatgcagttgttctgttgtgtattactattatcattcaacctcaaaagacatgaagagcaactgatattggcttctggtccagcctgctaggaattcaagtgttctagccacttctttcaacgtgacttacacgcccgacaagagtggtgtttatggaattcgagtatattgtggaaatatcatgcttaatggtggccattcatttaccaaggaagtaagtgcaggtactattttatcacttcctttgttagctctaatctcccatgttttcttcacttgcttagtaaagtttttgttggcaggcgaggttgatataacgctttcaagggttgtaaaatttgctcctaaggtaccaaagttgataaagaatgaagtagttgtggagctcatggattctttccataaccctgtcatgtcacaacaatcaaagctgaaactagaggttgctgcttcaatgaagaatgcctcaggttttttaagttgggatttttcggacaacaataatggttcatatacaagtcattatacagctaaggatattggcaattatcaaatatgtgcttcatttgatggcaaaactttcaacccttgtccttttgaggtcaatgtctatagcagtaagttaacattgccattcttaacttctggacttgatgcttttcaccacttattgagcaagtgccacaatgcaacattgcctatctaatgctgtcattgatcatcttgtaggcgagtattttccccgagcttatgatgatgcaatatctgtttgggaggatgaatcgacagcttttgatgctttaggaaatgactactttgctggtgacaatgcaactatccaagagttttcacaagtaagtttccattatgttcttctcttatatgctgtggttcaaccattaacagtgaaccattaactctgaaattgtcagccaagccatggtacacttctccaatatggaaggcttctccggtacacgcctcagaaagactactatggaaatgattcttttgtgtacacaatatcagatttaaatggtaatcttgcaactgcttcagtaaacatatctgttctcacaatcccaccccagtttatttctttcccaagtcaattacaagcaaccgaagatgagataagtcccaaattcgggtaagtcacctttcatctctagagactataccattagttttccactatagtttatggtgtgtaatagtatagttctggattatgtgtagtggtttctctggatttgagctaagatattcagatatgaatgagaaaatatctgttaatcttagtgcacaatatggaactattttcctatctccaatgctgatgcaattttggccaacaacaaagaccaaactttctctatacaaaggggatggagaagctaaggttttggtcttggaaggcactgtggaagtggtcaactttgctctcaagtcaattcagtattatgggtactatctatacatattttcaattcctaaagtgcttaaaagagttcatgttaaattgtgtttcagctatgtttttcttttctttcttgaaacaggaatgagaatttctatggcaatgatacagttcgaatctcgactagaaacagacatggagtgaataacttgaatattccagtgttcttagatcctatcaatgaccctccatttattcacatccctgaattcatcatattgaaaagtaatgaagatgagtcactggtatatgactcaaaaagagacaagtttgagtttttcattggagaccctgatattcaaagtttctctggtataaatgattaagattgaagatagtagtgtttgaagctttaaacatgataaacatcatttgaattaatgtataactagctcttggtggtttcttcaggctataaatcccaattcatggtcttattttctgttgaagttaataatggatttttagtcactagtctaccagctgagctgatcaacacaactgaacttaagaccatgaatagttatatgtggcagcctcttcagacatatgtcagtatctcaaaacactttaaagtcaaggctaatggaatcagattccggggaacagttaatgactgcaacaatgttatgaaacaactttactataatgtaaactatcatcatcttcttttgctattgtaccaagttaaatatatataagctacattagtattaactcaatttttctttttttgggtttgttttgtttttggtgtagggtggataccatggggcagttttatcagtgacagtaaatgacatgggaaattatgggtgttacccagattgtactgaaaatgcttcagtgcctttatacacagaggctaatgttaatcttataagaagaaggccaatgagttcatttgtatctcatggtgagtagggatttcaaataaatttgctgtgtttgtgatccaattctaatttcccagcagctagctcgcaatgccacattttgtagcgaaaacaaatatggcatcgcgagagctcgggttggccaattaagcattggaagaggactagatttcttactttgagttaatgaatgcagctttggggtcagcattggtgattgagtccatagtggtgcttactcttggagttgtcgttttatctttcacatgcaaatgtgcctttgctttggttaaggaaagaagtaacaatggaatcaacaaaactcctgtggtttcactgaaagcaagtgtaagtgttttcttttttgtacgacaaatcaattaatgtcgtttaataatttcaagaccgtttgattgatgttgttctcattcattcttgtacagtgaaaaacaacttggaatttcaacagtcaacacactaagaaatctcctctatcataagtttttaatcactttttttagtaaattctcattactgcatatttatcaatttatattggcttaggttggatatgtaatgtaatgaggcaattaattgtactattgggtaatattttaagtgtagtgcccattcattgccaagaaaatcagttgaaactgaaactcaaattggcttgagttgaatgtaaaaagcagaatttggaagtactataccaaatgactacaagagagatgccacatggatacgatttaaaacaatatactcagtgaatggaaatattatgatttttcatggttggactgaatagaaatattctgaaaaaatggaatgaatgaaccaaatagaaaatcaacatttttagtttcttttcttaatcaaacgtattagatgtaattggttt

SEQ ID NO: 42684 - DNA, 3072 bp, Cannabis sativa
gggttgaaagtatttaaaattttcaatcgagtgaggaggcggcccttatcaagccccctccttcccaatgagaatcctatcaaggaattgctggggtctagctaggacccgaaaacccaagctttgtgtgcttgggagagaaatttcaagccaaattgtatatttctcatggaaactaaggttaataaagatagaatgggcagagttgcaaaaaaaatcagatacaatgactttgcatgtatttcatcaacatgcttatttggtggtttttgttttatgtggaaatcagaagtgcatttacaagtagtgaagactgaaaataacatttttgaggcttcagtttgggatgttcaaaataagaagctcttgtggctttttagggtctacgctccaccaaatgaagaaggaaaggaaaacttttggaaagaattagaagtcagagtcaacaattgtggcctcacttggctcattataggggatctcaatgtcattcttaatctcgaagagaagagaggaggtactaatcctgcgataagagaatgtaaatggctatctgaatttgtttttgacacaagaggcattgatgtttgttttatgggaggaagattcacttggaaaaacaagagtccaaggtggtctaattagagaaagattggatagagttataacttcaaacgattgggttagagactatccaaaggggggagttattaattttccatttgagtttcataccatgcacctattttatttgactcttccttgattaagctcaaagggttcagaccttttagattatttgaggcttggactagagatgtatcatgcagagaggtatttgtgaaaacttggaaaaattataatcatagagttagtagaagtctaatttggaatatcgacaatacgaggaaattgcttcaaggatggaagaagaaaagttttggtaattgtaaggagaacattaaggtgctggaatcgcgcttacggtggatttagcagtaggatatttcttaagatttatgcgatgagaaagaagtaattcaagaaaaactcttagaggagtggaaaaggagagaaagtgtttggcgtcaaaaaccttgtgaggtttggctcgaattcctagcttcgtccatgcttccaccttaattggaagatgtcaaaatcttatatgggctcgtaaggacagtaatggttcaaggtgcgaggacatagataaagtctcaggtattatcaaccaatgcttttcaaatttatttaattctgaggtctctaatattcctatggaactaaagactttgtttgaaaagaagattgatgcagcagataatacaagtttttgtgcaatttcttctgatgaagagattcgtaatagtgtacatcttcttcatcctctaaaagccctgggccagatggcttttctggatgcttcttttggaatttttgggatattgtgggccctctatttgttcttctgtgaaagaattctttactttgggggagataaactagaagcttaactatacctatatttgtcttatccccaaagtatatttctcagagaaagtggatcagtttagacccattagtctttgttattttatttacaaggtaataacaaagattctgttcattagactcagtccccacatggaaaagctagtaactccccttcaatctagttttataccaggaaggtggatagaagagtcttctattctcactcaggagatagctcgcaagatcaagagaagaaaaggtaaaggaggccttatggccatcaagcttgatatgcataaagcttatggtaggatggaatgggcactgctgcatcgggttttgattacaaatggctttgatatgaagagttgcaaacacattatgtcttgtgtaacttttgtctcttattcagttctcctcaatggaagtcttttgaagaaaattgttcctagtaggggctgaggtaaggagatcctttctcttcttttttcttccttctttgtcaagaagtcttgtccagactcttatctagagtatacatgaattcctatttgtgttcattgagttctttgattcactcattaaagtttctcagagaagatgattcttacaacttctgttttgtgagcttaataaaatgagtggcttgaaacatgttatacaataatagaatctaagctttccaaaaggatcgaatattagttctcttattgtgttaattttgagagtgctaacacttggatccaatgtataattagattataaattgactatccacattaaattaatggtacaaaaggactcaagagataattagaagggtaaaatagtaattttgaccaactataattatgaactaataatttgagggcaaactacttatattgatcatatttaggttgagcatgaaatccaaaaacctgaaaaaaccattcaaactgacctactaaacaccgctagaaccgaaactggtagaatcgaaaaccaaaaaaactgctaatagttaaaactgccattgaatggtcaatttttttgggtaataaactgaccgaaaaaaccgaaatcaatagttgtacacataaatatttatattaatttattaagttgtttttttctttatgtattgtagttacttataatatataataatatataattattttattaatattaaagttaaaagaataagacaattagtttttgaacaattaatttgtaaagttatagttgtagaatgtaaaatattatgcttatagaataaattagatcatattttaaaaaaaataaaagttcagtttggaaggtttaaacgaccaaatcgaggttcaaaatagttggttttaagataggtactggattggtcgctcggtttttagattgcaccaatccataccaaaagctgaattctaaatttttatatagaaaaaaatcgaccaaaccaaccgatgcttagccctaattatatcaatggactataagtaagaattctataaatataattttatatcgtcaaagagtgcaaatctatatttatagtggagtaataatggaattaataaaccagattattctatt

SEQ ID NO: 42685 - DNA, 8319 bp, Cannabis sativa
tgcactgatgaatcatgggacttaagctttgatacatataatcacaattaccttccaatgtgttgacatcactatcattttaaattattatatgttctagatttaacagaaattgtatattaaaccataaacatgaataatacatgtaaacataaatgacttttaatcttctattgataacaaataataagattatattgaaataggttttattttggacataaaaattaaaatcccaacagtgtggtggagaaagtagaataaggtgaggtatacagacatgttaaaaggcaccaatagtgcctagcaccatccaaggtgtcatatcgctattgattcaattaagtatcaagtctcatatgatttaatataatattttttatgaaatatttcttactattcttaagacgtcacctcatagtagtgcctaatagcaatgccctgagctatctagaaagagtattgttagtaggcttcaatgatgtctagaaccactatgaggttgcgtcttacaaatggctaatgatatttcataataattattaaattaaattatgtagttttctcacaaatacatatatttttttggaaaacaacagtatatttcattactccaataaccaattaaaaacaaacatcaccttccaaagaaggcctgaaaaacaactttttaaaactataaatttacactatatttataatacagtataacattctaaatctcttgctgaaactttctttggccaaacactttgaattttattcttacatgtgactttagttctttgtacaatggtctttggattgtcaagggagcaaagccagattcttttatttctagctctacatagatgatacaccaatgcagcaaaaacagttgagaaaatatttttcctaaatttcgttgtcttcattcgcactaaaccagttagttgacaagagggagtctcccaatgcagccagtgtttgttctgttgtaaacaatcactagagaaggggcctttaaaaaaagagtgagcaattatttcatctcccactttgcataaagagcaacagatatcagatataacagtaaaccagtacaacctttctatggtctttaacctatcttaaattgcaagccaaaaatataaaactatgctttggagcattcaatcttccccacacttccttactccaattgacttgatcttgcgtaagacataaaggcttgtatccctcaataatcttataagtgaatactgctaagttcacaagagtccttaccttgtctttgattgctactatcttcctctaataccaaataccttgttgggggcattgtaatcccaccaatcttcttcttttatatacacattatgcactcatttaacccacaagttgtattttttagtagctattgcccaaacatacttaaacatagttgttttgttccattctgagacactcttaaaactaatacctcttgctactttaggtttacatatatgatcccaagtaattttccatgctccaatcatcatttgttgtcccacaagaaggccctacaaatggcttcaatttcttttagtatcttcttaggcagcaacataatttaactccaataagagtgtattgtaagaagaatcaaattgattgaaaccggactacccacaaaagagatattcctagtgctccaggatctaattctagtggtcattttatctaccaacaagctacactccttagcagagatcctcttagcacaaattgggatacctaaataggtgaaacgaacctcattccttctaaaacctaaagcatcaagtatgcgttgtacctcgtaattagtcatcacacaacagtatacttggatgcattacgctgtaattctaaggtctgtgaaagtagtttgaggccatgcaggagatagtaaatgctcttgtaatccccattgcaacacagtaacacatcatctacaaaaataagatggttcaacttcaattctttacacctgtcatgaaaaataaaatcaattttctagccaattcttttcatgattctagtgaagtacttcattctcaatacaaagattagaggtgacattggatccccttgtcgtaaccctcttttggcttcaaaataaccatgtacagatccattgatcatgagagaaatctgtggtgttttaatacatgccatgaccaattgtataaagtgaacagaaaattggaaaccatacaacatctcttctataaagctcaattcaatggtggaataagccttttgcaaatctagcttgatcatacaactagctttagtcgattttctcccatagtgacaaactatgtcctatcaaatcatgatattatatgctatgaagcactcttggacaaaaccagcttgattttgagtcaccaaactaggcaaaacatttttgagtctcgagcatatcaattcggtagttgctttgtaaatgacattgcagcaagtaatcagtttgtaatctttcactgtattggggcacttgattttgggaacaggtattagtacagtattatcgatctctctaagcagtttccctgactgtaagaaagatatcatagcttctccaacttcttctccaattaaatcccaattttcttggaagaaaaaactttcataaccatatggacctggtgctttaatcccaggtatgtcaaaaacactttcttaacctcttctttgtaatctatcaacaacattcttgcttgtaattctataactgtagggcctagatttacaattccagtcagcacattattcttttgatgtagattactatccaaaagttcttcgtagtattttaaaaaggcttcaataacttgtattggttcgtcaacccaatcccctgctgcattaacaatagacagaactctattatgccttcttctctcttggatgctaatatgaaataataatgaattatcatcaccatctctagcctagttcagctttgctttctggtgtaggaaggaagtgtaatccttatgcactttagcatacctattcttggcttccaactccaacacatgaatatcagagttaagtggatccaatccagcttgttttaacattcagctaagtattctcaagcctgcaaatctgcattttgtatatcagagtaaccttgagcattaatctccttagaaagagccttcaaatccttaagcttggtgactactcgatatttgaaaggcttcctgtcataaggaatattagtgtataaaataagaacaacatgggaatgatcaaacaacccctcattcataaaaatggctttagcatcagggtaaatattcaaccaagcttggttagcaagtacttgatctatcttggaataaatcttgtcctctccatgcggcttgttacaccaagtataaaaattcccactgaatttgatatcttcaagttgaaagtttgcaatacaatcaataaaattagtggaagatttataccttactcgattgccaatttgttcctcttttgccaaaatgtcattgaaatctctcattactatccagggttccataatggagatgtcttgaaattcttgccgaagcgttttcctaccatattcatcattgaaagcatatacataggtaatgaaaaaaaattcttattatcaacagttgaaactccaagatgaatcaattgactagagcacttgataacattcacattaaagctagaaagattctagcttactgcgatttgacctcccaaatgccacgcattattagaattgaaacaccacccagtaaacacattaaagtataaggctctaaatttatgagccttaactcttgtcttgagtagaccaactaaatcaactctatgagaagcaataaattgcttaactaactactgttgtcgatccctcaaaaattccagctagttattttatccattgggaagaggaggttctccccctcctcctatactcccaatttgaaacttattttccatcaacaattattgaccttgtatttccttgtttccaccttgcatagtattgtcaacaggttcttgtagaaccatgaatgtattagcaaccaatgtgttagctggaggatctttagttttaactttccacacttttgttgttggtttgaatccctcgggtcaattataccttccatttttgaggctggctcactcaaactgattttcactgtatcgttgacaacctattttggcttccttccttctttttgacgacaagaactagtagcatgacctattcccttatagtgatcacaaataattagcttccattaatatgtgacagccactgcagtatcaattccattctcatccttaaaccatataagacttggaaaatcttgcttcagacatactttaatgagaacttagggatagcttaacttatccctcgattttttaatggaatccaccatcacagggtttccaacttgaccaatgattttgaataaaacttgttccccctaatacttcaattcaaggtcatccaattgagtctaaattggaaccgtatgaatgtcctccttcttgaagttgacattcgggccctaagccttcgtaataactggtctctagttaaagaaaatatagctttctgaaatcacttgatccttgtcctcaacaaaataaaaacacaccaccatatgacaacattcctactttttcaatcttatccttccaaactcgacgcacaaagccatccaggatcaataaatgagggtttgcccccaaaacatagcacaatgtagaggagtttcaatagtccacttcatcttgaatatcttccattgttatcttaattttctaatttgaagtagaaccagcaaaattactatctaaatttcaaattatatttccagaacgcaagataggaggagtgctactcttaccttgagaaattgcagaggcagtgtgcctttgagcttctatgaatttcttagcctccatgaactgagtaaattccaatcgaatttcttccctctgaagatgttccttcatgactgctctaggagacgatccctatgtgtcaatctcagtttacaaattcccttcagcaagttcagcttcttattcctcatccgagaaattaattggctcaatttctagaacttcattcatggttttggtcttccttacataagtactcaaataaggctctttttttttccttttcttaagggaagatctaagtctactctgcttcattgtcctcgtctttgccatagcaccaactcaaagaactgagagagagctagagagagaaaatctattattacaaagatacaaatttatatttttttataaatacattgcagttttatatatgttttatttgttttacaaaatacatatttttttatgttttatttataattttacagcctatcttaaataaaaagtgtaagaaaacaacaagaaataaactataaaataatcaaaaaaagaatatcgaacagtttaatattttaactgaagaacataattttgtgaataaaaaaaatcaaaccgttaaaataaatttttttctatattaatgtatttttgtaatttcttttttaaaatttagtatattatataaaaatttcttaaactatataaaattcaatacttaattctgatataacaccttgtgttatacatgaaaagtagctttggacatttctcatatggtaatctatagtagatatctccatcctacaggtaggaatggcaaattggggctttttgcggatcaggtcagggccccgacccgatggggcagtcccgcctcaggacaatcgggtcgatatctgggtcttcaccctaccctgccccgtcccggttaggtttttttcaagttggggctgacccaattcggtaatgcattaacttaaaaaaagaagaaaattaaatttcagttcctaaattcttaaatccctaaattgaaaatttgaaatcatagtggacaagatatcttctccgattcaagccataaattcagacaaaaaggggatttataggagcaatcagagggggtttcaacagagtttgcgattttggattttttcggtatatgggatttttttaggttgagttgcacctcaaagaaattgatcccttctttcgattgcattgtctgagtagttccccctcgttgatctatatatcgcttcgcagcttagcacatgacccaaaaaactcgcttttcccgcttcattgccactcccatggaagcatccaagctaccatcatttttctttctttcttttttcactagccagacagcctaaattactttccaaggtgttaaaattgcctaaattctttttcttcagtttttttttaccttttctactctattataattgatcgaattggtcatcttgattcccactttaatttaaaattaattgtcatttcattttttggtttgggttctagatggaggctgtctactctaagcttcctattagtttgagcatttacaatgtcattctactctaccaatattttgcattcaacttggtacttttcaagttttaaacttttatttaagggtattttaaaaaaaaaaatcatttcaatatattgataagcttgatcattcttgtatgcatttatttatatatttatatatatttaaaaaaaaaattaaaaagactaattttttatataaaaagatcgaagactatattatttacaacgagatgtagaaatttggtagaagttttttatttggtagtttattaacctgaattttgtatcttggtactttttttccaagctttttgctcctgtttcatacaaattttttggtttcttgttttcttttctacataaattgtcttaattgtattttggtttcagtcttaagataaattgcatttggtcagagagggaacacaaaaaaaactactacaactcttctgtggtgacacttacatttgaggtatattttatataattactatattacataatttaataaaaaagtttgaatatctcatatattcatccatagagaagtaggttttgagactttgtgtgttgcggtgataatggaaagttgataacttgcctgttttagtcaagtaaaatctgtatgcttcggtgatataatgatgaaaacctgtgtattatctgattgtttatagttaaaattgacagatggttaggttaataaaataggaaaagtgctaactgatttttttaaatatatttatcatattttctaagtaacgttgtgcattgatagacatgagaatattgtgttattgtaggttaattacaaaataatgtctagtcaaataagttgtaattctaaggatgatgttgattttatgccatcaattactattgaagaaatacaatatgttagtaatacattagataaaaatcagaatacaaggccatagagaaaaataacttctcgtgcatgggatcattttacaaagcatgaaattgatggtaaaactaaaaaattttgcaatcactatgggcgtaagttagtgagagaaagttctcaggggactacgcatttaaatgctcacgtaaagaggtgtccagtcagaaaggcccaacttgacgctaatcctattacaagccctttagttccttttaattttgatcctgatttaggaatgatcaaattggctcaaatgatcgttaaacatgaatatttagtgtccatggttgagcagagcaggtttatggaatattcaagtactttgtgtcccatgtttcaaatggtgtcaaggaatacggttagttctgatatcataaaatgtataaaactaagaaagaaaaatacatgcaaagtttagaaaaaagtaggagcagaatagtcataaccagtgacatgtggactgcaaaacatcaaaagaggggatatatgactgtaacggcttattttattgatgattcttggaacttgcacagtcatattttgagttttaagtatgtcccatgttctcacgatgcttcagcactacttgaggcactaagatcttatcttaatgaattgaaagtagaagacaagatcagtacagtgactctcgataactatactacaaatgatgctatgattaagcatttgaaaggacaatttgagcctgacagttttattttgaagagaaagttgttacatgtgtgttgttgtgtacatatttaaatataattgtcaaggatgacttatctgtcaatagtgatagtgttgacaaaatttgaaatagtgttgcttattattggccaggacatgaaaaatttgaaaacacttcttgtcaacttagagtaccatacataaaaaaaaaaaaaaaa

SEQ ID NO: 42686 - DNA, 4107 bp, Cannabis sativa
  modified_base (3591)..(3594): a, c, t, g, unknown or other
aaagaagcgttgagttggattgcgactcatccctgggatagtgtagtgttagaaacggatagtctggtatgtgcccaagcagttcaaagtaaagtctttatggcctcccaacttggtcttatcgttcaagctgttaggaatttgcttttgtttttatcttttgttgagttatgttttgttaaacgatatgcaaacaagttggctcattgtttggcaatagactccttgtttctctacaggttgtgtgcttcagttggaggattgttcctcttaagtacgttctattattttgagtgagtttatttaataaattttctgattaattcaaaaaaataatgtgtgatgctttaaataattaggatataatattactaaataaaaaaaaattataattttttcgagtatgaaaaatggagacattcctatcagtagaaaaaagtacatgcctgtattttgtatatattgaccaaagttttaatatttttttttctacactgaggttttttattattatttttagaaaaaatttgttattattataacttagaatgtcatttataacaacagaaaaaatgataatagaagaaatattttctaatcaaatacaatcattatttaacattaaatttatcgtaaaaaaaatatttgtgcttatattataatcttattagatttattttattttatgagatttttttacaattttaatttataattatcaaattataagatatatatttaatttttgtaattgtagtactatttatttgtttaccctaagacaataagtgggtacgttcttgtcatgccatctcccgtgttgcgaacggtgtggcccatgcactagcaaagtctgttactagttcgcttagggttcagttgtggacagatgcttgtcctaaatttattagtgctcattttctttaattgaatacatgtttttcttcaaaaaaaaaaaaaaaattaaataaataagtgggtacgtatgtccctggtcataattattacattcacaaatttttattttattttattaaaataagagaaaagaaaagaaaaaagttaattaggaaagaaatataataaagtgcactgcaaacttggacttaaattaattacaagaaaaacaatatttcctttattaattttttcatgaaaatatgatcttcaggaaactacagttatggattccacgtccaaaaagaacaactttctttctttgtgaccaccaatgaccaatcgaataatatcttaatttaataattaattaaaagtttatttctttaattctctttttctctttttttagctttctaataataataataataataaaataataattaatgacaaatattcatataagaagaatcgattgaaagttaattaatcgagaaattaacaaattgttttacaataataataataatacattgcacaaataattttactagctttacacaattaaactattataactagtaaaaaaataatgatatgaattggctagctttgcatgttgattaattttctctctctctaaaacaagaaaattttcttttacattatagcttgatgaggatgatgatgatgtggcaacgtacggttgagatcaatccttgatcgagggtaaatgaaattatagccgtccgatgaagaagtagtagtacaatatgtatatatttttttttgtttgttaaaagagattaattagaaaccaataataattaatgcaatgcaatttgttttttgaaatgaggatatagtactactactactacttactactctatatataatttgtggccaagaaattagaccccaagttaatctctctctaattttttttttcttaatatgaaagagtaattaattatatatatttatttatatatctatatacatgatgatttaaccaaatattattggcttaataaaatggtcttctcataaaaacttggaaggtcagcaaatacacaaacatgatccacaacaccaggctttgattatccattttagctgcctgtttcaataaaaataatattccatatatagtggaaaaaaatccaaataaggaaaaatcaaacaaaaaaaaaaacaatcagatcactgtctatataaaattcttcaaaaaaaaaattaaatattttattgatcttgtagtacattttattcactttagtctatttacacttttttttgttgttgttgttacatttttttcttataaaaattaaattaattaattaattttttaccttatgtgaagaagcagaagaggtgagagaaatagaagctgaagaaggtgttgatgacgtggcagtagttgtagtactagccaatgtagacaaaccaacgttataagccattgtcatatcgggttgaaacaacccataatttctctccgatgtgggaccaggtttcatgtcttcattaaacaaagcaaataagtaaacctcaagtctcatatttggtctcaatggagtcccttcattacccaattgtcttctcaaaaggtttctattaaacgtagctgcgttctcaaccgttgccccgagttcattcgggtcacctttcgagggccaacccgtttccgaaacccgaacttcgatgttactaaaccccattctcgccatagcaaatatgatcgcgtctacttgagcgtacaacatgttgtcgtaacgtaacttagtgtacgggtcgatcatacccgtatttggattgaatagaacgtagtctaacgagactcgggtcgggtctcctttgtaagcgaagtatgggtaggcattgatccaaaacggtgcgtttgttgattgaaggaacttgaggagttgtaaaattacggtgttgacctcggttttgaatgttcctgctgaaggtgggtaggaattttcgaggacagctaaggaacttggtgttgagacttttatatacgtgtcgagacctaattgggctaaagctgagtgaatgctgaccatagctgggacgaggtaggtaacgaaggaagatgaatcgtcgtctgtgaatacttcgtttcccactgcaattcccgtgatccgcgtcgcagggtagtatggctttatgtgtgtcgttacccattgaagcgcttgttgtgggtccattaattgaggtaacatttgattctctatggtcacgattatttcaacgttggaattagcgaatgcagttaggacacctggactcgtatcgtaaattcttgtttttgttactttgagagaagttaatagttccaacactttagccggtggtggtaaattattagccacttgaccataattaatccccaaagacataactaattaaacaaaaaaaaaaaattaattaacattaataataatcacaattaagagaaattaaataaaacccaaaatgtaaaataataaaaatgttacctgaaaagctaagagatagagcaataacaagaagaatatgaagaacaaaggtagtggcaattttgtaaataaaagttcccatctttaagaaattagagaaagagagaaaatttatggtagttgttgtgtttattgtgtttgtaccaaaaaagggtgattatatatatacatatatatnnnntatatatatatatgtatatataaggggaataagaaatttgaatgatgaatgcctttcttttcttgtgtggaaatattcttggtctctctgcttattaattagctagcttgccttggagaagaaggtgtttgttgtagtagtctttggctttggctcttgttaacctcttcactggtttttatatatatatgtatatgtatatgtgtatatatggggttttgtcaaattgggttgaagtggattcttttgtactggccttgtctctttccaacgctaagccaactctgttctatatagagcaaaattaaagtgtgaaaagactaaaatatccaaagctgctttcttcacataaaagtaaaggggtaatctcatttggttggttttagttttatgtgataaattaaagaaaaaaaaaaaaagaagcaatttggggatcctaaaattgagaaaaaggaaaaaaaaaatacagctttacatttatataatatgatttatatatagaaattataataa

SEQ ID NO: 42687 - DNA, 2744 bp, Cannabis sativa
tttgtgctcctaaatacatattatctactgcatatgatcgtcgacacacttgtggcgccttcttattttattttttaaactaaactttagggtgaaacggaggaaggtggagaaattagaaatcattaaggaaatttgtgggtcgactttgcaggaatctgaagaacaaaaaataggtaattttctttttccatgccagtctttgattcattgcacgtgttttatcatttgtggcactcatgataattttattctgcttcgtctatagatgggcaataactctttgtgtataattaactgttcacatagaatttatttattagttttaaatttttttatgcacaaacctgtgttactttccccagaggattcagcaaagatagatgcatgcacacatcctggttcttttggaaatatgtgtattctttgtggtcagaggttagaggaggagtctggtgtgacatttggttacattcacaaggtattctttccttgggatatctagtttgtgaaattaagagttttcaagctaaaagaatattgcaatagtgtcagttggtgggctacaaagttttgtggtaaaaatatatgattctttatgggcagggattaaggcttcaaaatgatgaaattgttcgattacgaagcacagacatgaagaacttaatacgccataaaaagctgtgtttggttcttgatcttgaccacacactgctaaattccactcaacttgtacatatgacatcagaggaggaatacttaagaacccaagcagctactcttcatggtatgaaattatcaataaactattttgcacccgacatattgagattttttagttgtctgtttttttatgcaaaagtatgtagttaaaattatttgttgaactcatgataatatgtgggctataaatctctttttctttgaatgcttagatgtctctgacgggagcatcttcatgttggagactatgcatatgatgacgaagttaagaccatacgttcggagttttttaagggaagcaaggaatatgtttgaattatatatatatacaatgggagaccggccttatgccttagcaatggccaagctgcttgatcctaaaaaagaatattttggcgatagaataatatcaagggatgatggcactgtgaagcatcaaaagggtcttgatgtggtgctaggtcaagaaagtgctgtcttgatccttgatgatacagaaaatgtaagtacatgaatggttgatgatgcaaagaatgtgagtcaataatatgtattttactcgttactttgcttatgttacatttgtttaactgttgcaggcttggacaaagcacaaagataatttaatacttatggaaagatatcatttcttcagatcaagctgccagcaatttggtttcaattgtaagtccctctctgagttgaagagtgatgaaagtgaggtcgaaggagctcttgcgacagttctcaatgtacttaaacaagtgcacagtatgtttttcgatgtatgttccccatcttctggttgcttatggaataagttgtgattgcctattatcttttatttattgatggaaaatatttttgtaggaatcgggtggagatcctatcgacagagatgtgaggcaggtaaatggcattttcactttttgtatgctagttacccttgaccactttctcttttttatttattttcttagcctaggataggtaatatgtatagaaaattgtccctcactactaccacctgaaaatatctggtctgttcattttatgttattctgtcccagcttgaattgtacagatttttaagtccaatgtagagtttatgaactgatttctcataatttttggaacatgatcttctacaggtgctgaaaactcttcggaaggaaatcttgaagggatgtaaaattgtttttagccgagtttttcccaccaaatgtcaagctgagaatcatcatctctggaagatggcagagaatttgggtgctacttgtgtaacagaactcgatccatcagtgactcatgtggtctcgacagacgttggaacagagaagtctcgatgggctcagaaaaagaaaaagcttctggttcatccaaggtggattgaagcctcaaattatatgtggcaaaagcaatctgaagagcttttttctattaaccaagtgagaaaccaatgacattctttgattgctcctaactcagactagtttatatgaccctttttgagatcatactcttgcacatggtataagtaagttaacctctatcatcttattcaatcagtgctgaaaaaatccattttgactatagaaatatgagtatcatctcattttgtatatgtttggagctattacttattactaggtatagactttattttaggttgttttaactgctaagtactggaccatgtattgtaatgtaatatcttatatttcacatatacgagtcaaggttctttttagcttctaatttcattttgtttttatattttagacttgcaaaagcttttcattaggggcctgaaattgacctttggattgttctatactacaaacttgtatgtagattgcaagcctttcaagttcattaactttttgatgtggtgaacaaaattacttatcaattaacgatacagtaatttataattgactggggaacttttttggaccgggataattcataatctaattaaaagacatgttttgttaaatcatgagttgtaaattttttat

SEQ ID NO: 42688 - DNA, 3389 bp, Cannabis sativa
aagataaacgaaaaacaacttatcaaatctaaaatcgtcatctttaatagttaagcatgagaaataaagagcatagcaatagataatatcctcttttcaagatgagtagtaatattctaacaagacctctgaaaacaaattctagagtagtaatagtttaacaagatctcttaaaacaagttttagccactcgggtagtaattgttgaacgagatctttgaaaacaagttatactcgagtagtaatagtctaacaagacctttgaaaacaagttctagtctagtctactcgaatagtaatagtcaaacaagacctcttataaacaagttgtagtgctactccacttcttatgaaataacttcaactcgatttgattcaagtaacaaggcattagagatttcgaattggacaaataaacatctctgaaaacaagttatactagataagcaataatccactcgagtagtaataggtcctctgaaaacaagttctagtctagtctactcgagtagtaatagtcaaacaagacctcttacaagttctagttctactccacttcttatgaaataacttcaactcgatttaattcgagtaacaatgcattagagatttcgaattggaaaactaaacaagttctagtctagtccactcgaatagtaatagtcaaacaagacctcttataaacaagttctagttctactcaactccttatgaaataacttcaactcgatttgattcaattaacaatgcattagagatttcgaattggacaaacaaacatttcttcatctcttatcacaacaaaaccagattcctctgaaatatacagagatcttagtctaattcaacaaaacacccaagaagggtagctcaaacggtcaaccatgcggtttgatcctacaaggtctgaggttcaagtcctttattggtaccaccttcacatagcaattgctatgattctctagtcctcaaatatcctaggactagggtgagacattacaattttgaaaatgatcatctatatattaggatttgattatttgagtaacaattaagcataattctcactatagatcaattataattagcaaataaaggccaaaagaatattccttttaatcaccactaagttatcactttcaatttctttaacaaaaacatttggatctaatctcaaaaatcacaaatcaacaatcaaatcccttcactacccaataatccaaattcaattatcattataaaaaaccctcaaatctaaaaaagcaaatgggagttcaacttcagaatccaaagcacaaaaatttccacaaatctgggacttaaaacatcagcacaaagtcataaacagtcaaatcaagtcttgaattttgataattccacaaaaattcaagaatgcaaaaaaaaaacacaaaaaagaaacttagtaaagtgaaaaaaagagagtaaacaaaacagacccagatgagaaaatgcagagaagcataataaaaatcaaacctttcttgaccagcagtgtcccaaatctgagctttgattactttcccatcaacatttaaagttcttgtagcgaactcaaccccaatggtggacttagactcgagattgaactcgttcttggtgaaccttgagagtagattggatttaccaacacctgaatctccaatcagaacaaccttgaaaagataatcgtaatcatcatcagctctgtatccagccattgttgttgttaaagcttccttcttttccaactttctctgcacacagaaagagagagaagagagagagagtgagatttgcagaagagagagactgaagagagagagagaagggtttaaatatatttttggaatttgcagttgtggtctttttagttttcacttctcactttttgatccttagaaaacaagtaatcttctttcttccctattatgagtttggattaccgattacgagcagcaacactatttatgtgataattttaattaattggtagtttgttgaagttttataatgttttttttagctagtaagagttatttttcagatggaatagttaatgtgtttcgtaattgtataatttttgaatcttcaatgtctttctatttgaatttgaattagatttggtataaaagtattttgttttgcgtagaatggaaagttttgtcttttttaattaactgatggtttacaggtagtttcatcttctaatctttattatgttcggttatcttaatttatacgtatcttttgttaattttaatttatttgtacttttggttcgttgatatttatcaatggttaatttttcctaaattttccttatgaggaaaaattaaatttcttcctatttcaaagataatcataattgttattagcttcgtatccaaccaatatgtgtaagagagaaagagatttcaaatataatcgtaattgtcatctgtatctaattattgtgtgagagaaaaagtgagagaatagtataaatataattttaaaattgcagctttatatttaacactgacatgtaatttttttaaaaaagtatttagtagtttattgaagttttacaatagctttcaaggttgacaagtaattataaaatgttagaataacttgtaaaagctttattttttaggcgaaatatagttgatatgtttcgtaagtatataatttttaaattattatcgtcttactttgaacttgagttagatgcagtgtaatgatattttgttttgcatagatcaaagatttttgttcataatgttatttttctcggtcaaatgatagcttagatcttttaaatgctcacatctagtttaatcatctaatattgattatgttcggttatgttagttcatacttatgtttttcccgttcaagcttaagtacttttgatattaatatttttcaatggttagttttgcctgaatttccttacaaggaaaaactaaatttctttccattttaaagaagcgcgagtttgttaattttgacgtcggtttgtagttagagattttatgctatttttgtatttagaagtttatgacttgtgatcaactttattaattgatttatgtttatttttactctttagaaaatttataacatgctttcgatttcatcgatctaaaggtaacaagataatcacatcatattaaattaaaattaataatatgtaaaaatatatatattgagtttatatctattttgttagacaattgttcttttaaataaaatgaaatatttccattcaaataataataataatgtttcattttatgttaacttttgtttcattcatcattacaattgagttaatttgactcactttttttaaaaaatataatataatttatttaataaaataaataaaattatacaatggaatt

SEQ ID NO: 42689 - DNA, 6850 bp, Cannabis sativa
agtgtattagatactagtgatacttattttttaaaatttattaaaaatattaaacaatatcaaattttataatgatatgttgaaacaggatactaaaaattgagacaaatataccataatatatttttttccaaatataaacttagtggtgatggtctaatgaatttggctcaatactattagttgagtccgtgacctttgaatattcttttgctcccaaactcacactctcacacatgcatgtcaaaacaaaaagataactacattccataccattttattaactacaaaaaaacagtataaacagacaatttgggtctaaacttctttcatcttcctttgctttctcaccattaataaagaagccttaccgccttttaataaaatcctgacctctaatacaaattaaatatatatttttatcaaataaaaaaaattaattttgttttgttcaaaaaaaaaaaaggaaaaaaaaaacagataatggaaaatgcaatagcgtacgtggcagtggctaaaatgacatctgtgagccacaccttcctttcagtagtggcaaaaggggcagtttcggaagaccagcacaatttttgagtcaactcgtccgagcccacatatagaaactaaactagacttgaataaatttggaagaaaagaaagtaaagactaaagaaacaaccactcggtggcattgacgttataatgagagtctatcaggggtattttagtaattttagacagcacaatacaccgttcattttcttttactttgtcttggcgtggagttgtagagagaagaagaagaagaagagagactctgtattttaagagcagagaaaaccgaaactgtgagcgataataaaatatagagagagaaaacaaaaaaaatagttagagatttcagagttttctctctcttattatctctgtagttaacctctaaacagtccaaattttcactcacaagaagaagaagaagaggagaagagagtctcgttaccagaaagcaatgcctgcaattcccattacccaatgtcccttcttctcttcacggattttgacgtttcttctcacgcattaacatatataaatatatttttatacactgaaaaacttgaacgagaaaaagacgacctttcatgttaaggtgagaatctcattttcatttacgagttttttttttctgcattgggagtttgtcgctttgggttttctaaatttggggttattttcgcctgacatgaagattccggcggagaaacagaggtttccggtggtttcagttgtgatttaaatgattggtttgtattggatattgaagtgaaaagtgaaaagagaaaagagaatagacatattttcttgctattgaaatggtaaaagcaaacaatgtgtttatttattcatttcttcttttcttttcttttcttttttccggcgttgaaaaagttcagtcaagaagcgtaaaggagaatattggagatttagttatctaattttagtattattattttttcttcttttgttgcagctgagttatgctttatggagtattacctgtgtcaaagtcgagatcttgaatcctaatgcagtttccggaagaaaaatctgatgacagagtgtttgatccgcttgaaacaatgaacaaatttatgggttttgaccgaatttgctaattcataatcagagaatgcagatttgggctgaattgtgaataaaacaaacttaaagtaagctgagtttttctgtcgatttagaggcgaactacaatggcgacgtgggaacattttggggagattgcgaatgtagcccaactggccggcttcgatgccgtccggttgattgccatgatcgtcaaagctgcgagcacagctcgaatgcacaagaagaattgcaggcagtttgctcagcatattaagttgattggtaacttgcttgaacagctcaagatctcggagctgaagaggtacccagaaacaagggaacccttagaacagcttgaggatgctctcagaaggtcttacattttggtcaatagctgtcaggaccggagctacctttatttgctcgctatgggttggaacattgtttatcagttcaggaaggctcagaacgaaatcgatagatacttgcgccttgttcctctaattaccctcgttgataatgctcgagtgagggtattgattcttattcctcatcttgatttattattattattattattattgattattattttattatgtattaatactattctgggttatttctttagtcttttttttttttttgttatattatgggtatgaaagaagctttgttgaaagatcatcttcttgatgtcagtcgaaaaaagggaaatctttaaactaaaaaaaaaaacccacgagtcggaatctcaaacaaacttgggtaatttacgatttgggttcttgctggaagtggaatctactcaatcctttagttggaatgtttattctaactattgaagtgataaagacagttacttttaatttctggacctgtaatctactccagagtctagactatagtttgaatacgaaacatgcaattgacaaagatgtctcatttgtggtgatggatctggcattttgttctcttgttagtagaacctaggagttctctggtttagttggtgtgaactagaattgaatttgaattaacatcttttgttgaccgatatgagttagaataacccagattgggcactagacggatttgtagtttctggcttgtaggaacatatatgcgtttagggtgatcaatgatatgagctgagggtagtcagctccattgtgtggcacatagtgcattggggatttttctcagaatgattagccattcactagttggattctcattctttctacatgattatccttgcccttttgttttggttactactcaaggtaagtaaaccttcattcatgcagtaataggtagcctgtagccagcaaaagtaaggattattcatcgaagtttcgaggctttgtttttccagataattatttccaattactgttgttgatggtactctaatttaacttatggtcagtttcatcaaactactattctttttggtatgcaactatgttgctaaccaggggcagctgtatccactcttgctctgcctataaaaaatggtcataatttcaattttttattcgttgtgcaaatgataacaaataattgatgttgtaaatgatttgattcccttggttgtccatgttatagataatagtttaacttgatttaaattattgtctcatgtctgcaggagagacttgaatacattgagagagatcaatgtgaatacacattggatgatgaagacagaaagatacaggatgtaattctgcaaccagatcccttggcaaataaccctgccgtgttaaagaaaactctttcttgctcctaccctaacttaccttttaaagaagcactgaagaaagaaaacgaaaagcttcaacttgaactacagaggtcacaagcaaactatgatgtgaatcaatgtgaagtgattcagcgtttgataaacgttacagaaactgttgctgcacattctcatccagagaagagttcacctgaaaaaagtcacaaaaaaatagagcggaattattcagatgccgatagtgagaaggaagaaaactaccgcgttacttccaggttaatattattttcactttgtataccatgcagtcatatcaatttcatatatcaaagagtaatttgatgacttgaaaatgtacttacctgcagaaacacttcttctgtttcatctggacatgatcttttgtcaactagaggctcatcgcgacatgaagaatggcatactgatctgcttgggtgttgtgcagaaccttctctgtgtatgtcttctttctgtaattgtgttgatgcattaggttgattagatatttctatatactggcatttgcttatgtttggcaatagatatctattcggtgcaataaacagattagatatttccaaaacttttccttttgcttttatttggtaataaatatcttgtttttctcatctgatgcctatgtgaatcgccttgtcactttcagctatgagggacctgattatttgtttttctgttcttccatatcttttattatgttctatcaacatgcccaaactgcccagttttgatagcgatttgtgcgtaaaatccatcttgcaggttttaagaccttcttttacccttgtggagctttgtcaaagattgctacagtagcaacaaacaggcacatgtgtaagttacttcaaacctgtgttaacacttggtataatgactgacgtttcttaataataacacttttattgcctgaatagcagtttaaatttagtaaatttgttggtatgggttttgtgcaactcctcttgctgatatggcattgcaagaaattttagttatttgaatgttgtgctaagattttcctattttacaattgtggccatttgctaaaattattaaatagacattaagaggcagttgaatagctgttgtagattgttaagcgaaggtgaaataatataaaagaaccgatcagaagttcataagttgtttggtggcatgggactaattgagctatttgtaaataatcatttcttcaagttgagtttgaattgttaaggatgattgtgtataaagttcagcatgattatgaaggtttcaatttgccaaagatttgcactcaattgtagaatgttgtttgatttgtggtgaccagtttagagaatcatgctatttatcattgatggcttttgaaaatagtgtttggtatttatatatttctaatattttagtatttgtatttgaacaagaagccttgagattgcttattggttgtattttggtcttatgtagtactcttgatttttcctttttaattttgtactattagaagcttatgtttttataatgcaagaacttctctgtcatgatgatcacagcttcggcagaagcatgtaacgagttgatggcatattcgttgattttgtcttgctgttgctatacttgctgcattagaaggaagcttcgcaaaacattgaatatcacggtatgcttctgatccccctaattttttgtgatcatatctcaaagtgctgtagaaactcacgacggtcatgatcttttcattacttctttggcagggaggtttcatcgacgatttcctttcacatttcatgtgttgctgctgtgctcttgttcaagaattgcgagaagtagagatgcgtggtgtttatggtatgaactctcataaaagcattgcatagcatatgtttgtgtgttgtttgagatttcaaaatgttaatataacaaataaccctttgcaggtcctgagaaaacaaaaaccagccctcccccatcacaatacatggaatcttaagtaatagactcaaaaaagtgctattcagctattgtgatatacatatacctcaaagccatatatatatacacgtaaatggctagttgccacttttttatgtcaaacttgtaatgtgattttcattttcatcaatttcactacctcagatgtaaagtagcttctgtgaagttcttagtttgagaacatggtgtattatattatagacatattttttaatgatatagtgttgtttgagttaatcccaagtgtgtatgtgtgtgtgtttttttttcctctttggtatgtacattaatcattggcttctaattgagatagaatgatcaatcccaataaacaaagaatgattctgggttcttatatcgcttactttatggaagagaaattctcctattgactcctaatttctcaattgtattataagctactgattatgatgtagaaggaaaaaaaacacttcaaaattataatagcagcaaaataaagtattttagtggaacacagccttgcacgattgcatcttttgaattgagaactttctcaagtcctagtcttatgacttagtgcctaaagcatatggtggcaacaatcacatgctcatcattactcttgttaatgcttttttttttctttttcaaaatgtggataactagtcaactgaatataataactttaagttaagataaaccatatatgtaatgttggagacaatttacattcaacatttgcatgtgacttgcttcttgagatgtttgtttttatgttattgccaaatcattaaataattatgattttgaaacaaaaattattaagattgttgaacaagatattgttgacagatatatagtacttaaaaaaaaaaggaagaattttgataagattacttttctctcaaagatacacgattcctcaccaaattctcttgcgaaataaatataaattttggtcttatatttttaaagttggtggtggtttctctatttagttaaattacaatttaaatattgtgttttgcaaaataaaacataataatacagtgagtctatttataatcaaacatttttactctaattttaaaactttttcttctaatttttaataacaatttgatttctaatctaaatacaatttgaactaatccaattatacttaactaatcaaattcaatctaataacaaaaaattagatatctaattacaattaaattaaaaatttagtatatcatgtaaattttcctaactatattgtaaataatattttttgtatcataaattaaattatcataaataattataatttaaattaattatgtaaggaccgtcagacaccatctatttctccattggtatgatattattcgctttgggcctaagccctcacggatttatttttaggcaccttcccaaaatgcgtcattccaatggagatagtgt

SEQ ID NO: 42690 - DNA, 5432 bp, Cannabis sativa
tgggtattacagtaatggactgtttttctgtagatatttttggaaagggtcttcttagtggtcaattgtgtaatgtatttgtacgaatataagtacttttaccatacaaattccctataagtacgttttataatatgggcaaaagccagaactttttttgttgtttctaatgttataaagggattattgtatttagtattttttttttcttggattcattggttgctttagtgttctgtagagtcaagtttcaattaatgagaaagagggttttgcttatattcaagtttatcctttgtgttcaataatcttttcaggggttgacttttgtggtgaatgaagaagtttactttggcttgacctgaatttcattgttgcattagagaaaatctgctgccatgaatttccagcaggagaaaatagtgaggttagtttctatataattgccttagtttttgtgatgttcattattcaattttatacatattgtttatgcatattacagttggaaaatagaaaacctttctttcacttagaggatgataagattagagtttaagatcaggttgtcatgttacagatgcttggagagttctcttgaaagttgaattaagaattaaaacccccttttcatagatggaaaattgccttacatctatgctgttaatataccattttgatgctaatacctctcccctttaatcggttttcgccaatgacacacaaccatcacttgaccaccaccttaattttgtgaactgcagagttggtttgtcatcggtcgaattttcagatcatgtttatcttaagttagatagatagaggagatttgacttatttttgggtgtgtttccaggttccaggactggaatgcagagaagaataaagatgttctgtattctccaaatgatgaaatgaatccagggaaacttaaactgacattaaacacggtttcacacacgtttcaaagaggctttgaatctggatctgagaggcttaaaaggattaaaagatcactcaagtcttgttcatttgatagtgctatgtctaaaaactttggttctgagaagaagattcttgatccacttgggccattccttcagagatggaataagatatttgtgctgacctgtgtcattgccatttctctggatccattgtttttctatattccagtggttgatgatgccagaaaatgtttagacttggacaggaagctggagatcactgctagtgtgttgcggtctttcacagacatattttatataattcatattatctttcaattccgtactggatttattgctccgtcttctcgagtatttggaaggggtgttttagttgaagatgcttgtgctattgctaaaagatatctaatgtcatacttcttaatcgacattcttgctgtccttccactcccgcaggtagcataacctctgtattacatagcacgatttgtttagttaaagttttcattgtgtattagtttgtgatagaagcatcattgtcagcatttttgtttcgcctttcttatattttcaacactgccccgcttcatgccacctaacttattatgctgtaatattgaatttcgttatcagtggtgctctaattttcttcttatgtgtataggtggtgatcttgattgtcattccaaaattgaagggctcgacatcattgaatacaaagaacttgttgaaatttattgtcttttttcaatatttcccaaggatcattcgagtatatccattgtatacagaagttacaagaacttctggcatactaactgaaactgcatgggcaggagctgcgtttaatctcttgctttacatgcttgccagtcatgtaagtcggccttgcttgtttatatcatttttcgttgggtgttttgttgtttaaataattctggtagccttcttaacaacactctgcaccttctctacatgttaaggtattgagtgtgttgagaaggctattttgcaatctttttaactcaattttttctttaaacataggttatcttattgccaaagtggtgtcttatgaggtcaattttcaccgattacttatataatatataagtatttatacaatcattttcttcccctttttgttttattaatttttaaaaaataaattggattctggtcctctttttgaaactttttatacatgtcaacctttggttttgttatgcatctaaaattttagttcttaacttgcaccgaaaaaaagttttgtttgactagtactaaaagaaatagtgtccgaggctgagagctaaaaatacacaagattatgggcagagattattagctatagactgaggaaaaagctcggttgatatatttttgtatgtattttagtgcactatgtttgttatggaaattaatgaaagggaaattcttggtgattaagaatttggcctgtaagctttatttatctccaacataggtaccttaaaccttatgaaatgatttgtattatattctctcattattaagttcctgattgttgagtaattggctggtttaggtacttggagccttctggtacttggtttctatagaacgggaaactacatgctggcaagaggcctgtgagaggtttccgacatgcaaccgggactctttatattgtgatagtttccaaatgaataacatattcttaaatgcttcctgtccaatacaagatgataatagtgacttatttaattttggaatattccttgatgctcttaaatctggtgttgtcgagtcatctacggattttccacaaaagttcttttactgcttttggtggggccttcgaaatttgaggtgcgctaatttattttttaactatcccttttatgcataaattgctctttgtacctttttgctgactttgatataactttattattgtcacaagaaatggggatattactttgttttaacctttcctgcctacatattggaactctgttctgcattttactgtcacttttttaggtgcaccttattttgtttcgattgtcaatatacgatgactcatttttactttttatgttctttagttcacttggtcagaaccttcagactagtacctatgtctgggaaatttgctttgcagtcttcatttcgatcgcaggattagtactattttcatttcttattggaaatatgcaggttagtacacaccttgtttggtaacatgaatttttgttcaaggataattttgaatggtgtagagtttctttttggtaatatgatacaatgcccttattctaattcttgacacttttcatgtttctttgaaatagacatatttgcagtcaaccactacgagattggaggagatgagagtgaaaaggagagacgctgaacaatggatgtcccatcgcttgctccctgacactctgagagagcgaatcagacgttatgaacaatacaaatggcaagaaaccagaggtgttgatgaagagaatctaatttgtaatcttcctaaggatcttagaagggatataaagcgccatctctgcctggctttgctaatgagagtgagtacctcagctgttctatgcttattttctttacaatattttggttcggctcatatacatatcttaagaggtgaaactctgtttagatcatactcctactatttgtgtgagaatgagaaagaaaaggaaagtaaaggaaatcaaatcaaatgatctctttttaattggttgtgttgaagttgtgaaacccgattttgttggcttaggtgattgagtttgtgatttgatgttcaaattctagttgttttgctagatttgcttactttcttttatgaattgataaaaggtgccgatgtttgagaaaatggacgaacaactattggatgcaatgtgtgatcgactcaagccagtactatacacagaggacagctacattgttcgggagggagacccagttgatgaaatgctcttcataatgcggggtaggctgctgactgtgaccacgaatggtggaagaactggttttttcaattctgaatatctcaaggctggcgacttctgtggagaagaacttcttacatgggctttagatccccattcttcatcgaatctccctatctcgactagaactgtgcaagcattgacagaagttgaagcctttgcattaaaagccgatgatttgaagtttgtagcgtctcagttccggaggcttcacagtaagcagcttcgccacactttcaggttttactcacagcagtggaggacttgggcagcttgttttattcaagcagcatggcggcgatacagtaagaaaaagcttgaagagtctcttagggaagaggagaataggttgcaggatgcgttggccaaggccggggcgagctcacctagtttaggtgccaccatttatgcttcacgctttgctgcaaacgcactgcgtgccataaggcgtaatagtacacgtaaaacaaggatgcccgaaagaatgccaccgatgctgcttcagaagccagcggagccagattttacttctgaagaaaaataggtaatttttataaatacgtatgacttgccaatatgcttatttttgttgggtgaaatgtaaaatgtttctgatgattttaactcagatagaaaaaaaaaaagaggggaaaagataattagtgaagaatcatcaagttagtatcattcctttcctaaaagcagtagccttcctattttgttaagtgtaaaaggtctgtatattattgttgtatatgaatatatatatatatttttgttttatggtgattactgttctttgtcaaatgttgactaggaagtcttaggacgacttttatgaactttctttctcatgtttgggtcaaattaggagaaaaaaagaaaagaaaaaagagtgagaagatgtgttatcttttttctcaccaaagaaaactaaaagaagcacttatgaaaatgtatcatacaatttaatatcaatttgaaatagtgtaaaaatatgacacagtacacaatttaatataatatgaggtgaaaaaggtgaaatgaatgagtgaggtgaaaaatatacgatagtgaaattgagctgctgaggaaaagaagagattaaattgacagtatttcatgataaaaattaaaaagttaaagcgggagaaattttactgtggaaaaggagagtgactaacactatgtttggaagaggaaaatcaagagatgtaaaaattatttgtgaggaaattacaaattctatgggatattaaaaaatctgtccaaaaatatggttattttttttctttcaaaaagattttttgcgcttgtaacaaaatatgtaaattttacttatgatatagtaaactacttaaatttttttaaaaatttacatgtaattttaaatagcatattgtatatgatcataaaaaataatttaaactaaaaagctttcttaaat

SEQ ID NO: 42691 - DNA, 2248 bp, Cannabis sativa
aaccctgttttgtaatgaccgtgaggtctaactaattatgcatctatgatattaacgcctttacgccttttatcaaaaaaaaaaaaaggtcttgaatttatgtttcatattgtccattgtaatatataaacgtttaaataaataaaaaaaaaattaaaatctctaattttattttattttcttttgatgagtagttattataaataataattataataaaaaaggagtatataatgatgaaagttcataatagttaagtttcatattggagtattaaacttctgtcatcttttttacattatatttaatcataaaatatttatagtaattttgtaagttgcatttagattttaattaaataaatattgcacattttctgtcccagctattaaatacacacaaaataaaaaaaaaaaaattaaaatattttatttatttaatcaatatcatactcactaaagttagaaaaaaataataataataataattgaacaactacaaaacgagtggcattaatatattagtgattatttcattttagtatcttaacaaaaaaattatttaatataattcatgtatggtctattatgagtagttgtgtatgtttattaattggcttttttattcctaagacccaaattaataaatatataaaataaaaaagaaaataaagtacaacgaggagggacaattctatttattagaatcttttttagttgaataataatatttgattttaatcaattaataattatataattgtattatattaaacaattgaacatcatgatgaatatttttatgaaaataaacaagcattattaatttattacgagtaaaaattatggaggaaagaaagctttattttttttcttattaatcataacaaatggatttaatatattttattgtgttcataattattatatatattttagatttttttaaaaaaaattcaacaatttcacaaattgacttaattaatataaggtagaataatgactttgattgcatgtatgtcaatgtaaaaattaagtcattaatacccaacatgttatttttgacttttctttttcttgactatatattattttagataattttttataaacttattagacacaattaaatagggatcaattagatgttaattttgaattaataaatattttattctcattttttacataatttataatgttaaaaatataaaaatatagtttaaaataattaattacttcaatacggatataaaaaaatacttgtaaaattgaatgtttaaaacttatttttgttattctaaattattttaatttttttaaacataaattaaacaattataatatgcacaatatgcataattattacggtaaaaatagaaagcataaattttcccaataaaatatctataaacaataattggtttaataaatattttcttgtattcaccaaacttttactcccaactattttttgttttagactgttaaagtaaaaaacaatacatattaacaattctacattaaacattggcaattattaataataaatatatcttatttattgaccattaattagtcccattattatgcacacgatgacaagaatcacttatttaacatatagacattatatttaattatattataattcacaccccaaatcaaaatggcatccgtgataacaaacccaaaaaaccactgctcatatcgtgataataaaaaacttatagaccaaaactacaaaattcaaaacttaaaggacttaaatgtaaaaaaaaaatcaacaaataaatataattaaggttaataccatttttagatcaagcgttttgtaaaaattattgatttaacgtctattttgtaaaataataaattggatcatgtatattttaaaatagtataaaatagtgaattaaatttttaataacttgaagataatttttagtacgaataaatacagtaaatatataaaattatataataataattttaaatcaagttattattaatttttattttagtaaaagattagtccaattataatttatcatttaacaaaataaaaaattaaatggttaaattttattaaatatattattgaaaattattttgtattatatacttgtgttatctgattttttatttatttatttaattacacaaaaaaaaatatatatatatttgtgtttgtttctctctctatatttggtgtttagtgttgtttctctccttcttcaccactctcc

SEQ ID NO: 42692 - DNA, 3568 bp, Cannabis sativa
  modified_base (32)..(41): a, c, t, g, unknown or other
agagagagagggagatagagagagagagagannnnnnnnnngagagagagagagagaaatagtttgagaagaaagaaaagaaagaaggtcaagaaagcttactagattgttcttggagagattaccaggtcgagttgtgactgaaatcatctcaaaccattgtaatcgaaggttgatcatagtaaatttggctcgagcttctctaaggcaactcactaaggatgtaacctaatctttggggtaagccttgtaaaattgttgtgtttgttcgagtttgttcttcttttctctcatcttcttttcatccttactttgaattttgtgcttgatgatttaccattgatgttgaatgtgtgtatgagctttcgaagttgttgttcatctctgctaacattcaattcatagaacatattaacaatttggtaaagaaatttttggtacagtaaaatcaattcatttaagaaaacaaaacgtgtcacttgtgtgtgattcgttcagactagaaaaaggtcatgtttgaccttgaagattgacttgtgtgtgagtgttgtgtagggttattttaggtataatttcctacaattactataatattttttatatatatatatatttgaaaggagaagtattctcattaaaccaacatcaaaattacacaagcaacaccatcacaagcaatactgaagataaagcccaagagcaaattaccaattgttcacaattagtaataagtttatctttagtagacattttccttctacttaaataaccaaaatgagattttattccatgtttaatcatatcactagtatgctaaatagtaaatgaactaaaatataaaaatacatcaatttttgttaactcagataaagtagataccacaacagtagtaacaataattagcacctgactttgtaaattaggcccagaccagtagccaaatccaaaccctctcctatatgaatacacaatgggtcaagttgtaaaacccgcccatacatacatggaccttgcataacagcgcaatagagaaggggcaaagaaaaaaaaaagtggtcatggctctcaataaaatcattacaaacttgatattaaggagaagcaataaacaagtgtaacatttgaagtttatcttttgtcatcaactaagagttcaccatctgccaaaggataaacttatgatttggaaatcgagagtctactccacaacacacgagcataatctactgtctcaacatcaaggagagagttgtaaaatttgttaaccttattaaaccttccatttacagcaatagactgtatcatggattgagagatggtcaatataagcttgaagatttttcaataccaactggggtctccctagccatatgatgccaaaagtcttgccctttcaagtaaatacttcgcacccatttaacctaaagagcattaggtttagaagcaacatcctaaatgtatttactgaccattggtttattccattttgagccatctctaaagccaatccctccatattgtttcgggagacaaaatttatcccaagaaataaattgaagcttgcatccgttgtccttgataccccatacgaatttactataaagtttgtcaatctctttaacaatacttttaggatactaagcagaacagaataaataagttgagcccttctagcaaagaggtgtcgagtagccgaattatgtaagtgatgttggtccttagagataatagggccacgatcatatactttctatcttgtgggtcttaaatggacccccaagtactttaaaggaaaagaaccttcttcataacccacaatagttagaatgctctgtttaattttctaaccagtgcctccaaaatagatatgagatttctgtttgttggcatacaattattctaaaattctgcaaaacttagaaaggcatgctaaagaagttgaacacttagaaatgatcctttaaaaaatcacaagatgatcaacaaatcacaaactaacctactaataaatgttatacttatgtctatttgtgtttgttatacctatgattgtacttttttaagtaaagatataactacattatttataaagaattatgtatacatcatatttttcttggatattttgcttgtttgtattgcaaaactaaccaggttatatatacgtacttcttcaatttgataatttttttaattactaattaacttctaaatttaaaaaaaaaaaatggacataattatttttaaaagattaagaaaaatagtaaaaaagaaaaaagaagaagaatgatagggttgcagtataaggatcgatgtacagaatctctacaatgagtatcatctcggttagggcttcagtagatcatgcttgcgtggagctcacttcacaatgacgtcacggtgctacgtaacactgggaataatgtattgcttcgactaaagcaacctaatttgtataatattcaatttttaaatttaaataataaataataataataaaattttaatttgctcttttggctttaagttggagggtaggacattgcggtggcaaacaaacatcatttcattttgtctctgtttattataggttctcattacccccatattacacccatattttttgctttctctttttttttctactttttttcccctaactttggctcctattttctatttattcaaaatttaatattttttaaaaaaaaaaattgacacatgcatgcaatatggccactacgataattgtgtggttaataatttaagtaataatcatacaattttagtgatggagccgactgttatatcattattattattattattataaaagaattggagattttttttactttatcctaattgttttttttttactaatttaatataatttataaaactaaaataaataaaaattagagatggcttcagcccacccccattatattttcctatatcacaatgtagtaatagctgtataattatatacatattatggtggctttatctaactaatcagtacacataatccaaaagcctagctagaacgtggaggcctagcaagcatgtgatgatgatgtctcatataaacttattagtcactgatttgatagtatatatgatatccaaattcttaattaattcttatatgtatctttttctaatttgaaaatcagatgccgtaaaatagttagaaatttaaaattttgaggaatgagcaataaaattctctcctcgagctaactaaacatcggggtaagttaaaaaataccacttttattaattaattaatcaaatttatctttaattttatatttaattgaaacatactctgacataagagagtcacatggaaaatatcttaaagtgatagggacaaaattggtacaatatttaaaaaaaagaggtaaaaatgataaactttaaaaaagaatgtgagaataaaagagaacaatataagggccggcatctccaatagagaaactcaaatttggtgttaaattaacaccaaaaaactactatttcaacactaaatttttttttcaattccaaccacaacaccaaa

SEQ ID NO: 42693 - DNA, 1690 bp, Cannabis sativa
  modified_base (1611)..(1616): a, c, t, g, unknown or other
atatttatatatatttaaattagtgtaaaaaaataatattaatatttatatatttataaaattaaacctactaacaccattaaattaattaatagatcaatactcctatattcttaataattagccacattttatattaaagatataatgatatatatatactaaatattagaatatgtttgcttataattgttattggttaattattaatttaaataatcatgaaaacataaaatctaatctttaaaaacaataattgttgatacttttaaattaaatttaaatatttaaaaaataattaattaattatgttaccggtattaattttaactgctaaaaaaaataattaaaaaaaatggtcaaataatcacatttaaatcggtgttatcgtgtttatagttgcaatattttgtagatgtgaatgaggttttcgacgggaattattcaatattataaattattaccaatgatgctaaaatttgcttgatttttgagagagagagagtacatttgatttcttcagagatacattaactaatataacacatatttaaaactaccttttcttgttcccaatggagattccgggtcttaatgttttaaacgtaaaaggtaacattacacctttgatcagacattccattcttcgctggctgcactcaacgcttgagtaaaaacatcatattatagtactagaaatatgtacacgatcaaaatgggatctcatcacaacaaaatgtcatatgaaccatattgtcccaatgtcatattatttcaataataatgtttgtatattaaggtagttttccctaacaatgagattaattagacaacttcagttcctaacttaatttcaataatcagacaataactttgaattatatatatggcactttgttggaccaccactaccaattttattttttgatacattcttaagaggttttgtacaaataaagtagccatcacacttatattcagggctattcttaatttttccaatgtgaaatttgggttaataccctaatgctaattgatttttacaaatgaattaaatttttgtaagggctaaaatgcaaaatggtcctaaatctaacaattaagttaataaatgtctctttttataaaaaaattaacaaaatgtccctttagttaaaattttgatgatgaaattacaattataaccttagataattgaccctagttttctactgttgtgtctagaccatatgatttcttttttctctctcgacacagtatatcatgaaggaaaggaaaaaataaagtacattagtttagtttttttcgtatatttatattttctatggtatattatttttatgtgatatagaatacttgaatgaaaggaagaacgtacaaactaggaatggaatattagtttaattttctggtatatttaattttgcattgtcatatatctttattatgtattatgatatattaagaaataacttttaagagttgtatagtattttcaatttgtggtataatattttaaagtgtttggtatagttattttgcacaatcatatttcatttttatgttcaatagtatatgaaaaaaattaaaaggtagtatattagtttaagnnnnnngtatattattttaatgtcctatggtatataatgaacgaatgacgaaaattaaaaaaaatatagaatattagttt

SEQ ID NO: 42694 - DNA, 3262 bp, Cannabis sativa
attgtcacaaacgtatcgaaagtttggtgaaaatttgacccataaaaccagggaaaattttgagccttctgataagggtgtaatctcttcacttcagttacaataattcaatttcattcaaacaattatttctgggttcaatttttattttttggtggctgcccaagaacactgtaaggtattttctcatgattattctttataaatctgttttgctctttaaaaattcaatcttttcaattattttatgattattttgatgttgttatgaagaagtattttgcatgattttattgattgaattttgataatgaattttttgatcaccaagtgtttgatttttgataaagttgaaatttttatgttaatagagtaataatgttcttcttctttttctaatcattatgtttttattagattgaaaaggactggtcctaccctgataacaatggagtcccagaatcccatttcaggtcaagtgaaaccacactctgataaaattacatcagaattgccagtgtccacaccatccaataatgcaatctcagtctcaaagaaactaactttgatacctttgatctttctaatttactttgaggttgctggtggcccttatggtgaggagcctgctgttcaagcagccgggccccttttcgccatcctcggttttctcatattcccttttatctggagtgtccctgaagcactcatcactgctgaactctctactgctttccctggaaatggtggctttgtcatttgggctgagaaagcctttggtcctttctggggttccttaatggggacatggaagttccttagtggtgtcattaacatagctgcattccctgttctttgtgtcaattacttggagaagatcattccagctcttgaggcgggttggcctcggtatgtagctatcttggtattcactttgtgtctttcttttcttaactatactggcttgacaattgttggttatgctgctgtggtacttggtgttgtttcactttcaccatttgtgttgatgtctttgattgctattcctaagattaagcctcatagatggattagtttaggccaaaaaggagtgaaaagggattggaatttgtttttcaattgtttgttttggaacttgaatttttgggataatgtaagtactttagcaggagaagttgaaaaccctcaaaagaatttccctatggctcttttggtagctgtcattttcacttgcactgcctatttaatacctctaattgctgtgattggagctgttgatgttgatcaaagtaaatgggaaaccggttttcatgctcaggctgctgaaatcatagccggtaaatggctaaaaatatggcttgaattcggttctgttttatcagcaattggattatttgaagcacaactaagcagcagtgcataccaagttcttggcatggcaaacataggcattttgcctaagctatgtgccactcgttcgaagaagttcaacacaccattcgtgggcattgttgtctccactctaatcgctctcgccttatcctacatgaacttcaccgtcataatctcatcggcgaatttcttgtatgcattggggatgttgttggagtttgcttcctttgtttggctaagaagaaaaatgccaactttgaaaagaccttataaagtaccaatgaagatacctggtttgataatcatgtgtttggttccatcatcttttctgatatttgttatgattattgctaccaagactgtgtttttagtgagtggtgttatgactgcagctggaatgggatggttccttttgatgagattttgcaagtcaaagaagttacttaagtttagtgagaatgatcatgaattgaattaattagtacttatttattatggtattaattaaggctctttcttctctttgtatttttaatcttaactacttagtttaatttcaatagttgtttgtcatcaatttgtataaagcatttaggttcttgttagttattactatgtatgcaatttccattattgttttgtattgaaatgattgcaatgcaatatttaatctttcatagaataatcttaattggtgagcttcaaataaatcttatagtggggggtctatattatactatagctttactactaattatttgtgatttttgaacattcactattaatctttcacacatgggcccctcatatatttccaaaaattagatgaaattagatttaggatgagtttttattttcagttattcaggattacatgtaagtaaacacactataaaagtgaatagggtcagaatttttttgagatgatgcgctcataaaataaaattgaaatagttagacttcatggtcattacatattatggaaccatttattaatgatgtctaatcttaagcttctcattttaattctttgcttaaaagtagtattttcataaggaaaaaaaaatctattctcgataattattggtacaaaataatgttagggcatctccaacgctaacaacattggtagggcccattttaagttttataaatattaaattttcacactaatcaatcaaaaaaaaaaaaagtaaaattaaaaaatatatggacatcagtgttgaacaagagcaataatactcatattacccaaagttaataattttaagtgaaatgacttacatttctgacagtcacaagtatagcaactcccattagagttatattactttttattaaaacaatcatattttttttttaacaaaatttatgacacttttgaatgattgaatctaaaatagtaaatttgcatttgtataaaaccgagagaatgaaatgtgtagatatcttaattaattaattttgagtaattcattttgaaaccatgtgatcagaattttgatagatttttcttcaacaagaattttgaaagattagatgcacatgtttttattaataataattcaataacaaattgataatatatagtttttaactgaaaaaagatttgatatcccttatagggtcaataatatatattaatatattcctattatataataataatacaacttgttgtgacaaaataaataaataaataaattatagataatttcatattacacatgatctccactcacctttggtgagttgccattacacagatctatatctatactattatatgtattcatttattgggggttcttatatatgctaaccatgaataatatgacctcaaaattcatggtttcctatggcagaaagt

SEQ ID NO: 42695 - DNA, 2492 bp, Cannabis sativa
  modified_base (2125)..(2130): a, c, t, g, unknown or other
caagatagtaaattcctatcttaaaaattcctacaataattatttaatattttaaacaaataaatacttgatttttttttttttgactggaaaaataaatacttgatttaattacacttttatttgtattattattttattagttataataatataccgctaccaacttaaatttaagaacctacaaatttgaatgtataaaatttgaacattacttttttattttattttttataatcacaaataaatattatagcacttgcgtggaactgacttacactcatcattgcgccactaatcaagtttagagatatattcaaaccaattaggtagttgatggccaaaaacttgtttccactactcattataaacctacccattaataataacaaaatgcttcaaatgtttgatatattctcatacgatcaactgttatcatgttttatattgctttcaaaaaaatgttatgttttatattattttataaaaaaagaaaaaagaaaaaaactatagttaggttagaacttcataatggctaatgcttcatgattcatccatcatgtaccacttatgattacttattattacttgtattattatatggtaaagtgctctacacttgggaaatccacaaaaatgtattatcgatcattgcctttgctccttgaggaaacagatacataaaaagctagttttcaactttaaatttcactaaactagataaataataatactgtaattaatatacagtaaaaaaaaatattgttgtagtgatacatagctttattatatatgtctaaatgataccacaaaaaggctgcaatcaaagagaacatcatcttgaccaaagaaaaatggtatatttcggaatgatgagaaacgtagaaagaaatgtgaaagaaaagtttttcttttttttttaaataataataaaaaaaaaaggccatatagaagagaaaagaactctcgatgttgatttgtctttttctattaaatttaggattctcttttattaacttatccagcgtagctacctatatttcaactttattaaaagttgtttataaaagaaaaaagaaaattttatcaaaagttatatgaaattggattagaactctgaaaagggaataactgggggaacccacaactgttagtatgacgtctattcaaaaaaatttacaaagggttcaacttgaaaaaatggtctcaatcaaatctaataaattaaaaaaaaataaaattcaaaagtttttatggaaaattcaaaccctccaataaatatattaagaggggttcaatattaataatctaatccactcaaataacgccaataaacccaataaataaatttacatagtttttactaaaattatctttaatataatatataatttacgtttaataattaaagtattttactttaaaagtttgcattttatagtgtttaatttgaaatttagaatttataattaataattttgattgtatttgaatattgaagttaaaatttaaaatttatgagtatattttttttattctatttttttgaaaaatatttgtttaatactttaatgtttattcaatttatatttatttttttaacattaatttaaactataactattttaatcttcaaaggcttatactatatatttattttttttcgaatcaattatttgaataccaaaagctaacaataataataaaaagaaaaattaagatcagtttaaacaggctaacccaactaaaccgacaaaaatcattggacggattacttttttattttttattggacgaattacgattaaatagttgcaacctatttatattagctaggttgataaaaatacactataatctgaccaaaccaaccgatatacacccctactactcagtctctcacaattcattagtgaattttttataatttttattaaaattaaattaataatacttaatattaaattatagaactcacaaaagtaatatgcacctaggtaatgaatattttttagtaattctcttcaagaatagaatacactctcccccaactatgaacatttttttgagactaaattaatataattatctaactaaatgaaaaaaaaatatatctttatatatnnnnnntgcctatctaacggcaattcttggtttaacgtttttttatcttttattccgttaactttaacggagaccatcctttaataaatgacattcaaactatattgcgattctcttttttctctaacaaaactatattgttattttcaatcccaataattttccatcctacaactgtatctgcgattcatcatccccatttatagtctttttctgaatgttgaggtcctatctccattaccttcctctttctccagtctcgaccgactaactaaattcgaaatcccaaatcgcaccaccactgcccgctagaagaccgattctgaatcagaattaatggattatatcacttgcctccacatctgtcg

SEQ ID NO: 42696 - DNA, 7467 bp, Cannabis sativa
aaaaaattattaattttttttttacattgcattggaatagtctttcgtttcgatttaaaatggaatagtcattttactaaaatggttcagtttttttataatgcaaccaaacaatagaatagaatgaaaatcgattcattttcattccattccatttcattacctccaactaaattcaacctataaatgtttaaaacatttgcttgagccttgaaaagcataggaggatattttttgttgaaaaagatgatttatttaaagttttatgtgaaccatttatctttactcttatcaggtcgatgcatggggcacagatggtgaggttcttcaaatcataatgcctccagagcaaaaagttgctgagctagtttctgccagtatggagcgatataaaattcaactaggtactaaaacaactgctttgaggatctcatctgagaattgcaaatggttttatttaattttacacttccaataggtatttattgattgagaccacctagatattttacttacgcacaccggcatttatttatttcataagaagaagattctctcaaagaagaaaacaatgttggaaccatggatagggaaacaaaattataaactgctgtgaattgttcagctgagaagaagcaactgtaatccttttcaatattgttttaaaatatataatataaatatttcaataaaacattaattcaattcgtgattagggtaaacgtgattaatttggaacttggtgtttttgtcttttatgccactcagattctaatatttggctatgcctcttcctttatccttaaaaagatttatttacactttgtttaccacaaaattagggattagagcatcattggctttagttagttgttgtttgtacattatatgcatcattctctattggagaaaataagatattgcgtagcttgtagtaatggaaggaaaacaagctcataaaaagagaaccctcaaagattatagaacccaagctccttcatctgcttaaccttgtcttaaggacataagaagtttaaattattgaattccttttttcttttctcttattagcattcccagttctacatgttaactgtgaaacagcttacttaatgttttaatgtttcagtgtcatttaccatgacgagtaaatctaatctggatacattaatattgtcttaagctcttcagggagttggtaatcaagatgagttttaatatgttttgtgcttgccttttggcctttcaaactcaaaagagtgcgagtttccttgttggtctgtcttgtaataaaatagagcttcttatgcaaatttataacctaagaaatggcttataattctagaaagcattttattcttggaaggaagatttggcaagtgcaattagaaagtatatattggtgaaacagctacctcctttctaacaagactgttatgggttatatgcagaaaatgcaaagcaggttccggatgtggaaaatgttcctggacgcaaaggaatagaactctcaagtactcctattgaactgaaaggtggtgattgggttattcaagcagttccttggattggaggtagaataatatccatgatgaacattccctcaggtaacagattcggatattttgaaattcttgtttcttcttgttgtcttttatctgcactctgatggaggtactgtaacatggtgtcaatgaattattcaatggagatggtcatgtatttaatcaatccaatttttcactctacacgagaagaacattgtgcaattctcttaagtgttaccaaaagcaagaattacctgtattagaatcgtgaaatattaaactgattgcttagtttataattttattattttctttttggaaatattactatttagatttcagtatgaactccctatgttctccaaaattactgtatataccattacacaaaactgtgaaaaccatttatcatataggtaaaccaaccagaatcgcatgtatctttctttttctttttcattttttcccctaattgaggggaaaacatactataatggaaggaaagaaaaattaggattttgaacatgataacatctaaattattcaaattgttagtcagcttaactaatacatgactgaacttaaaaagaatggtagtttgggagctcaaaagaacttgaagtttgatttgactaatgaaaggaaaagtgatgattgcatataatgtttcttcttaaaaaaaatgatgacctttcataatgtttcaattcaccaagcagctttcatataccaattttcttgcagtatgaaatcctgaactttacgttttgttgtgtttcattcattatcatgtgttgcaggaatacagtggcttcatagtagggtcgaggttaatggatatgaagagtatagtggtcctgaataccactctgctggatggtctgaggaatataaagttattgagtgagtctctcttatgcatttatcagcaaataattattcaaaatatcatgtttgagtagatggaccagtcacctgcttcaagttttcaattattgcgtactactgtatgttttatttaaaaaaaaaaaccaaaaagcacaagtaaaaccttctcagaatctttgtaaagtgggtgaataacttgtgctataaaagaatatattttttgttatattatgtagtattccttgaaaggctagataattttcagggaaagagtaaaggtcgttgatacaccattgattaggacctgtactaggattcctaagaaaagcaattgtaatgctgaggtggaattaaatgaaagtgagtgaattgctggtgtgacagttagtgtcagtgaatgcgtgtaagtgtttatttaatttcagttgtgagtttgtttagtataaatagagatgctaattcatttgtatagttttatgattgattttgtgaaaatgtagtattcatactcaggggagagaccaagctgctcgaagagcctggaaccattgtgactattcttttgttacggaaataaaattacagagctctaattcttcaagattcagattgttcctttgtgtattctgaccgtactctgaatctttctgcctgcagacgagatcttgagcatgctggagagcaagaatctcttttgttagaaggagacattggtggtggattggttatgaaacggaaaatatatattccaaaagatgaacccgaagtgtttcgaatagattctagcattgttgcacaaaatgttggtgcaggttctggtggattttcgaggtttgcatcataaaatccttatgttccaatttgttttttcttcaattttatcttattgtatttctttagtttttgttgtgctaaacacttttctttaagcaaacggagattatatattttagttaaaagtggttgggtatcttctgaattaaaatctaatgaggcccaaaaggctactcgtatagtatatatactagtctatgaaccaaagactcacattacattcccaaataccagtcacacagtagcatgtacaaagagtatacctttaaatttttgttagtgaatgtccacctttgaggacatcaattcactctatctgcttcgtaagtttgtaaccataataaaatattgtaaggataactaaatatgcaagtaaaaaatctccctagccatgacttataaagatctagatttttcccactacagaagaaaatgtggttatgctattatggaagaaattgcatgtgcattctttcttctacaaaacagccatctttcctttgggtttgttttgttttgttttgtttattgtaatataagcatattcatcacccgtattttaatttgtagattggtttgcataagagtacatccaatgtttaccctcctgcacccatcagaatcttacgtctcatttacctccattgatggatcaaagcatgaaatttggcctgagtctggggagcagttttatgaaggggatcttctacctaatggtaaagttgctcattttcagtgtttgcttttgaagcaaaaaactttttatttaaataaattactccttttagcaatagaggaaaacatgaacatgatggctactacatttatatgttctgtcaaatctttcctgcgaacttccataaaattcaccagcattaatagctcaaatatgctagaaatgattggatattccatttaatttttgctttagatgattgagcttagtcaaacaattatagagttaattaaaagaaaaattgatttgttttctgaaataatataactagaggccatgcattttaggtgtgtatgatcaaattatggaatagaaacaggcagcatttcactttctaaggcatttgaaataccgattatttggtaatcatattggatgtctctacaccgtacataaaagtagcttttaaatatacaccattttcctattattcagattaaataaaaacaatttacatgaagagattaaagggtgttgttcttattctagtaggaatgcttattaccttatacaaacattgataattctcctgttgtttgttgaaattgatgtagtcccaatcttcaattcttttgtaccatgattacatctgtctttgacaattattttgtatatcttttctacttctgtagttgacatggtatcttcatgtataatttagttttattgtgtcatatcacaatatttatatctttactactttgataatttacatatatctattttaaacaatattgaaatgctctcttctttctcctctttctgagagacgtttcatgcattcgagggggttccatgctccttatggccatggaaagcagaaaccccacttgttttgggaagaaaaaaggtcatcgaaatcctctttaccactttgataattgacatatatccattttaaacaatattgaaatgccctcttctttctcctctttctgagagacatttccatgcatacgagggggttccatgccctttatggccatggaaagcagaaaccccacttgttttgggaagaaaaagggtcattacccctactgtcttggctggaaaaatatttctgatccttttgacgattggggactccataagtattggagttttcacactgaacataaggtgttcatgatcacactgagcagagatggcggttcaattagaatctatgaaagaaccaggctttgtggttacaaagtttctatcaccattgatgcagcagattggattattgacacactagaggaattgcagaagaaagaagggcaacaaataattagttttaaaagatcatccaggaacagctctgccatttgtttcttggaatgttttttaaatactaagtgagcttttctaaagctttcagaattgaggaacaataagatgaacttggttttcataccagaagaagaaaaagcgagggggtggtcagactttatacgatgtctcaacggggttctaaggagaaagtctaggaggaatcatgacttcattaggcagcaaaaagaagagaagattgtagggggagtcatgaaacaaaaatcatgggccaacgtagtcaaaaattgatgaaactagctccaaaaccaggacaacctttcgtgaattttttcaaggatgtttaagttgaatttagcctaaaaatagagaaaagttcagggccgatgtcattaatttctagactaaaattccagattagagaatagagaaaggggtctcagtcttgcaaaatacagaggagatcgagttagaggaggtacaaatgggattcagtgtaaacgagcaacagtggaagatttataaaaggaagagaaaaccagttagcacaaacagtgaagaagcaataatttcaatgggggctctctagatagatgaaatggaaaaaatgaagatccaagagaggaggaaattagagaattgctgtcagaaagtgaggctttggaggaagatttttgagagtgatcaggatttggaaagtgaagaatatgatattcttttatgtaatatcaatgaactgtggtttgagggagacgagacgatgttttgaggattgaaggataatggttgcatttcaaagaaagatatgatgagtaaagaagatggagaaacacaattggaggggtcttcgttttcatctcgggctagatagttgacactgtggccaggatgggaatgaaactaatctttgatgaagactttctttctttaaaggaaatgaaagagttggcagcagaaaagagtgtagggagttaggaaatttgacttaacatcaattatgagaagagtctcaagaaatcagggtaggttcaaaataatcaatgaaggtgctctcatggaatataagaagtagcggggacaaggaaaagaggagagctatcaaggcaacattatgcaagtctaacccggacaaagcaattctacgagaggtcaagaaggtagcggtagatagaagcttcattggaagtatttggaggtctgagttcaaagcttggattttactaccctctattggaagatccggtgttcttgatatgagatactaaaagtatatcgattttggactcattggtgggtgaattaaaatgagtttatggcccttgctcttacaaagcaagatcagaatttcgggatgagttggctgaacttagctcaatatgtggagtcttgtggtgtttttttttcttaaaaaaaaaaaaaaagagaaagggaccacttgtcttagattggccccccgcgttatgtattaaaagcctcacttgtggtggaggaatcctatggtaaacaaaagccgatacaagataggaaatagtaaaatcacaaaaccaaagaaactagaaaattaggaggcgactttaacattgttagagaagtccaagagaagctaaacaataacttaaagtacaaaaatcattaagattttgattaacttattcgggaaatgtgcctaattgatccttaaataaacaacgagaaattcacttggtcaaactttagagtgaaacccatatgcagcaaattgggtagattcttattcactaacaaatggaacatggcttatccatttgtagggcaggagatgcttgtcaggttagtatctgatcatagtccaattactcttgattccaacccaccaaaatgggggccaagtcctttcggatttgatagccaatggttggaacataattcattctccaagtatttcgagtagtggtggaaagaggcaacgggttcaggttgggctagtattaaatatatgagcaaactgaagaagataaaacacaatatccaggagtggagtaagaagacctttggaaacaatctggtgattaaggttgcattaggaaaacgtttgggggtcttggcgattaaggtcgctattgcaaggaagcaatggttggaatctgttagaatattagctgtatattaggtgttaaagaattcgggtaacttgtatttagtagtttc

SEQ ID NO: 42697 - DNA, 6847 bp, Cannabis sativa
ataacttaaaattttataagatctctatgaattattccaatgaatgaatagtggagcatctaatatatatataacaaatttccttaataaattgtacaattaatcaaatcaatggatgctatctcctcttgatttctttattctagcgattaatgttttaatggtttcgagaaagggctttgtcaaattgactggagtgatacgtgatactgcgagtgtggttaaactggacctgactcttgcgcatcaatttagtttcattatctctattaattctcttatgataattggttggattaaaaagttttacataaattttattttcaatccattttattagatattaatttattattagctgctattaatggtggttcttgcatcaacatcccacgatcaagccacacattaataacctttgttactagtttaggagagtgtatatagacaggtgtttgtccacgatttttgagttcttttatatcactaaatttatcttaataagttatatttttttaaaaaaaaattgtacaattaatcaaatcgtaccaataacttaagctaattcctctatatttttaatttggatggctatatttttaagagactgtaaagcgtacattaaaaagaaaaagaaaaaaaccaataatcgtggttatatttgtgaaacattgtatgcatttagttccttttgaaacaatttataatggaaatttggtccccccaacccccacttaatttttttcttctcttcaattaaccccaaccgtataaatagaatttgattctgctgtactttattattatctataataattattaaggtctaatcttaaattaggagcccttaatttcagctagtgtgggtgacaaagtaaacaaaaaattatttgattaagttatctttaaaaagattattgtgattagaatctgaatattgcttggtgttgaaaatcacttgttaaaaaacgaaccgattcgcatgaaaaataatatcaaataaagtattgttcttgtttacgataattcctagaatttaggatcatgattatagataccaattttataggcttcgaatcttatcatgaagtttgcacattactaatttccaatatatatttatataattttgatatcaacaacttaattgactcattcagttggatgaagactgacagaacaaggaaattcaaattgagagacttttatttagtcattattgaatactgttgtgttggaattatgaattagcaaaattaaaattaggctatgcattcaattaatagcttttttttttttcttagtcaaatataacattatgtttggtaccaggcataaattttggatggatagtaacagataagataataatgagggagaggagactccttcaaaattttgaaattcctttatttgaaaaaaaaaatcaaataaaacaaataaataatattaattaattatgtatattttaaataataaagttaataaatatacagtttaaaaatacagtaattttgatcatgatatcatctatatttttttctatcttcttaccgctttatttggttttaccaaacaaagcctaatatttgaaatggttgtgttgtttgattgggcaatgggcagagcatttttatgagtagtggaaagaaccctggtaaccaatagcgtagagccacgtaaactttggaatgagtcatgtgattggatcgtggaagagacgcgccttaattgggtgatccaatgaatggaacagatggggcttatgttctcatactctatctcatcatcagaaatgaaatgtttccatcttcttctctcaaatcccatcaaacagcacaagagtctctctacagtcacggctctgaagtcaatgctttctctctcctcaatattattataataaaacaaaaatataaaatattacactcactcacacacaaccctaaacatgttctattcttcctaccattgttaataaatagcctaattaataatttttgtttgtgaattttgatatatattaaattatattttttaaattttttttgtggttaaaaatagattgttaaatttaagaatttttgtgtaatatcattcaattttactgtttagtgattgtttatgtactaaatcatcctcatctattatggacttcaaactttgatacgtcaaaaaattttggaagaaaaattactaattagtctaataaataatattattattaatttaatttaattttacattctacttattttatattgataaaaataataaaaaatcgttaactaattataaaatattacgttatagtagcgataaacattttaatacctcataataatactctggctacttctataagtgctaaatattcaatatttgattgattatacgatggtgatgcccaaaaaaaacaatgtctaataagtctaatgcattgtgtcttttaaaattattattattatttttaaagaaaaaagaaaaatatttatggttaaaaaacaagatgagatgacctatgaggatctaactaatgagttttgaaattcctctcaaatgaataaaataaaaagcccaaaaaattaagttgaatacttatttagaaagaaaaaataaaaacctaaaaaaggagagagaacctaaaactatgtttatatatataatgtgtgttgatagcgagagaaagagttgcacaacaatacaaaaaagcaacccttccttccttccccctttccttttctcccatcaagccttgtttttcactctttgtttgtttacattacaaatcaccttctctttctttttctctctttctttttttttttttgctctttagagaaagaaagaaagtagaagtggtggtggaggaggtgggggttaattttgtatccaatatccatctctgttaatcatccatggagtacatctcaaaatcatctcatgagagaccagagaacccatcatcatcatctccttcaaactcacccaccactactgccaccaacaatggcagtattaacagtttaagcagcagcagcaacgtcaacaacaatggagttcaaactccggtttcaaagcctaccactcccagatctgatcccaacaacccttacccaacaacgtttgttcaagctgatacctctaacttcaaacaagtggttcaaatgcttacaggttccactgagacaattaaacaaacaccttctaggcaaccccaggagcagaggaatttcaacataccaccaaagaaacaaggcttcaaactctacgaaaggaggaattgcaacaacaacaacaacaacagtaataatctcaaaaatagccttatgatcaacacccttttgccgaattttgctgccaataactccggtttttctccgagaaagcctgagatcttgtccccaagtctacttgatttcccatccttgactctcagtccggtcacgccgttaaacgacgatgccttcaacaagtctatgtcgccgtcgccgttgttaacgatgagtaattctccatcgttggaggaagaaagagcgattgccgagaagggtttttacttgcatccttcacccagagacccagccgagccccctcagcttttgcccttgtttccggtcacttcgcccagagtttctggctccgccgcagcttcgtcttgaggaagatttttattaatggaagaataattaggctatggaaggaaaaaaaaaaccccaaaaacaaagtaagtataattattttaactttgttgattgaaagaaaaaaaaaaacaaaagtaattctgagtgtttgatttgagattcagctcctttgctcccaatttgtacaatttctcttcttttccataaggatgatcataaccaaaaaaactttttttttccaagtgttttaagacttttttttttaatttatatataatttaatattatgggatttttgttaggatagtgtgtctcatgattttcatgtatgtatgtactgttatataaataaaatcttggttctgggattaaacaacaaaaccaaaaattggtctttttttcaagttttattggtgcaagaatgtgaggactttttcagagtaaaggttttgtgtgatacagcaaaattgaagaagtttaagttgagaaaactatctaaagaggaagtcaacttgtgtatgaaggggtcttttgtttagtttggacccctccaaatgggtatatatgaagttggtccaaataggaatatatatgtatgtgaagttatataattttgtagtgcccagaatgagagggcaagagagtcaaacttgtaagagagttttggtcccctggattgaggaccacattagctatttcacaccaaagtacaaaagttgaaacttccacctactgacatggtgtctgagctgttcaacatcgtgctgttaacatctattttatcaatatcccatgtatagatttgaaccaaaaaaaaaaaaaaaagttgaagctactatgaaaatatagatttgaaaaatttgcctaccaatactagctttcaatttcaattgggatagcaataatgttgtctttacctatggaaaaaagtaaaataaaataatggataaattgaagcataagtacaaaaaatttatgtttgtatatggaatcaatttaatatttatttttagaagcataaataatgtttataaaattgtgttaaaaataaatatgaaatttatgttatttaaaaaaaaaaaattatttaaataatgaatttattattcaaataataattaaaaggtacaaatatgaattcatcacatcaagttttttatcctgcacaattaatctacaagatatagagatatttggggaagtttgttgagattcagcttttttagtggggacatttggttcatgatttagttaaatttatttgtttaattttaatatatgtacttaattcacatttcccaccttaagttagtatttttgatgaacactgataggtggaatatacatttcactcgaatggtacttcatttttttcatgctttaaatattatttagtatttgattattttaataatattttataatttaaatttgtgaaatataaattaattttataaataatgaaaaagtaataagattagcaaaaaaaaaaataataataaagagctaaatatatggatgtttaaaattttatttattatcattaattgtaatttatatatatattttttaatttcttaatgtttgactctcatatatgtataaataagagatcacttattaaaacaaaatactaaaaaaattctaatattttttctatttttttttctaaattataatactttacaatttcttagaatttatttttttaagttttaaaaaatatatttagagagtatgatttgaaatgcttcttgatttggcttgggttcaggattctcgaactctttattagccaagttatatttttatgaagaaacaacagaaaaagtggattcaagcaaaagtaaatatcacaagtttagatagtcgtggatcaaatagtaagaatatagattggttttttgtccactgctattattattaattattaataattgttttaagtgacaactttttcataaaaagagaattaagcaataataacataattaataataaataatcctcaactgaatagagtagaaagttttggtaacactcttgggcgagcatataatacaaagtctttggattcgatgtgctccaccaccaaacctatccctacttatatacaaatacacatattacatgctacatattctaggagaatgaatcaaatctgcgacttgacaggaactttaataattttttttaaccgtatttaaagaaaatttgtattcatgacgtactttattaacaccatttggaaaaaaatatattaacagtgaaaaggaaagtctcttcgttatgatagagattgcaaacaaattgaatctaatctaatcatttttatttaaaaacttaatcatgaattacttttgtcttggcatctttcttaaaatattacaacaggattgaaggagctatttttttttttcttttcttgcagtattaattgaactaaggtgaagttagtaaaatcttctaatttaaatactgattaaactaaagtctaatcgaaaggacttttcttttttttttttctcttttgaaaggctgtaggagttttcatctccaatggtgttgaaccaatctctcgtggttggtcggacggttgtagtagcaggatcgaggtcgtctgtggaacgaggggttaaggttctgttgcagcagagttgacttgtttaattggggttgtcaaaagttcttggtcgaagaatgtggagaactgcattgcataatatgacccaccatggacattggtttctgttggcctagctagctacgtttgacgctcgtatctggtgcgcaggtgataagacccaactccttaaaatagtaagaggcaggattagaacaatatcagtgacaatattttaacaccagcaccagaattttatttgaacagtaaagatacgaggaaaaaagtgagcttttattgaatataaaagaaatcagaagctatatatacgctcatctatattatatattatattctaaccaatttccactcagtaaccacccagatacaatgactcttatatcctcctttactaatccagagtctaacagcaggtgggtcaatggtcgtgggtgggcttttgtttttcttactttagattcgtagaaccttcagagtagttttgttgttgctatgttaagttttggtttagttctaagagcatgtttggtattgttttctgttttttgttttaaaaaat

SEQ ID NO: 42698 - DNA, 6016 bp, Cannabis sativa
gggaagcagataactggaatgtaattaataaactgctgtgttcttgtgccgctctatgacatgttgaaatgaaatgaaactattagctgtgtttaagcaaaggtgtgaaattggattgtgtcttgtattactattagcttcaattatttactctgctaatttctcatgatgttctctaatttgtaatgtctactcgtgtggttggaactaagctcaattcttttccataattccatcagttcatatagtcttttgtttcttataatgggaaagactcgtacttcaacaaaaatgattattatagacaaaacaagatgataactatgatagaatacaattgtgccgattagcaccctttctcttgaattaggcattgcctgtgcccaggattattccagtctgccgttttcatttctctgaagtttgtcaatttttcttattctctaggtcaattagtttggcagcaaaccctggacatcttcctgatatcaagatgatgacattatttggatgtggggctttgcttctacggggtgctggatgtaccattaacgatcttctcgatcgagatattgatacaatggtaaattcctcttcttctgatctatcaagtatgtgcagttttgtttattgtcattttctttttgtttttgctgttattgcaattgtcatattttcacacacacacacacacaggaagtttagcaaggtaatatgaactctataatgtaggtagagcgtacaaagttgaggccagtcgcaagcggtatcatcacaccctttcaaggaatttgttttcttgggtttcaattgctgttgggtcttggcattcttcttcaactgaataattataggttagtgttcctctcatcttccttgttgagatgctcctaggaattgttttcatttattgttactagactatttaagaataaaagctagctaataacctcactgttcactgacttaataagagatactaacgttcactatctaaggagattggagggttaggtaattggtaaagtttcgaaacacaacaaattactaatgaagtatctatggtagtttcctcttaaaaagaataaggtcatagtatttaaaagcaaatatgggctagcagaaaatgggtggcatacgtttatgagctctacactaacttatagaagcttgtggaagttcttctcagctggatgagaggaattttttgagcagatcatagtcaagctttgaaacaaacaagcttttcaattttgggaatatactaaggtcagagaagttacttttgcataaagttcccattactactgtacagggttgttcattctcccaaactcccaatgctaccatagctaacttaagaataaatgagaagtgggtgagagcaggaattttctcgggacttaggttctttagaaaccttaatataagggaattgcaacagataactgaagggaattatcaactgataacagagttagtcatggtattagactcatctactagttgtacttgtacctctgttgtgaacatgatttgaaggaagtgtagagatattcttaggaaagtctaaatccagttgtcctcacatggtggaaagttcaagtcatttaaaacctttttcttctatttggaaatcttatgtcccttcaaaggtgagatgtgtgggtgattgttggcattgggaatgcttataggaaaccttttctgtataagtctccaaatggttgttctctgagcaaaaatagttttgaggctagcaacaatatatcttttacactgctcatttgttaatgtctattagtcaagaatgttacaagaatttgatgtatcatattaatggtttgcttgtggctgggatatcacactcaagatggatggccatgattgggggatactaggagcaagcggaagtgtttgacgcaactattatcacaattttggggtctgtatggctagatagagtctagaggaagaatcggatcttttaggattgaaagaatgatttctcttttttattgaatagagtgaagtgtcttctttattgaatagagtgaaatattaggtgtagaattatctttttcagtgctaagtaatggttggcacttgtggatgtaactttaaatgatctcttatcatattttattttgagatactttttttgtttcatataaataagtaaaacaaaataatgttttcaatttcagttcttagagcatatgtagactcatgcaaattcagaaattgtatttattttagcttatcagttgtcctactacagttacctagaaatttcaagctttgcatgagtgcagccggtttctttaattcttgattttattttgttatctaatccataatgtctggaagatacacatttaaacatgtttgaattattcttggtttctttgtttcacagtcggatattgggggcttcatctttgttgctagtcttttcctatccccttatgaagaggttgacattttgggtaataattttatacttcattaacaattttcttgagctttaacttgtttcttttactgatgtaaaatgtcacaaaaattgactgagtaacttttgtgatgttgtgtagcctcaagcctatctaggcttaacttttaattggggagctttattaggatgggctgctgttaaaggaaacattgatccagctatagttctccccttgtatgcctctggagtattttggactctagtatatgacacgatttatgcacatcaggtatattaataaatgtgtaattatgtcctttgtttgacagaggtttgtaagttgcacaaaatagggccagttaatttggtgtactatcttgtgctggagaaaaaacttttatttcactgagcaagctctgcaagttgagtgaatttataatccatggtaagcacctaaattcttttcattaaattagaagggattaatatttcattcaggacaaagaagatgatgtgagagttggtattaagtccacggctttgagatttggggatttaactaagcagtggaatatggggtttggagctgcatgcattagtagtcttgccctcagtggatataatgctgaaattggtaatccttctttttcatgttttctctctagtctaattatcttgttctatttgtgactgatctttatgcaaaaaatctgctgactattgagcagggtggccattttatgcatcattggttgctgcatctggacaattagcttggcagatatcgaccgttgacctttcatctcgagatgattgcaataaaaagtatggtttgagttgatgttgatttagagaaaactgtagatatgcaaattgcgttttggcttattagtagtattattcaatttaaattaggagaatctttgattcattgccttgtgttgctgttagtttacaaaagacactcctatgcttattaatgataagaatacttgcatgtagaagtgcatttactatgttatctatatataaaacaatttctaacatctggatggactcaccctatttataaactggtgtagttaagaagccttctttatttgacatgtttgttttgtgaggggaggataatatgttagtactgaaaaattgaagggtagagattttttatttgtttgattttttcctgaggaaaaacatgtgccagtaaataaattcatgaagtaaatatctacattttcttgattgataggggattgtcttacaagtttgtgctaatagcttagttgtgaaatgtgttgatatcagttggccaaattgtcatattattttgactaagcatataaaaattaactgaatattggccctttttctgattctcctttttcttgtgttatcctcttctccttttattgttagctcagcttatggcattgagcatcactaacttgcttaactgtttcatcttgcttccagatttgtgtcaaacaagtggtttggtgctattatttttagtggaattgttttaggacgaatatcgtcttgaatgtaaggtcattttcacactttattttaatttagtaccaacattgtagaacttcaaataattttacaggattctcttttaaacttgcaggtaaagaaagtttctataatcactacagtattgtgatcgtaagattgaatatacctatacaatacacataagtttatttattcttactaaatgcagcttctgaagatatggcatcgctacctcattggactattcgttaagattatatatcaatttttttgttgttgtaatcggatggatcagttttttgcaggccaaataaaaaccatagagcatgttttttttttttttttgagataaaaccatagagcatggttgtagttgttgtaagactcattttttctgttaaatgcatatcaaagctattataagagcagttgttttatttatctttttgagcttgactttgtaaaaccagatggttaaggaaaaatctgaacctgttaggaaactagttgaaggtgatttttggtttgcatattgcatagatcgtctttaaaagtaatttcccaatatgactaatttcagtttttatttttctttctcagaaatttatatccattcaatatattagtcatgatgtacaaggatatcatatcgcaaaatctaaatcatattaccgtctaagcgccttgtagctgttttttcttgagatatatgacaaatttttaaatcatgatttttggtttgcaactactacctctgttgtggtataatctggtgaattagtggcttctacattgagcttgagaagatccgctgacggaggatgccgacaagtgtccacctgaggttgttgtagagagctaagaggaggccgagggtaactaggaaacgacatcatgtagggagaggaatgagtacttagagaaagggcagccaaacaaatcataagaaagtgacttagaggagaaaccaaatcgtgattctatttaattttcctatggaaaaggttagtgtttgtgagaagagcattgttacaagctctactctcaaagtgtttaacctttggatggatgtgaagatgccaaagtttgttctaaaaggataattgaaggaagagattagatggagacccagtagtttcaaaagatgacaatgataagttagaattccaaacacaatagcttattcaaaatagttattttagtaaaatttaattctattatatgataaacaacaagtttttatcattcgaaattgtttcattataattctattataaacaaagtaggagacttatcataccaaacttgacggggaagtaatcagtcttccaacccgtgcagtgagagacttggccagacaccaagtcttgagcctccgccctctcttgaataaaaaataatgtctagagcacgtggtagctcgaaaagtataactttagaggatctcaagaatggaaggttgtcttcacgtaactaggtgatatagcatgtaagtacatcttatagtggtataggcattgggatagagttgtaatggagcaatcttaagaattttcaacaagttattgtactagggatgtagagggagaaccacgcctgatttaagaaggcagctagagaaggcaaccatgccttcaggtggagcatgagcccgatgttcgagatcagggttgacgatctccatggaattggaaagcgtatgagccttgcgtaaaatcttcaacttgtctggggaaatggaattgaaaatgacatttgaaaagaccctggacatgcctggtctttctaggggaacaccataatgtatgaagcttcgtaaaaaacaaggtcaagattgcttatacactttatgcctacgccttttgtttgaccctaccatgggccaatggagggtcaggaggagaagggaataacacctttgccaaaggactagggaataacaccttcaacaagcttccttttcaacaaaagcgcctcttgcggcttacgatgtcactcaggcaaactcggcctagtgtaccaagcatacaatat

SEQ ID NO: 42699 - DNA, 6691 bp, Cannabis sativa
ctaacaatctcaatagttcatagggaatttttaacggccagaaaagttcaagaggcataatttggtacatgttaatgtttaaggagtaaaaatcttaattcgctaaataaatattacattaaatgggcattgtcacaaaaatatcacatctatgggcatatggaactcaacaataaaaaagtattcatatatgatattaccacgttaatatttgtgggactcaccacattcttacaataaaaaatacactacaatcagggacagacctattaagattgatgtgggggctatagtccccacgaacaaaaatattgccttttaaaaaattaaatgtaaattttttaatttaataattataggcaaaaatagtagaaaagcccccacaaaattagataaatttagtaagagtgattataatgtagctataaatatttttttatgataaataatcccccacaaagtaaaaatcctgagtccgtcactgactccaatacttccttgcattctaaaaattatgttaggacttaggacttttgagactagttttccaattttttaagtgtggtatattttgcaaataacgggtgttggtaggcataaatcctcaaattttctataagaatttaaatatttttctaatctcaccaactctaaataaactaaaaactatgttaggacttaagacaacaagaagaaaaatactactaaagctacttacccaaaccttgctttaaatatagtattcttcttattattttttaatttctttacataataataattctcaaagaatttaccttgaggatagaatatcaaatatcttctctaaaaaaagaaaaatactaaatagtattctatagtgcccaaatactcttattttaattagtattttatattgaaaaaaattgtagatttaaaacttgttatttctctctcggtctgctaggattttctcaaaaaacctagtcacagactcacagctagtctaaattcttcttctggccaggcccgccagccctcttcgggcttgagtgtggctctggttgggatccttatttggcatgttggggtaagtggatggttcactttaatctcgtctctcctttgtttctcctagtttcaatctgtttattcagtggtcgttgtgcattttttggtctcgtgtgctatggggcggcagtgattgacccagatctgtcagtctagcgaagacggtttggtggttatgggttaggttgattctcaattctggcagggaaggagcttgtgtttggtttctaaggtctgggaggagggtgtggccgagattgggcttggatctagactatgggtctctgtgttgcttgttcaaatttggtgtgtgagggcttcagggtgtggagggatccttaggagatcgaagttgactggcaaattggtgtctttggtttgctcgttttggtgtctttttttattgttatttcttgtttgttttaatttttttaataatagtttttttttcaccaccctactagattagtagggattgttattgctctggtgcaagatgcaagtattgttttttttattagtttatgggtgtctcatcgataattctaaatcattttggtgaggatatcttggtctttttcttagttgtcagatttggaagatctccaaatctttattgtctgtgctccaatattttatgattaagcattacaacatagttgatcgtgttatttttctatttatgatttaaataataggtttttatgtcttaatttttattggaaaatcattgactaatagtctttgataagtggattctataagttgtttatttagtttagaagcctaatatatttcacacttttttgatgctttttttgatgcttgactattaatagcttattagttcatagaattttttttcatgttattgtagacgacttagtatatctaatttttgtaattttactctttgatttgaactatattttgattttattttgtttcattacctattaatgaatatttcctttctctctaaaaaaaataaaaaactcttacattgatactaatctaaaaaaattcatctctcatattcatttcttcttttttttttttaattaacaaatccctcatatgttttaaattaaaataatatatataaaataaattagctaactaaagtactaaaccgagcatatccctaatgaaaagtataacatcttacaatattattattttaattttttcaaaaaaaaaaaataataatatatcataaatacactattatgattatttaatttagtgcacgtgatttatttatttatatatatataaaaaatctttacaaaaagaaagaaaacatagaaactagatttggatgatgaaactgaattatgtgatgatatttaatctgtttctacaattacaaatctaatcgaagaaaaatcatatgaaaaataaataaataaattttaaacaaaaatcttagaattaatttcgagaaaaagaaaaaaaaatagaaaaaacagaggcggagtcaggctcaatacggtgtcgtctcgtcggcgatcgggagttgttgtagggtggtgactgagtgaggagatgaggtttttgaggagaatagctggttttctagggtttgttaaggatgatggtcatgaagttaaggatgaagaagacgatgacgacgatgctgctcacaatacttcttctcaagctcggaatcggacccatttcaaagaaagtgggcttccgcgaaaaggatttagtgtaccggttcaggtctctgtcgatcgatctctgcctggtccaattcttgctccttctgattctggcgatggtggtgttcaggttcttattgttgtttctttttcttactctcttcttaattgttttcgttgacttgttgaattagtgttatgtttttttagttcttgcaatttactttgtttaatttaagtttgaacttctgttgtagcttaaagttgttgaatctctgtgatttgggctacttttgcttgatgtttcatgctcaaattgatatgtaatttggattatttatcatcgattttgtgtgggatcaaattaactaaatagcattaatgtttatatgtgtgagtgtatttatgaaattaaaaatgcaagaacatgaatggtttattattggtgtgattcatgtagtgtttgatcacaggtctagtttatcttcaatgatgttttgaaaattagggaattttttcttccaaacaatgtactttcatgtttggcttgttttgaatttctacttggtaacaatacatttttggttgaattgagaagtaagaggtttaatgagttgttatccctttgtctaggaaccaatttaaattggacttgaatttcatttatgtagggatcatttacttccttttgcacttgaatttacccacttgccacttctaattacttcttaagccttatatttatcagtcattggtgctcttagcaaacaggggggaaacaggaatgaaaatagattcttattattgttcatttctctgtttttcaattttatcgatctgatctagttttgttctttatctttgtccttcctggacccttttagtatatatgtttgtgggctgctcacttcgttttctacttttttcggaagtattgatgtgtgaagggtacctctgaattcaaatattgaatcaaggacgtcaaaagaaaattaatagattccaatttcctgcatacataatccaatgtcagttcattgtgaaatatcttaggttataggatgaagtattaaagagttcaatttaggtggcaatgtgtttgcttgaagtaaaggaactagaaagagttgctaggctattttaagaaaacttagaaatttttatggtcttatgttcttcagaccgatgacccaacccgcaggttatttctaggatttttattttgatctttatttgtggattggtattatttttttcaccaccttgctgatatacctagtctgttgggatatatttcaactctagccgagcgaacctgcttgctatgtacatggaacaaaagaagcatgacaattattaaattatgaccccttttatgaattgaatttttagtattaaagagttcttattgcattattttggtatattatgatcaacgtgtccaatatttttatgcattaatctctcagataagtttcttccaaggtatgaatttacttagctggcattgatgtgaactatccattttatttgcaagaggctgtcctttttcttcttattcaaatgatttctgattgtaatgataacttaactttgtttctacttcgaagtatatatatataaatatatatatatatttataaatacttcctctctccctaattttagtatataatgttctttttttcatttataatcataaaatttactcatgaaggaatcttactactggctctcaatccacaaattactgtggtcaggattatacttttcatttatcaaccataaatattaactagtgtgagcaattggattttgtagatgttgatgtgagcttttcttttttcctagtgttactcataaaaattaggaccaaacatttgtgtctaggcagctgagttgagccaatcaatactaggttttgtttttgtgatggatcagtataatgttgcacacaaaagaggaaataaccaaattgcttctttaaggtaagctaatgaagtatgttggaacttcaatggtaagttcaatttgaaagtccgatattaattagagaaaatgaatgatccttctgcataccgtagaaatgtgagttctattgccagatgagttatcccttggtctgcatttttggtggctgacttggagttagtgactagtaagatgattgtagttatttcagttccctgagctttagttgtgatgaggagtattagattgtagcagcaagcatggacaaccaaaattcttacagctcgtaactcgtgagatagccacatgtgtatcaggacatagacgaccattatttgagtcacaacttttccaaaactttctgttgtattcttcccttcatcgagttcgtttaattttaggcatcttgtcacccactggaagaaagttccattttggatattttctcatcataatgtttgtgtcataagcatcctatgacttattgacttacattatttgcttgctttcttacatttttcttatagaagaaaaattcgaatttcactagggagaatattctcaagaggaatgttgcactaaaattatgtacaagtgaaggtttcagaacctgaatcttgttattctttattcagtagtttcagttgctgtttctgttcaatgtcttttctctaactcttattgccatattcaacactaaggtgaaagatttattggatatcgcttacatgataacaaggtgcagattaggcatatatagcaccagaagggatatgaaatgctatagtaaattatatgcttgtttgattgggatgtaaagatgagatagctcctttcttttatttaagaaataggagctaaatatattctcaataggagcaccattttctgtttctatgccttccaaatattgtcttatttatgattgtctctttggttcaacttcaaccaacaactaagatttttctccctgttctgtttggcatgttattatattgtgcttggtacaaacttataacagtacttacgatgtcgattgtaaccacggttttatggctctcaataaacttgggaggagatcactcatggaaaaatatttttgctaactacacttccttgctgattcctcaacacatattctgacagtaaccaaactaaatcacataacaagatgagagattactgttgttctttttatggatttgttttctttataaaggaaaggagttcaatattgatggcacttttcttctgttgctcttttgcatccagggtctcaaatggtacgcaaaacgattaaggatagatgaagatggagatgtagcagacgagttcattgatgaagtcacccgggagtcattatcgatgaacacagaacacgagaagaagccattgcctaagttccaagcaaaatatggcactaggcccgccaaagttcagaaacaggtcgtattgcctaatggtagactccaacaatacgtggagcaccagggtagactccaattggtatgataacaattaatcttacaccaaaaaatgaaaaaaagtaaaaaaaagaaaagtttccagcatgattgcgtctctccgattgttcttggcaatggctccattgtcatgtgtttgtgttttctgctggtgtaacttgttcatgggtcaatattatattgaaaaatatatatatcagtgttgataagttgttttgtgggattagtagttgattcctttttgctgatattggtttgtactttctttgtagctgcttttttcttcaatgcacggattgtatgtaacccatttcatttatagttcactgatatacaccatcgatctactcttctcataatatggttttttttagagaaacgctaataggtaatactcaggcttaatgtttaaagtatcatatcgctattggtacaatttaatcttttgtttaattttttgaacaattaaaacggataattatgtacttataagtttaataaaatagttacaataataac

SEQ ID NO: 42700 - DNA, 5283 bp, Cannabis sativa
gttcataatgttcgtactcttctcttatctttaaataatgttgagttgtgttttgtcaaacgatctgcaaacaagctggctcatgtcttagctaaaaattcttgtttctctccaggtcgtgtgcttcaggtggaggattgttccaacaaagtgcgttctattattattaacgattgctagataatatagttactaagtttattaaaaaaaaaaaaaaagctacggtacaaataaactaattaaaattcaatttataaagatggtgtaactctactatgaccttaaatttaccagataaagcaaaagcaaacatttaacaaattacacccgcagaagcataaagtcacctcgcttacacttaacagtgttactaatatatttttttcgatcaaaaacattaaacactaacactaactaacaaactcatccacgcgcttcctacatcatccctctcattctatagagcgcgtgacaaacacattcaatgctctgcggcttgttctgcggatagtgatgggaaaggcaattccagaaaacgatgacgttgaggctcaccagcctcacacggactgtaggaccgtatatgttaccctattccacacgcgtacgcccacctcacattatcaacttatattaaccaagtcaattttttgagaatatggaacggttaaaattagaagaacaggttaataaattaagtttgaccgcacgggattatagactcatttttcttttggcgaaccaaacccaaacctccgccggtgcacactgcacacagaactaaaaacagaaagaaagtaaaaccaaccatatgagttttatttctctccctaccaccccagaggaaggagtatataaatataaaaagcattattatttttattattattatttattgaaaactactgaacccgtttttcattcttcttagactgatgcaaccgccatcgggccatagcagcggcggcggtggaggagtaagtcgaggtggactcactcggtttcgctctactccggcgaactggttggaggcgctgttggaggacgaagaagaggaccaattattaaagcctactcaatgtttgacacaactcctcactgaacactcttctccagccaccgcaacaggctctgttcccttcggtcattctgaacatccgtgctcctttgccgatgaagcttccgggtttctaaggcagaacagttcacccgcggattttctcgggacttctggtcatgcttccgatggattcttctcgaatttcgagattccggcgagtttcgacctgtcgtcgtcggcgaacttgaatgtcgcctctccaactggcagtggaaagaagtctagggaggtcgaaactgtacggaccttctccgagaacacgttatcgtctcctattgtgagcaccacaatttgattccgatatagcttctctgttgtagctatatcttatttgtttttgaatgaaaaaattaaaattattaattaatttttttgcttctctcttcttttctattattgttggtagaaaatggagcaaggtggccgtgtttctggtttgcttgatacggagatggaaaagctcttggaggattcagttcctttacgggttagggctaagcgtggttgcgccactcatcctcggagcattgctgaaagggttagattttgaatttcttttttaaatatataactttatcagtctatgcatgtgtaatgttttcgcttaattttctataaaaattttcattattaaataggttcggaggactcgcatcagtgaccgtatccgaaaacttcaggagcttgtgccgaatatggataaggtagagtgttttcagttctaagcatcatttcatggtactctttttttcttcggtatttgcattcattgtcttaatatcatgagatgggatttgtattttatcttaattttttttaacacagttttcaggtgctcattattccttccagtatatattattattatatatatatatatttatatattgaggttttacatgctatgtaatttcgttatattagtatcatctttacttagagaacttaaccccaatattttttatgtcattattgaaatcctgttatttgagctttttactgtacttttctttctttccacttggtaaagatattatcaatgtaggactagtctgaggtaaatggtcaagactagcatgtactttgtaggtagcctgcagctcacatcctttccttgtttgaattacatttaccctgttcttaaaaaaattccaccatcatctgagtcatgatgtctttacgaactcatcatataactcataactataatatgtaaatatcataattatcattaataaaatcaattgacaaaactcattagaagctcgagcaataagtcttaaattttttttaagaaaaaatggaaatttctttattgatacgtaaatcagacaaattacattacattgataatattgctcaaagagcttaattagtttggtcctatcctaaccctactttttgtatttacttattttattctatctggaattatttctttttgttatttttcttaggcctattataattttgatttgcttatcatatataccctatatatatgtatttattttcatccttcctgccaagttgcttgattaataattatacaaacctcttacacattttgtcctctattttaaactttatatgagcatgtgaacctaaatgtcatctattcacttctaatattaattatttaaattgaaaaagttatgtacctcttcctgtttgttttattttctaaaaaaatccattgacaacaactgtccttccttcgccatccttctaagtcccaccatatatatatgtacatatattatataaaggatgacacagaaattgtttttttcttttgttggttgggtaaggtggatgacacagaaattgttaattaacaatatttcctttttctgttgagtaaaaaaaaattgatacttgatacttgaatttatatataacattagaatgtaaccatatgattatacatatttatataaatatataaatatttctctcccaaggtatttaatattagaaattgtgaacttcattatgggaaatcttcattgatatgtgaatattaagaatactgaaatgtgaaaagaaaacctagtgtattcttcagaagcatgtattacatgtgaagttggggcgagtaatgcaggtaaattcatgagtatatctttacattatttgatggttttgattttgtttaatacttgatgatagaacttttgggtttataattagtaaagtcaagaatcgtagccagagcatggcaagatagagatagactgggtaacagtttttttcttgacaagaaggctagtaacagtttaagaataatatctttattctttgtggcattaaataaaagtacaacacaagagttctctcctcttactaatgagatagttcattcttaccttctagtaattttccactgtccattaccgaagtagaatccttcacacggctgtactactgaatcaatctggctgtttatcccagtatttcttgcattatgcaaagtttatgtttcccttgtagactgtacttctccgatctgcttcattatgggcttcattctatatagaactctacttatagggataaaagaaaaatgctaaaaggcaccacacctaaggtgtggtatcactattaattggtatataaatatcgaatcccacataatataatttgataactatatattatagaatattcttaaccatttacaagggactacctctaggtgttgctaagcacaactggtgccttggagcaatgcttagaatgaaaccttatgtgcatgtaaaatcacattttgcaatgacaactaatgcttgtgaatattcttacttgtttgaatttgtgtcaacttcttagctcaactcagttatttttttttcctttttcgaattctgttcccatatattaagaatatcagtaatgatcatgttagataataactcgtcttaattttcctgtatactccaaaacttattcttaacagcttaaattttttactttttatcactggttgctgacagcaaacaaatactgctgacatgttagaagaagcagtggagtatgtgaaatgcctccaaaagaaaattcaggtatcgtctgacttttgctgaagaaaagtgtttgaaagtttgaagtccactatttttaagcaattatataattgaaatgtaatctattcacagtgatccaaggtaggaaactaacatattttagctatgatatttcatgtttgaagttcatgcggtaaatagaaaaacagtattttcacatatttgcaaactctaaaaatgacaggaactctctgaacatcaactgagatgcaaatgcaaaaacaaagaataaccagcagaaggtactgaaaactacctctgaactgtttagtgtaattattagtttatgagatttcactaataaggttcatcatggtggtattttgataatgctaattctgaagatccaccttgtaatttagagatatactcttattgttgtattcctccattatgtgtgtgagagagagtgtacggtccttcattaggatatcaatgcgctccatgttgatgaatatttgcttagtattacttatgtgtagagcggagggaatactgccatatattattcattattcacattattctctgccttgtacttgggctattttattcattgaaaagtatcagtggagctgcgtaaatcaagaggaacttttttctgaaatttgaatgaatacctgttgtttgttgtgtggagttttgtttctaacattttggtaacatcttgtcttctaattatcgtttgtgctttttttttttaatagtgatcattaataacaatatagtatcattttgtgtcggtgccaaacagcaatgtatgttcaataaaatatttcatatttcataaggcagaaaaatttcatggagatgtcttcatcaaaaaaaaaaaacattatgaagaggtgttatatttatgattcatcttaattttgcaaaaacattattttgatgcttacctttttcttttcacttgaattaaacaaaaacatttatttgtattgtctaactttgcttctcatatgtttatgtgctatctatccatgtgtatgaataaagtcatgcaattttattgccaaaacggaggttccagatacaattttgcatggcataatggatataattataccaatggtt

SEQ ID NO: 42701 - DNA, 6367 bp, Cannabis sativa
agctctggcctaaaaacaaaaacaaattaataggccagaaatcaaacacacgcaacgcagtggtgccttcaatattcgacacctacccctacccaagggctggtaagagattccatgtttagaaaatgcttgggattgggttaggtataaattaaatatcactgttggcacaagctaatcacgaaatgatttcttattagtaccttttttttggtagtttaatggctatatgttatgcatttattcttaatctagagaccaaccttttggaaatcacatgtaacacacacacacatatttatatattgttgtcagcaatttaaaaaactaataaccccatctgccaaacttgttagtattaatttttgggctcattgcagagatccacaaacatagtctctaaaattcagtgccagagcctgttgaaacaggacaagcatactttgtctttaacttgaaaaaacaaaaagacgttgaaaaggaatggtatatacttatttatttatattggcttaaagcataagcttcaagtgcgcgcgtgcaaagatgaatactttattgctgggcaaactagcctcacttgcccactctcccacatggaacccatatacaacaaaaggagtaacttgaacttggatttgccaaaatagtgaagaaaagtggcaaaagcttggagagggagaaatgagtcaataaaagagaaagtattatttaactctctgatcttccaccgatcttccattaaggctgtctggagccaccaaatctttacaaaaaaagaagagcacatcatgtgtttcaatctcatccatctaacttaaaaaaaagattccctctctttgtcactagtgtattgtgtctttgtctctcatttctatggagtattttggttaaaaggcacgggtcttcgatccaaatcaagctcacttcctcatttatgcctcttttctccttgtttactttttctcagaaagctctgtttagaatttggccaattggtttaagaaaggtatctccctttaattattttctttattaaacaattttggacccttccctatttgccttttgtgcattggaaatcccaattccaatcccaaagggtaagacaactcatgtatgactactactgcaaatcaagaccgttgtcatctgtgttgtacttgctcattgacagtgttaggtatatcagcaagattgttcccacacttgacctgtcatccaaaatcacagcatttgaataaacacttgaaaacaagtctatttatttatagtacgtacaaataaaaaggaaatgggattagtagtaaaaggctgagatggtaaagaaaaaaaaacagaaataaaaaacttacaaagtggcaaaaaagaaaagaattttcttgggatcaaaagcccaagaagaagaacgcttgaagctatttcttctaagaacggatctaccatcagtgacggtgctaatgttgccggctgtgatggtgatctgatgatggacttgtgggttactcgagttttcagtggtccctagtgtcacccctgaggccttttctggcgtgcatgaccctacaaaaccaagtaagctgcaaaatgaataataccattccttgattcccatacttaagattatgacggtttaactagaaaaatcagatttctattgcctaaaagaaaagaaaagaaacttgtcaacccaaagttggaatactgttaacacttaaaagaggataatggccccaaaatatgatactgaaataccaacaaaaagactaaaagatattaaacaatctcttcctgtaccgacttatggaaacccagaaccaaaatccccaaatcaaatttatctactgcaatctataattgacatgtttgtacaaaagtcactgtttcacattattaaacttgaaaacgatatatatcttaacaaattttcaactaccatttatattttgaaaacttattcaactaacaattgttttttggctagacttcaactaacaagttgaattgtataacctcagccaactaaaataagttacggaagtggaaagataagtatgactaatcatgacggtaatccctcctaagtaatgagtcacccaccttaagtgaagttggtgaattttgtttttaaacaaaatatgtagcatatatccaatttgcgggttcaattttaatatttttatcttttaattgtgtggtcgatcgttgtatccgtattaatctcaataagtcatatatatgaacaaatggttaataagttaaagttggaccccattaagtaaatgacaaaccaattaaatgagtatagccaaggtggaataattggagggtagtagtaaactgtgaagaattttgttcatatgaaatagtgaaaatgttaatgaaaagagaattacacaaaaactgtattagttatataccaacctcttggtgatggtccagcatctctttcattagtatttgtagttgaaccacgctgagaacctttcctagactgacttctctgcaacttagcctaaaaaaggtagaaaaataagaatggaaatgaaaagaagatgagcatcaatacttataaattgaaatttcattaatgaagaaaaaagaaattcaaagtcaaggaaacaaagagaggtaataaataataatgctcgagaaagaggcccattgatattacttgcgtgtaaaacaaatataatatttcctctgtttcaacaaaatcattattaattatgagactactaattgaaaatactgaaggcgacttatatgaaaaataaataaataaataaatacaacagctaaaaaatttgttttagaatttgcaacctgaataaataatgaaaatcaggaaaaaggaataagaaaaaaaactaactttggttcttgaatttgctgatgcggtatctttatcgttgccattagagaaagtttccatgtcaattacaaagctatcggatttatctgttgcgtaatggaaaccatttaaatgatccgaaacagagattttctgaagcttttcttctaatccatgagcctgaaaacgaaattcttttctgaattagttttgaattaaacaaaaaaatttatgggcaaggagaacaatcgataattgagggccaatgaaacagttggaaagattgacaataaaataataatataaggtattgaaaaccaatactaaccagcttcgtattttccgccatttccgtcagtttcccaggaaaataaaaaaacgaaacagagatgggatgatatttatgtacagcgtcagaaattgcgtacccaatggggcaaatagctatcaaccacctgagcctgatccaccccaagaaaaatattgaaaaatgagaattagtcagagctatagttgagcgtgaataaactaataccgtatgagacaaatctctcgtgagagaacaacgaagaaataagaagaaaatcaaattgaataaattaaagaaaaaatgaaaaagaaaaaccttgatgggattatctctccaaaatttctcggttggtttggtgaaattttcaacaccttcagatacgtcaagatcctgaacataattttgacaaaacaaagacaaagcctttagattaaattatgaataaaaattctgttttagttttagtttttttttttttgggagacagaacaatgcagaggagcttactgggaacttactctgattttttttttcttttctgaagggtctgattggagatgtgattttctcgaagcagagggagagagaaaaggagaaatttgcttacaggggaagagagagaaagagaattgtaaacgagtgaggatgtgatcgtgtgtgggtgtttgcaaggaaagaaacggtggggaaatgcaatatcttagcctttattaccccattttataagattatttttgttagcaattatataaaatagtcttagcaaaaaaattatacaaattaggttaattaaactctaccatcaatcacttattataaaatattaatccattttaatattccaatatatatgtaattttcttttcaaagttacaatattatctgtatatttgttttttaaaaaatttcaaataattttcaataataaaaataaatttaaatttttttgaacatacgtgctaaattacaaaattttagtggcgtagactattcaaattttttaaaacatttataaaaatgatattataattataacatatattactctagaaaaaaaaaattaaaaaaatattctgtcttcagtgtcatgtagttttagaaacaaaaattaactaataagttgaaatatgaggttatgattatcactccaaataattttattttttttcatttttatctattttcacatccatgaagatttttaatttgtttcttttttaatcatataaactataattacttaacatcatcgtaaatttttaaaatacttaaaataatttatagtaacaaaaatagagtatcccctatatttttttctttgtgaagtatattgcaaatttaattatatattatggggatttttgtttttggctactaaatatcttttatcttcaatatgtataaaattttttttttcataatgtacccttttaaaagaaatgcacatgcgcctataagcttttatttattttggtatttggaagaatttttaaaaaattttaccatcaatatttgattatttgaattgaatttttagttctagatttttttttttactttttttttatttgcttcaaaaaagttaataaataacataactcgttgtttctgtagactctccatttgttttggtatttgatatttaagagagttttttagtttaatttttttcatgatcatgtacattataattatttagaactactattttttaaaaatttttgagtagtttatattataaaaaataaagtttaaatattttattgtacgcacgactatttttcttttacgcaagataaataattgtttgaactttatttaacataatttataagtcgttttaaataattataatgtacataattataaaaaaaaaaattaattttttttaatatcagaaacaatcaaaaaatctaccaaaatatcttttaaaaaatatacactataaaatttttcatatatataataatagcttctttatattgcaagaaaaataaaacgtgtatagagtcatagtgaatcattgtaatatttcgtccaaataatacaatataaaatttatagtacacaaaagaggatttttttagttttttttttattacttataaatttttaaaaaacttttaaaaaaataagatttaaatgcttatagaaactgtcacacatgcatgatacaaaatatttaaatcttattattcggtactataaattatttagaattttttaaaaatttaaatatagtttgagattaatatagtgtacacttaaaaaaaaaaaaaaaactatgaaaaactcgtaaatttgtcaaaacagataaaagatgtagggaaaaatctctttgaaaatattaccctattatttttagaattatttgtttatgttttatatgatgattgtaatttgtagttgtttaaataattcttttcacagggtggacatctcacgcagccgacccattataaggcccctgcgtcctcagcatattaataaactaattttgtaagttataccttcccaattatgtcgcactctgacaatctgtcaattcattttagttcaacaatctaatctgaattttctaattcaagcagttatttaataacaaaccccaagtaatcctttcttctctgctttgttttgttgtggttttttgtttcagacctaattacaataaattttttaggacacatttatagttgaatccacgaatattttagaaaagaaaatataataaataaataaataaactacttccaatgtctccaattaaactttagctgtaaattttttttttttaaataataagtacgtaacttaattaaataaagactaagatccttattaaaaaaaataataaataaataataataaaagactaagactaagataagatagatagcttttgagcgaggaatatgatcttaataattgactccaatttagtggagaagatcaatacctaccaattctagagatgagataaaaaccttaaatgaccttttgagattctttaacatccaaacttagaaaagtatgtttaatttaattcaaaggcgaataaaggtacagtattaatattatacgcattgtgccataagtttcaaatgtaaattatatatatattaaaggcaatagtaattgtaggtaatcattttttttttcagcgcaacagccattaataattttaaaggtaaacgtaagtt

SEQ ID NO: 42702 - DNA, 4621 bp, Cannabis sativa
ggagtgtaacagtattataaaagaagaaagaaaatgagaaaacacagtaaactgtgtaaatttcccaaaaataatataacttacataaaagaaaataagatttccacaaaaaatacgtgttaacaatatctataatggttagattatattaggaagtatatttgtttatttgtatatatattcggatgagtagattcgacttatgactatacttattggttgacatttattcgagaattcttctagcgtgcatagtatatattggcttctctcgagaagtttttttcatcctgttctagcactattccatgtagtataattatgatgactgaaagcaagataaaagtccaccacaaacttcagttttttttttttttattttatatttttgatgatagagagaataacactacaattactctgtccatcacacactcatatacatccagtcatatatatatatatcctaatatctgtattatagactttacttttttaggggtttgcttatagaatatcatcaccttccactttttgatcttgatcttcttcttttcttatttaatttaaataataataaacaacgctgttggattgattgatgaaaagtagggactgagattgagatagctagcgcatatatagtgacaagtttagaatccaagacagtttaactaatttatgcctagctatactcaaatggacacttttccttaactaagatactcaagaaaggaaagccaaaaaaataaataaataattataaaaagccttcaatatttagattaatattaatatatacacagcttggtcctgttgcctggaccccatgtaatgtggttggggaactaattcacacacagaattgggcccttgttaacatcttttaagcatataacacaaaaagttagcttagaacaggcaaaggaagaatctcttaaaagctaagtaatggagtgtagagggggaaaccacaatactttttttatagtcacttttcaaccaataatgtgggaaatatctttgcattagtcaatgaatatatatcaagctttattatttgctgtccaattttcaagtttcaaatatgtattgcatcatccaattttggcaacggcatatatatatatagtacagcaattaatatatatgtatatggtaatttaaaggtacttaagacatatttgataacaatcaatgatcaataattagcatgaagttgagatgaacttgagtgcaaatatataccatcaactgatatggaaggaaaagttgagttgactcactttgaacttggatatatattgcatctatatatgctagcttttgacgcggcgcatctggttcttatctgcataattgtgtatttcctttgagatttgatgcttaaaggaatagtaaattattgaactaagatatatatatatatatacatatatagcatgttttgtaaagagagttcaagcagattccttgaatctacgatggatctgtttccttctcttcttccttgtgcattcttttcattttttgttttttttttttgcatgaagatgatccaaaaataaccattattattaaggttggaccacacactttttgcagtattagtaatgtgtataaatatctttattaatttattatatatatttgactgtatgcttccctataccacatacgaaaacggtccaagctatatacatatatatatatttatatatatttataagagacacctaatataatatatatatagtatctgatatttatgttaaaaacgaaaacaaggaatttcattgttttatgtaagaattgcaacataaaacttgaaaccctttctaaattaaaacatggccatccataagagaaaaagggccttcaacaacgattaataatctactaaacttattatgctcttaaagagaaaaaagaaaaagcagcatttgacattgaagcttgagaagaccttcttcgaagtagtcctttctcttatacttcactacctgaaatacaaggattatgtgtatcatatatttgtctatgtgaaacatgtgataaatatgtataatacaattaattattgggattgagattgagatcgagttgagttgagtaagttcataccataatccctttgcgttttgcatttatggcaaatcgtcctgctagcataattgtgttctccacatccaactctgtacaaacacaaaggacattctatattagaaaagagaatcaacctcagcaatctgacatttcaattttttttttatttgaacactatattatatgctgaaaatgttgatatatacatggtttgttttaatataacccgataaatctatacgagtctcattcgattatccttatttgtcaacatcttcatattttcatatattaatattaattagctaggtcattgatagtccatctaactagtgggagcaacatattaagaaatctatatatagcctattatcttaaagtttttatatctgatcagttttaattggatcatcatcatattcatatgacatgatcactagctatatgataatctagagaaagataatgtacaatgcaggctattaataagcttcatattatattagttttctacgatgaatgtgaataggatcactgacctagagcaaaaccagtcaccagatttccagccaggaggagcactgctgttatcagaaccataagcagtcatcatttgggcgccatagccaccaccgtagtcatttttgatggagccacacctgaaacactgggatcggctagcgtagttgtggcttccacagttgcagaaccagtcaccagccaaaacctctgtcctattattgtaacaataggtagaagggtcaggcccaccgtacttggggtactggcaacgctggcattgatccctcttcttaaaattcacatgttggcatgcaccacacatccaatctcctgatccagtccagctcattctctttctctctccttctacatgtcaaaacaaacaaatttatatatgtatatatacaaaaatcagaaaagaatgttttaaatatccttaagtattatagtcatcattccatttttaatataaaattaacaagtttggaaatgagctaactactaataacataaaataatgcatgtgttaacaacaaaaagcacgccgtaatatgatttcataagatcttcatgcatggcactaggaaacaaattttttcaaatacccttaaatcatacactaatttaatttaatctatttttttttttaataaaaaagaaagaaaagaagaaaagagcttgaagcaagtttgaagccagatagaaatgcacaaaataatagaacgaaagatcgaagagttgaaagctcaccgtgtggaaaagtactatagtgatctcgagatcaagagcttggaaaaaataaaagaagaaaactctatctctcttgctagtttagtactacttttctttggtagaggagtaaattgagtgaatgagttggtgatctttgttgtttaggttggaggggtttatataccctcatatgtgggccatgcatgttcctttttactttatatatttattaaatttccttctctacgggggattctttactcaactagctatagttcttctccttttttatttatttatgttttattaattggaagggaaggctagtatgtatctctctctctctcgttgtgtgcatgcatatacatacaaattacttcaactacaatcccactcatatcatgacccatgacccatgacccatgcagtcatggccctttccttcccctttttacatgatatattcccttaattatttattatattggaaaaacagtaacactaagtaagagaaaaaaaaaaatatatatattccataatgtctctgaagtataaagatcatcttcgtactgatcattgcattattaatcataatagtgacaaattaacgcgtacatattttttgagtctgtaaaataccttcatacttacagaagctcgaatcagccaaataacatccaataccacggagctaggaaaacccgctagtactatagcacttcaaaattatataatttattcaaaatataagattacataatacttattagatggatatttctatttataactacatttttttgtagaaaatcacgtacaatgcacatgcgcacaagaggcgaagatctacaaaattacatatccaaagccatactatatatattatattacaaattaaaaaggaaaaacactaattaattctaaatattataaactatagtttgtatatcgatctatcgactttttaattttctaaattaattaggtttttataaatatgctctagctagctcaatatgtttcgcccatgcgcacccatgaattctttctatatatgtattgtgtccggtctgtttggttataattattgaagaactgattctattttaattcatttggggtggagccttatgaatttctcaaagatatatataagagttgttattggtttaacacttagctaacttttactttttttttttcttcaattatcatttttctctaaactttatgtggtgatccctttaaaatttttaaaaat

SEQ ID NO: 42703 - DNA, 3066 bp, Cannabis sativa
aagaagaacaagaaaaatatattatacaacacaatgccactttctctacctagtatgtgtaaaagggtacaagatactcaatatggatttcaaataaatcattcaatgtacaggagatttccactttctaactaaacaaaagctcacagcacagcttcattgtgtaatggactgaaccatgccaagtcaattttagcccttaaaatggttagggcatctcttctataacatctgcaattaggctctgatgctaccgagctcgtggatatcttcgttccaacgcgagattcaaaattatcttcattcttgaagtagatcagggaatcaatgaacgtgaacaaaaatattcccttcatttcctcttacttgccttttcccatttggatgaagtaacctggtcaattcaagtactaaaacaacttcagataactacgcaggaagggacagccagtttcgggtaaaagaactgggaaagcaacaagttaccataaaaacagagactttggaaacttactaagttccttcacattctgttttcccaaaggcagcattcttcagcttcagccatccgtgggtgataccagtacttcaaaccaacacagacataaggggacacaagaggttaaaatactttcacacgttacagttgaataaatttacaatctttggaaggacacaaagatagaccatacaagaattaagagtcgtgatcttcaggaacttttagtcaaagctgccaaatgttctttcctgtatttcatacagacagaagcattatcgatcaatcagaaaacaatgttgaagatcttattaggatcgctttaacttgctcagagcataccattagcagaaaacagttggtatgcagcaaatctcttttctgagagggacaatatgcaggtagaaaccattttgcaagttcactcagcatccattgaattaatagcattaattaaagtctgagaaacagctgctccaagagtaaagcccttctccatcatctgatcccatacactacatgcctcacgtagcttcttttcccgaatgagacctcctattatcaatttgaaagtcacttcatctggacataatcctttagattgcatttcattgtatagacacacagcttcgctaactctagaaactttgcaaagcccatttataagggcattgtatgaaatcacatcaggagtgactcctctttcaaccatgtcactgaaaacgctaagagccatctcaatcttctttgccttacatagttgatccactattgcagtgtaaaatatgcaatctagtgagagactcattctcatcaactgatcaagaagcattttagctacatcagaactaccttcgctaagaaacgcttttataagaattgtgaatgttacaacatctggttcaattcccttctggctcatttcctgaaaaagcttgtatgcccttctagtaagacgagccttgcaaaacgctccaataatagtattataagaaacaacattacataacattttcttctccatcctactattcattagcaaataagccttttcgggccgattagctttgcaaagacccttgagaagcttgttatagctataagaatcaggtgtcattccatcactctccattttcttcatcaatttctcagcctcatctaacatcaacccatcacaacaataattcaacaaaacattataagtaaccaaatctggctcacacccacttctcttcataaaatccttgattgcctgagccttatcaatcctaccaactcgacaaaacccactaattagtgaattatatatcaaacggttaaactcaactcgacctttgaattcaccaatactaagttcataagccaaatcaactttcccaccatcacacaaaccaatgacaagagccgtacaagcaatacaatcaggggtaagccctgtacttatcatagtacgccaaactaccacagcagcatcaaatttcctagctttacacagcccatcaatgagtatagtataagtaacagtatcaggctctctacccttctgaaccatacaatggaaaactttcaacgcaaagtccacctggttttctccacacaaaacattcaagtatatattaaaagcccaaatatcaggaacatgaccaagcttatccatgtcttccaaaagtttctcaataagaaaaaaattcttaaccacacaaagagcagaaatgagcctagagtaagtaaaggggtttagagaaaacccctgagggaccattttgttataataatgctcagctaaatcgagacgcgaatggcgggccagtacaccaataaatcgattgtaatcaatgctaaaaactcggcattgtgattgagtcatttcgtcgaacacttggatggcttgatcgatgagaccagctttgacaaagtaggctatgcgagaacggtataagaggcggtgggcgccaagagtgtgaatcatatcagagggaatgcatatcaaaagagttagaaatggccgcacctgatttgggtctcaagttggctttaggcctggctcagcatcgttccggcgggtgaatggagattggagatgtttctttctgcttaagtgggggaaggaagtaaacacccaactgagcaagaaagagaatgtgcttcattttgggggcccagtagctaaccattttatgctttcttgggcctttttttcccacatatgggcctcttaaactcttgaccgttttagtatttttttgggaattttacaaattttgagtaaaggtttacatttagtggcgaaaattacatttatactgtccttgccttttttttttttttttcttttatacagtagacatcaaaaatcatataccatgtctctatctttcacattcacggacagaactaccccagcaatatgagaacacccaaaaacaattattcattccgacaagatggaacaaaatagagaaatcaacgtcaaataaataattatagcaacgcaaatgtaaaaaaacactaaaaacaaattaaaaacacaaaagaaaaaaaccaatcatcttctgcacagcctcaac

SEQ ID NO: 42704 - DNA, 4541 bp, Cannabis sativa
gttctgctaatcgagctgcacatgttatggcacgtcagtctcggttgtttgctgatcgtatgttcacgagggataatgtcccttcggaacttgaagatgtactttcgagcgattgctcttgagttaatgaagttgattacttattcaaaaaaaaaattatatgatatccaatacttaattataccaacaaaattataagacaggtgaaaaatactggtcatcaataataccaattgtgatggcatttgaaaattataatacgtataattatggtatatttcaaatatacagtccccaatattcttccatctaatctcatccagtaacggagtaagcttacttagcttctctaccgtcttgctttctctggtcatggcatgctgaaatctcaatgacggttgcatttggagtagtcgcatggaggagccacctcgttcatccccattttcctgtcttgtgtattcgaaaggttttcttttttccatcttttttttttcttattttctttcatattttctcggcaaccaaacggtatatgaattcatttccaggtgcggtacagcaactccaaattggcggttgcggaaccagttagtaaagataggaagaacgatggtgaagctactcctcgtaaagataagaagaaggaacctgtagaatggaagaagttcaattccaaggagttgggtgttaagatgtcatcgatttcgaaacccattaaattggttctaaatgggcttaggaaaaaaggtttgtagtttgtaaattttaccattattgtattcttattgcttggaaagaacaaatatttgagtacttgtttgtttttcctttgatattgaaggatatgaagtgtaccttgttggtggttgcgttcgtgatcttatcctcaagagaattccaaaagattttgatattattacttcagctgaactcagagaggtcagttttctattcattcaatttccaaacttgtttgtgtattttcactaggttgaatcatattatatgtatggcatcctcaacaattttcaggtaaagaatacgtttgcccattgtgaaattgttggaaaacgattccccatttgccatgttcatgtgaatgatatcactgtggaggtttgtcacttagcttaattacttttttttttttatcaaaaaagaaattttcattaatcaagacaagcatgttacaaacaaattgaatcaaccaaagccaactaaggccaaaacagacaataattcctcaattacaattgatcaataaactcataagccaatctatctctagctgaatgattccctgtacaaaccattgtgatcctcactttgatgcttctatttatcagcttgccaatatgctcaattgttaagcacttcctctcatatatacaaagatttctgttaacccattgctgtatacaacccctgcctaggccgcataagctatctcagtaactaaactccttgttcttctctgatttacccaataattccactcatcaaacttcttaggccacaaagcaccaccaagccacttctgaactgaaaccaacactctgccggagaaagaacactcaaagaataatgggagtgactctcctcttctacttcacacactgggcataacagagaatcaacaaatacatgtctcctatcaagcaagtctctagttagaagatgaaaataaactacaccaaacaaccttagtgaattccacctttgtatcattagctaaaaagctttcatacatcagattgatcttcaattttcccattttccctgcattaagaagatcagccagggagaaactatctttgagtttcataagctttctccaataccagcttatatctgattttaactcatgaaatcaaacctcttgatcctttaagtatacactattgatccattcttggcttaattacttacaaagtactaatctttatgcatgcctttaggagttaagtgtttatttttactattttaaaaactaaatcttgttgttctttgaataggtttctagttttagcacttgtggaagaacttctaataagaagttccatgacaacttcagaaggcctcctggctgcaatatggatgattatattcgttggagaaattgcttacgacgggacttcactattaatgggtgaactctttcttccttggatgcttttaatgattattttattagttgtacatttagttaactttttccttttgtacaggttgatgtttgatccttataccaagatcgtgtatgactatatgggagggatacaagatattagaaaagcaaaagtgtgaatgtatttcattgttgttccaattctgaaagttgtaaggcagttctataattctattcagtgctcattctcatgagttttttttttcttatgtagatgaggacagtagttcctgcaaaagtttcctttgtggaggattgtggtgagtttcaatttctttatctagaacggttttcatctgtttggtatcaactgtttgtcatctttttctgtactggttacgcagctcgcatattacgtgcaattagaattgcagctcgattacgtttcaagttcactaaggatctagcactttctataaaagaactgtcttggtcaataaaaagacttgacaaggtattccaaaacttggactcctttcaacagttatcttattatcagcagcatttggtttatcaactcattgtctactaatgctatagggaaggatccttatggaaatgaactatatgctggcatttggatcttcagaggcttctatgaggttattatggaggtttgggcttctagagatgcttctacctgtgcaggcatgcagcttgtctttatctgttcaaatctttttttcttttttttttctctagggaccttcgtttgaacacttagttgctccatacaggcctcatattttgcttctcaaggttttcgaagacgtgatgagaggacaaacatgcttttggtaagtctaattttccaattcctgtcacaaatgaaacataaaatagaatttggattctttatttgttacattattatgtttctgcatgtttcgttactagttttagaaattggatttttctggttcttaagttatggttatttaatgtggctgtattttggatttaatcgtgcagtcattattctccaaccttgataaatatttagcaccaaatcaaccttgtcatagcagcttatggtaagaactcactcctattacaacttagtttgatgaatattacaactctttcttacattcaacttgggtacaatggcagggtgtccatttttgcttttcacatggctctggttgagcagcctcgagattcattggttgttgctgcatttagcttcgcaatttccagtggcggatcactgtcggatgctgtaggagttgcaagaacaatcactcaacctcatgaaacaaggttctatgagatattagaacctgtgaaaacgcgatcaaaaaaagctttggttgatgaagtccttgatcttgcagcatcagtcaaagccgtattacgcaagatgacagaccgtgattatgtttcccaagcaatgatcaagttccccaaagccccacgctcggacatggtgagccccaaaattcgttttggttaaaagtacaagtgaacatagcctgaaacattttcacatataaatttgtttttgcaggtttttatcccaatggcgttatgtttaagagtttgcaagatatttgaatgtaatagaagaggttcagtgcccaaaattggtaaagggattgattattcttacttggcattaggtagtttgacagaggttcaacatttatttgcaactgttgttattaatacagtcttccctgtaaaccaacaacgttaattattgtttatctcatacaaatgccacccaattctctgtatatattaagtgggattggttaacctttatgtttagctaaatatcatatctcatgcaacttctgaaaaaattatgtagctgtattgcagtgaagcaaacacttttagagttaaagagttagaatggaaaaccataattactacctgcattcttaattcatctcacatatttacgttttgagagaaataaaactatgttcggaagagggagagatgggcggatgtggagtgaagaaggaagataggtggagggaatgtctccctccaaactttaaaaattcaattcctctattagaaggatagtaggaaaaaaaattattaattaataaatataataggaaaattttacaatgcaccccttgaaaagggtgtatcgatgcaccttttactgtttcggtatttagaaaaaaaaaattagtttgaattttttcttttatggtcgtataccttgtagtaatttaagatatcctgtaaaattctgagaagttcagaaaaagttaacatgcctaaattaggattcaaaaggtttgttgcactcgttactttttttttatttattttatatgcatgtggaatagacgatttgaaaattgaattttatattgtaaattat

SEQ ID NO: 42705 - DNA, 6318 bp, Cannabis sativa
gctcaaatctctcagttttgtaaacccaaatagctgtccaaaatctgactttttcccataaatcttcaactgaggcttggaacaaagttaattattgattaggtaagcaatatggctatgtgttttggataatcaagagtagagaattcaagaatttattcattcctatgcttcagtgtgattcgcagctgtggctgtaaaaatcatggttgtgttattatgtatgtgttaagtcttgttgatatggggtgaggtgaaagtatgttatactggcattttaggttgtaactcagatgagatataccatcttttctccaacatctttgattctcactcatcaaatataaataaatgactatgtgatgtaagagagtttaaaggaatttcagttccttatttaggtcaggaatggcaatattttctgtaattgtttttttgtttgttgttgcgggtgtttagctcactctacttctgtatcatttctcaaattgatacaagctgtttctttcttagttgcattcaatgagtcaacatgaccctgaagacaaaattcttaaaagatcttttaaagagcaacaagagagtgactagtgtatacatggaatatgcagagagaagaaaataatttacaagaagaaaaaagcaaacctgaacccaatcatcgcttagcccataactcctggcttttgatagcaatgtcggatatagctcaacctctaaaattcttacaagaggcattggccttttaacactatttatgagaagaggaggcccacttccaccagttataattttgtcaagaacttggctgattgtggaaattgggatgcctcgaacaaattgatgatcttctgaagtggtcgacccaaacttcagctggaaatgagaataaaagcataagaacatataagaatgtagttacaaaagagatttacttcagaatactgattccacaattaaaatcaatgaaactattaaacaggttttaattggaaatatagaaacaaaagaatgctgcaatctggcatggtgtaatgcatgaaacatctcaatactgctttaataatcacaccaaatctaccaacttccacagaaaacccaaaagtgtccccatctccctccctctctctttctcttgcccatctcttattaacctaaataaattaaaaaggatgaaggaagataagaaaagaatgcggcacggcttgggttcgacaagtttaaggatggctccttggggttgtgaattcaccatttgtttccttaagcgttttcttttctgcatcagtaaagaatggaggatcagacacgtcaatatacgtgctgcgtggaaattgggaatcccaaaagaaaaataggggcatatgaagatccaagatgaggaggattgtgtacagtaatttaatatggatttcaatttggtaagaaaaaaaaaaaaagcaacaatgcttaactttagaaaagaggcaacaatgtgtgttttaaaaagataaggaggaaaaaaatatcctcatctagaatacgtgcacaaatccaaagatcctgaccgaaaaaggacaacagagtttctatattatgcaaattgatccaagagtatcatgcagaaaattaagaaagtcttatctagaagtcaggactcagggagtttagaaattcaataaccagcagagtatcatgcagaaaatcaagaaagtcttatctagaagtcaggactcagggagtttagaaacccaataaccagcagtatttatgagaaactattatcacgtatagatattcataaataattactatttaaaagaatcttatatctattttatcattttagggcaggaaagccatgtacttcagacatgccgaaaataaaaaggacttgataactaagagaatagaattaattcaagttcatgaaatgaaactaaacaatatgaatatttcatttgacaaccttgactatgataataagaagatacatgaaaagaatttaaaaaggagacctgagttgagaagcttccccatatagcttggacccttccctgctcatcagtcaggacacccgaaaatgaactaccaaaatctgaaaggagcaacaaaagtaaatccagaatgaacccaaatcgaaagtgtcatttttcaggtccagttttgatttagagtattgaaaccacaattaccagtatcaagttcaattacttccatattggttgctctgtaccgtgggcaatcagctgagccaatatttaatgcagcacatgggttcgtaacaatggatttccgggatgttgcttgcaggcttctacttaaacccacgagatatactgagtctccacggcgtaatggctctgtttcaaagcgtaatgttttgaagtcaatatagcttgcaaaaatcattttttgtgcataaaaatagttacagaacacacatcatttgcacataatataactgaaaatataacacaaaagcaatattaatattcagttaaccaggtgacttaatcagatcatttaggctgcttcgatatttttcatacctaaaatagtaatagactttatacaaccctatgctagagtagatatatatataaattaacaaaataccaattatgaaagatagtggtcagatctcctgctgaaatatgtatatgggagataattttttccaacatgaatacttttctttctggatgctaaatataattttttttaagatacattgtcatctagattaggattttaggccataattaagcattttaaaaacttaatgtaattgaaaatgcaagaagggtcgagggaaacaaaatattaaacacggtaacctgtaaagtttcttgtacagatatttccacacactaaacctagaatcaaccgaaccaccaaagttgtttattcatgacaagatttagatgaaggaaatgtattatgcttttgcaagaaagagtatagagctacagaaaactgaaatctacatactagttttacatcgaaagcacgaaattgacaatgtacagcaaagagaaaaaccaaccaggaagtaactcagcggcacgaacagctgaggcaccaacaggtccaagagcagagggatcgtatgaaataagagcatagttgtgagcaggatggagaaaaactacctaaaaatgaagcaaatttcagaaaaagaaagaaaaagagaatgataaaagaacttaggcaggccattaaccgctggtgattacattttcaatattaatagattcacctctcctggaatttcaatgggaaatgctgcgaatgacagcatcacatctgatgctgatattgcaactgtgttcttgtctaccgcagctaatcccatgttccctgagtgatatattactacaccagtaccaaaaaaatgttgtgaatggacgccatcaagcatacatgacggaggcacataaacctgcaagcttataagattatgtagtttagattggtttgaggagtcaaatattagacatacaacatatctctatgcaataaattattcaaaaatgaagaatcaaaagtctcaaaaaacaaatctaaattaaatcagtccacacggtgtagcgattgcaaaatcaactcttttagaatcttatttctgatcagaaatataattataaataataataaaaaaaaaaatcaactcttctagaattagatactgtaaaacatactattgtgtagtgttacatataacatatcaatcttttttaacatttattacccatgcacaagcacatgcattaggcatgtgtattcatactagtatatatacatattaacatattttaacacaaaatacacaagcacgtgcattaggcatgtgtattcatactagtattatatatacatataaacatattttaacacaaaataccccttgtacattaattttaagaaaaatacaaggatgaggaaattccacaggtatcacagaaacaaaaaagtgatacagataaaacaaaattaagaaacaatattccaggctcttgatacactagagaattgaactatccattaggcagccaaaagccacccatacagaaccaaatcttttccaaaagacattatgtcttcaccttataaatatcttttgcatacagataaaatgtataatgtaagttctgcagttttgaaaggacaatttggtatttagttttatatctagcagtacatgcttccaaaacaaaaatatacagtattctttcaacaacataagcagcaggaaacacaattcaaaagattagctacataaacgagttaagtaacaacagattgaatcagacatagctaggttaatagattattttagaaaaagagaaagaggccacttgtcttagactggccccccacgaagctcagttaatagatgcatcaaaagtttcggaggaagcaacaacagaagctggcaacacaggccgttcaggtactcggattaaaatatagtataaagtctctaggttattacctcaaacataaccaaagtgggttctatcattcgttcaggaaatgaagcattagcagcaacaggagttgcaccttgatattccctcaccatagcattctccattgtaattggatcctccagcttagcatttcttgttccaggcaccgtatattcagcagcaagatttccatccacagacagctcatgcacacgtcgtttcttcacttcgagatcaacttcaacccgagaatttgtttcatctaagacaagttcacagttggtttccatacttgcaacaccatgaccatcagtcaattcaaggttgtctggattcatgtgttcaatacaagtgccctcagtgcttaatggtacttcctggccagagagaactccaaggccattcacagaagatggtagcatagagacaggttgaaaagcaggcttggcattccaaagaccagtgctatcatcacgcttataaatttgagggggagcataccactcatggcgatctactgtcaccaagactgactgatcataagagtagaaaaagatagtaaattcccatgcaaatccataaaaaccaaaaaagtatattgatgatagagggatggagatgaataaggaacaagacagactgctacaaacaataataataacatattttcatcattatttatccatcatcgcaaggaaaagagaatccaaacaaaatcccattcattctcccatcaaaataaataaccattcaatacatgcacaagttcttgaaatcgcccaacataattaaaacaccaccataaattctgaacaaaactacaataaataaataggccattgatatgctccttacaacttctacacataacgtacaaacaaaatagcttgacagggtcttactcattatatcattataaaatttaacatttgttattcatttatacctagtctctcgcatttatctactactaactattttgcttcgacatactttgcactttggcaagtcgtgctttatcgaaagaaacttctaactttggttgtttattcgttttctttcctctattgtattagaaaaaaaaatcatgttatctttcactgattggtcataggtccacactaggtccactaccaatgtttgccggtgaataaaacaaaatcaggagtgacggtatagagaatatgctttcacttaagtttcctcaaaagagaagagagagagagaactggatttaatgatttggagctaaaattatcaataaaacagaaatctatgcattgcttaataaacatctaatcacgatttccaaaaataataaacatataaataaaaaccataatctgaaagtgaataaaaagttttccattccctacagctacatgaataaaaattttaaagacccatgaagctgtccagaattttattttctcccactagtcctttgaagagctttcctttccttcaaaggttctggtgtttctctcaatccatactacccacagaatagctaatattgctgtcttccataatttaatactacgtttgcacccatccagctactctcaatcatttaggaagcccaacgaggcaatatccatgacatctcaaatttcatacacaaataagaccataatctgaaagtgaaattacattccacaaacaaatgttcgatgagatacccacatgccttacaacatacacaccaacgtatcccgtaggttatctgcctttccatagcagctcttgatcactttgttccaaagtgaattggcctcaagaggaaacctacataaccacctcatgagcaaacctttatttctcgtatccattcttcctatacccaaatcccccctccctcccc

SEQ ID NO: 42706 - DNA, 2728 bp, Cannabis sativa
atatatttcaaattataaatacatttataatctgtattgctattgtatttctaaccctcttgttatttttattccaatattgttattatataatgatttattaaaactaataggaaagttgccagaaacaaataaaataaaatgaaaagataagctcagagaaaataaattattcaaattaatagatgatagacttgttcatatacagagaaattaatcacaaacaatcaaaagatgaaagagtaatagaagaataaccactaattaagctcaaagactagtaaatatgatctatatatatcctaatggcccaaccaaattaagagtaatggaaatggccttattttataattacgtactcttaaatgttataaacagaattacaattagaggttattcttcctctcaatatagaattgcatgatattatattgccttgggaaaacagcacaccctccaatttatcaattaaatgaataaattccatcactatgcatactgaaatcatcatgaatatttaagcatacatcatctgtactcccacagattaagtcatgaccaaatccatttcctgaaatttcatcctcatcaaatttaaattctgagtgaagcaagtcagaatctgaaaccccatttgaaaactggtcaccacaaccaccaaatatgccttcatttagcaaaacaccatgtcccattccatcttggaaactcaaactgtgaccaaaattttctctgggaaccattggctggaccataatattagctgagtttggaccattatgactaatactgttgttgttgttactattattaatttggtctattgaaagccactctgcaaaaagaagctttggtagtgagctaatttttggctgttgttgatcaatactataatgatttgtattattaaataatacagattgatcattatgatgaagtaatgatttttccaccatttggtccaatgattcatagcttggaattcgattattactattagttttttctgaagaaggtgaagactctgaacttgaagtggtgcattgagttttagtactctgttcagttaataattcttcttcagctttagccacttttttcttcaaataagaatgccaatagttcttaatctcattatctgttcttcctggcaagtgttgagcaatttgagaccacctatattcattgaaaaatataaattgattaattccttcctaccctcttgtaataattattactacttgctttaaatataattatccatatattattactaaatgaaagaataatctgatgcaagtcaaatgttttttttggttattttaatatttttgtgatgtcacagcctatatatatatattattacaaaaaaaacataggggtagggtagtatagtattataatactataagtgagaaaatacatatcaaattagatagttttaatcagaaaaatattatagtgacaagattttgattcttttttttaataagggtttaatttattaaactataattgcagcattaaaatctaaagctctcctgtcacatagtcaatactttaaatttaatcaaactgcaaataaagcatgttatttattattttagtgtcaaccttttaattgattggacaattaatatgaatggtactaattttaaaacttgctttattatatagttacttaactattttttatttatttttttcctgtgttcatattcgaattccccttaaaaagacaaagacttgctgttttacaatacataatcatctagaaactgtagaaattagccttttaattttattattatttttctaaaatatccatttaaaacttaaaatgggaaaaataaaaggtttttgttgcttacttgttccctaacatgtgatgaagggttaagattgtctcttcttcatgttggctaaatgtgcctctttttaaccctggccttaaataattaatccacctcagtctgcaactttttccattcctttgtaaacctacacataaaatagtactttaaattttaatatatgattgattaagagaacaaaaaaattaacaataataactgatgatgggcactagcaaattaagtcatatttaaattaaagtcattgtcaatcgatttcacttaaaagatccgttatcaaaaattctattgctgttagagtttattttcaaaaaaaaaaaaaaaaattctattgctgttgactgaagatgccatccaccaactatttttaattaaatgaattaatgtatgaattttacaataaagtactattaatgatacataaaggttctttatttggacattaaagtaattttgattactaaaatcccccccttaaaaaaaaactctcaaccaaaatttaaaatatatgtatcttacaactgggacaataagaaaattagcactttaattatcacactaatatgtcaaataatatatatatatttttggaataaaactttgtcaaataattcataattacatattatacttaggaaaatggtctttaatttttagttatgattattataattagttcgtacaatactagctaattgatgacgaatgacatagtaagactaagagatagaagatgaattcaacagtagttttaacccattcaatagttataacaacaatatatcaaaaacatgtaataaccagctgaattgttcaattcaattgggtatactaagtttcttcaattacctcac

SEQ ID NO: 42707 - DNA, 6514 bp, Cannabis sativa
tcttcaattattataaattacaaatataccaataataattttataaattaataattatctattttttcatcacttcatcatccatttttcaattattactcacctctctctcttttatatttttcatccatcctattctctctccttccgaccaaacatagcataaaagaacaagccatagaacttgagaagatttataagtttattatttcccaaataagagtaattaaaatagcaatgttgaccaaaaaatttctaatttgtaacataagatttaattctagaaaaaaccaatcataatattcctaataaagattctttggttaagaattgagagaaataagaaattaaaattcatagccagtttataaaaatcttacatatcaaagagaaatgattacacagtaattctaagctaataatgtctcacacaataataatccaaatccaaagccaaagccataaccaaaccacctaatactaaccccatttgactaaaatgtcacacacaccatatacaaacaaacaaacataacaacaataagaattatagagagaaatttaacatttttatgtaccctcctaagactagatttttgcatcatgacatgaaaatttaccagcacaaacttcaacatcaatggcggttaaagaatctaatgaaccgaggacgagcagcatacaaactgtgcccaatatggtctactcttcctcttttctcttttgatctcggtgggataccttgcaggcgagttccattctttaccgatctctctatcagcaccagcatggcctaggggtgattcgggtgccagaatagagtttactgttgttgttgttgttgttgctacattctcttttcggtttggtgactttgctcttgtctcaatcgaggcctcgcccaagaggtttttcaaaggagtgtgttgttgtttacctgtgctccagtttgttaccttggcaatgatctcttcgtttttctttctccctggcgattcatttactacttgagtgatcgaaggaaaccacccggcttgctgtgagttctgtcctgtctggatttcggctgcagtagctgctttttggccattcccgacgctcacaggttcaaccaatgtcatgaaagatggtggctcaaacatctctgatttgtcttgatgttgtccttcagaagaaacaggttttgagtctgttttctctccaattatcgcttgggattcggttgatggtaatgtttcggtatcaataacagcttgtgcatctgattgtatggaaagtactgtcacaagcatcaaacattagaaaatacacactcactcatggaaatattaatcaaacaaaattatttcgaagagagataaattacccgaaacagatccccagtttccctccaaactgtcagtttggctgattgaatcagctgataaatcagtaacagatccagccaggagttgtttgtcaattccttcttggaaagattcagaaccatgccctgatgtggcatcaaatgctctcgtagagctatcatcaatttcggttgaactattgatggatgacttcacatccaaggcagaatgagttgttgttggttccttaacattctcaaatccatcgagtttatcttcagtcgtctcttgaagtgtatccgaagccactatgacatccacactgtctgcagtacgagcactactcgaatctgctgcaggtacaacgactgaagactcatctacagacccgactaccattgcttttggctgcaccgataggtgttcttctacaggttcttccttgcttttaactccatcttcaacagacttctgaataccatcattctcgaaaccattattatcactaccatcaaaggacttgttagcagtttcgggaaaagctacagcatgcaccgagcaactttccttagtaggagcctcactgttgtcaactccacctacatagtcctcggtctcaagcttctcataatcccctttctgtaagttgttttccgagttaatttgaagctcgggaaccttttcagcagattcaggattaactactgtgtgccccgagaaactttcttttgcaacaccattgctgctggcaactacagtttcatcgatcacatgtggagtagtaacaggatcaccagcatctccagccaaatcatcctttccaaattcgattttttcatagccagcatcagcagcagttacatggctcgtagtatcatcatcatcctctctacctccttcgccatgagtggaatccttttcatgaccattcacaccaggtaagtgggatgtttgaactattccttcattgcccgaagcaataactgaatcttcaacagaagagaccgaaaaggttttatccataggaggcatcacgaaatctgatggggttcctttttcatctaatctttggctttcagtgactttgcccgtgacctcggacatattaacttcctcttcagctggcacatctttaaccattggcacgcttcgactgtgatccagttccacactatcttccaaaacatgtctgtccgaaacaaaagccacactatcttcactttggctattctccaaatcaagacctgtcttcaaagctttgtgatctttaaaatcctcaagcagtagttcagaattatcaactacatgtatttcatctggaacagaaagaacaagtaaattatcatcaacttctcccttctcgattaaatcaccaaaatacgtgtaatctactccttctgcactatccactgtagttttggtagtatcatcagaagcattaacatgttcaacttcagtagaaacatcagtaagctttccttccacccgaacaagaccctcatcggggataattgggacaggttctaaactcataacagtttcacccgacttggacatgaccccagttgtttcggcatctacattagtaggggagatcgtaaattgcacagcactgctatctaaataattgtctttctccacctccacattggtccccttttcagacaacgataaagagccatcaaccttttcaatctctaccgcaacatctttctgtgtttctgacttcacagtatgcaagtcatcaaccgaaacatttctattaacactaagaactgaatcttcattctgggaatctgtagaagaatccatcaccgaactagcaataccgtccagaggtttaacgctctctgcagtttaaatcattacaacccgaaagaaaaaggtttaagactttaatatattcatagaaaacgaacaaagttcaaaaaaattctacactaattgagaactattgaacccttaacaaccattttcatatgtgagactaattctttcatttccatcatttgaagcaatgacaataaatgattaataacattgacaccatcttaagatattgaaattttatacaacaagcgaaaagaatatgcattggcatagtctcaaacattataaagatcttcataaaaaaaaactaacaaaggtttatccaatgatccaaagttcgaaaattccaacactaattgagaacccttaacaaccattttcatatgagaaacaatgacaatgaaccatcttaagatattgaaattttcaaccaaacaaatcaattgacaattagtgtcaaaaagattgaaatcttaccagcaacaactatggtatcatcagaggattggatcatcttttccacattagtatccgatttcgcagcagcaccaccttgatcttgagtcactgcagcataataaagtcctccttctgaaaattcggttgcagcatcagaatacacatcatcttctgttttgttgtttaatgaccttgttcttccattacccttctcaaatggagcttaaaaagcatccaaatcaacacattaaattaatcaatatataatcataataaaacaagtacaattgtttcttgttattttataattgattaattctctaataatagtaataagaataacaaagatctactaaatctagcctaacaataaaacagaaaagcactaaaaaacaaaaccaaattatattaataataaaagggaatggataaggataaagattaagattaagattaagattctcactaggggttttgttgtgatcttctacatcatcagaaatagttgaatgaacacttccttccatatcaacaaccttgttgtaaccttcaatagttccacagatcttcttgtgtgctcttctgtgtttggaacttggttgtggctttggatatggccatccacatttttgacaaacataatttccatgaatatcttcaaaaaaaaaaatcaaaataataattagttaaaccccaaaaaaacatgaaagatcaagaaatcagtgtgcccagaaaaagttaacaaatacccagaagacattttccttggaaaatgaataaagcaagaaactttactgaaaaataggtaaaaaaaacagagaccccaactgaaaaaaaatcccaagatccaaaaaaaaaccaatgaaaaaatcgaaaaaaaaaaaaaaacagaccgtgtttttgaagttgttggttttccattgcttcaagagagttgttttgtttgggtagagagaaaaagaagaaagaaaatgaagacgaaagaggaaaatgagtcctttccctacttctaagtctggaaattcttacgaaccgagcgttgtacggactgtgttacaaaaaagaaaaatacgctgtttttgtttttgtgttttttttttgttatggttactgttggaatcttctgcgacgcggtacatgataacggtttgaatgattggacgtttgaaaaagtcaatgagataaagtcaagtataagggtaaaatggtactttaagtacgagtgtattaagagagagggaggtgtgattcggtgtggtggagctgagggaatagaaatttgcatgggcacgtgtttggctttttttgtctcttttgactaaatgtatacacaattacacaccattttttatggtcccgttatggtatatttgcatcattagtatataaagttcgggtatttattggaacacatttaataattttatgtttatttaagagtgtacatgggttgagtttttcggcgatcggatttagatattcaatctaattatatattagatgttagattttagggattatttcgtaaatacacaaaaacaataaaaaaaaaaattataaaaatacagttgtatgaaattttaaatatttttacgatttttttattttattacagaaaatatgattttttaatgtatttttatattgtacttttgtttattttttgttatttatatgtgattttttattattgtttgatgttgtttggaataggagattattgatttaattttgtggttggacaatagaattagagttgcatagatctcaaagagtcaaaactaaacaattaaattatggaatgatcttttgggtaggaatgaatatgtccttccaaaggctattcaaaatgaaccaaacttgcaataaaagtataaatgacttggtatttccttaattggttgttgatttgataatgttgattgcatgataaaaaaaataataaataaatagtaaaaattaattcttcaccgctatactaaacattattattaagggtgtttattagaccacatacaacttttttagacctattatgatcagatctaattatatattagatgttagattttacaatctgaactgatccaattaattttagtcattcaattgatctaacatctattagatgttggattggatcagttctatctgttagatgtatttcatataaatatatatatttattagtttaatttagatttattcaatattctagacttagtatttattatatcgaattaaatctattcaatattttaagtatagtgtattgaaatggattggatccatctaataaaaaaaaaataaacttataatgttaattttcatatacatatattttattacgtataataatataaaatctaattactcatctcaattaaatgaaaatactaattagtgtatattggatgtattggatttttagacattctgtccaacattcgattagatccaattagatattcaaaataacatctaatttaattctatcacaattaaatatttaatatttgacggtaaattattattgaattgaatcaatttatacctactttaattaattattttgttgtactttcttcttatttaatattttatttatatactaataattatctttttaacaaatttagatcctgatagtaacctattaagattattagcaaaaaataatttatttgatatttaaataattagaagtagaagtagagatacgtattctcaaaatatattttttttttaataaaaatagaaaaaagttgactaagaaaatcaatctttgaagaaatgaaggtcaagtgcctacgtatgttattcaaattcaatagtcatcttcctcactcacgtgatctcttcaacttcatttaaatatt

SEQ ID NO: 42708 - DNA, 5076 bp, Cannabis sativa
gtgaaccatacaacataaaatgatttctgatcttttataaattagtaaatctgattatatgaactgggttttatttagggcacaaaacccaacactaaatatggtcagattacgattattaattaatttattttctaaattaattgtcaaaatattctgacaattaatgtggcgcagatactaatggagtatctcacctataaatatatggtcttggtccctgaactcatcactcattctattcaaacaataaatttcatctaaagagagtatagagagcttggaagccaaattatccaatctaaaactacactggagattgaagctcaaaaatcaatgactagatgtattatgatctctttcatggtttgtatatatgttcgacatgtttatattatttggcatttcatatcgattgtatatgttttatttttcatgtaatgatttctactagatacaagtcatgaaagcagctgaaatacgtaatcttttaagtgtcattttgtgttaaattgcactcttttgtgtggtgtgtgagttgcatcttggtctaactttaacgtctctactctccgaatttttttaaaaattatttatttatatacaaatatactcccatttttttattttacatttaaattttatatacaaaattaaaaaaataagaatttttcttttgaaatccaaagatatttaattttaatcctacatattgaggagtaacaatttcatttgagaatttattaatgtttaattgaccttaataaaatctggcacaaaggagatgtatccaaatatttaatagggatattaagttttgagtttgcaattgacataattacacaaaatatcaccaaaatcatttgatgtaggtcttctttcaacaaattcaaaagctcaatctagttacaaaattaagacactaacagaattcctacgagacaaaaattataattttactaatattagatatttatgtcattaaaagtttcgttaggtttcttttgcttacaaaattttaaatatttacactgcaaatatcttcacaatcataaaaaggacaaaagtcctaccaacaaaacaaatgcagctatctaactttagttgtttaactactgaaaaagaaaacaaggaaacacacaaaaccgtgggggaatagctcgttgggtaaagaaagaagttaggattaaccattggattttcccttatgtctctctgaataaattctcgcaatttcctcaaaagacattgggaaggacgcttgctatgctaagcatgatttgaccactcaatgcgtctattctaagcaaatttcagtgtacgtatcattagccataaaggaatgaaaaacaaagtatacgagcaagaaggagatttctcatttaggtgtaataaaccaggcaggcttttctgtggctacatattttagtatagcgtagctataaagtgttaattgactaccttccaaagccgacaagcactaacaagacaaattaaaaaaacacacacacaagagccaaggttcctatcgtagatgtcatatattcttgtgttggaatgaccctcattttagggactgaaaatgaaaggcagagaagtgaagaaaagaaataaaggaaagcaagtgaagaaaaagtcctcgtgaagaataaacaactctaaaataatataaaggcatttgtgtccctcgtgagaagtgtcccctgtttgcaggctgtactcaataacaccacaaacgccttttctttctttctcatacaaagccttccaccttttcccaattggaacccactcggtctttctatctctctcttttctcgtcttctatttcacatgctcatatagtagtgattagtaatatagatctctctctctcttatttttctcaaagctatctctgtcctagcaagaaaatgcttcttaggcgtcaattttgggaaattgggcttctgtataagctgattttacttgtgtttctctcattgttagtatttggggaagctgaagtagaagtgagaagtagaagtttggtggtaattggttcacacgatgatttgtcacctagtttacatgagaaacagctaaagagaagcttgaggcactcgtttgacgccttgttttcgagcaaaagaaaagttcctaacgctgctgaccctctccataatcgttgaaccttttctcttattcgttttccatttttgtaaacaagcctttaaatgtcaaaacaaagaaggcttctctttcgataagtaatgctaagtttttttttgctgtagttgaagcaaaattaaaatgaagaaaatccttcttgcctccatcatccatcatgtactgtattcttttttcctctttgcttacactatatttgtagtatggataccaaaatatatgtaaattcaacatatgtttaatttaatcaaccaagaattttagccttgttaaggatttgtttttgggttgggttctgcaccctttattaggtggttttttgtctgcttctgtatggatttgatacttgtttgtcttaaggagttcgacatattctgatttagtctttctatgatctcacccataaagattatgaatatatgaacacaacatgttatcacttatgttagtcttcatagattgtcaatatattatttgccttaaatacagataatttcagtcttcaggtatatttatttgcttgtttgtttcaactgtcattcagttcagcgcctattatgcacaaaattacactgatcgcaacaaacacaagagaagtgctaaaaagaagactatattttgcactctttctttcactctctataattaaatgacaaatgtcaaatttttaaattaatttatttgtaattattaattaacgataataatacaattttattacaattatgtcattttaataaaattaatgcactaattataatatgaaatattatatataaatgtctaaataaccaaattaattattattattaatacttgattgtatttttttttttattacattgatttaatctagtctctttttgtgagacaattacaaaataaagagagctattctatattttgaatttcttcttcttcttcctcaaaattttcaaagccacggtgaattaagagtatatctactcatgttaaagcaatacctaacatagtgaggaagactatgtctaactaaattgaaagagagaagatccaggttcagatcttgataattctctgctacagacaggaatcaaaggctaaagatctaaatagaatgagtcattattattctactgtcatcaatataaatatttcttaatctcttatgtgtttatttcatcattttagaaaatttatatttaagatgttagattataaaattataattaacatacatgttagtatctggatcctggtaaaacaagttccaacaattgacctcagagccatggtaatgatttatttcatgaaatatagatttaaaaatgtttgtatgatttggatgtgttcatgttagtttatgtgcttaactgatgattgaatgttaattacgaattttctacaacaattatttttatttttgttctggaagtattttttctagaatgttggtaaaaaattaatcaatttaggcttttacagatctcaatttggattaaattgagtgagatatgattttttgataattggttgcaaggctggccgagagaccctacttacgcgcgcagatcagacaagattttgtctaaaaacctcggctatgcgcgcgcgaacacctttttttttttgcctcttttgctcggtcaggtccgaattatgtgccctaacttgcatccaaacttgatttgatcatattttgagttttaaaaattattttttaatgactaaaaagccaaaatttgttaatttattttatgtagaattcaaatttcaatttaaaaactaaaatatcagaataaagttaatatttatttattttttaaataataaaagttgtttttagatattaggaggtttaccaatttgaaaattaatttttccagataaatttttattatggtttaattatttattattttattatttattttaaattataagatcaaagattagatattagttatattttagttaaaattgaaatattatatctaattatcttattagtaatttaattaataataaaatatgataaataatctagataattttaaattactaaccataaatatcaattttttcaaattttgttatttttaaataaattttattaatttaaactataagtgatatcccaatttttgtcctcctgacgtggcacagttacatggacaaaatcagtgcacatagcagtatagctcaccaataagaaggccaagttagcacataagcaaacgaagaccccgacactcaaatgggcatcaagtgacagaccagctacctcacaagagctggccgacaacccctggtcggccctatggccagccaaccttgagactgcaccatggcgggccagcttgccctccacaggggcttagccgaccaagacgtgtcctgcagggtttcctgtgcacttctacacatggagaacatcctctgggctgcgaattgggccttaaaagcccaacagaatagctgaataatatctaggttcaatgtcattttgtttgtaattaactaataaaatatactaatatctagggtttcaagttgtaatctaggatttaggcctcctacataaaggctttaactctaacctagaaagcctaagcttagttaagcctaagacttgcctccaagctctaagcctaagtctgacaacttctctcttcttcacttcccctctcacacgcccatacaagcattatctctacacttaagtttttccattcttgattcttacattgtattcctaagggtgctatagtagatcccttctatagtgatctggataatattaactcttgatattaatacaactaaagggggagtaggtcattacccactatcacaagggggccgaacctctataacaaatctgtgtgtttattacttttcatccttgtttgtgcaaacacgtggcaa

SEQ ID NO: 42709 - DNA, 1563 bp, Cannabis sativa
ttgttatttaacaaaatagagagttcaattaataatttttgcaaaacacagagtctaaaatgatatttaccctttttaaaattttattaaaatatttaacacatttttttttcttgttcaaaaaaaatattatagttactaaaaaagtagaaatttaaaaatttaaaaattattttattattaaaatattaagagaaaattattatacaccttaactcttcataatcattagatggattttatcaataactaaaaaagtatcctcacaatttagccatccctactataatagtcatgtcctataattatatgttagatattgttatatatttatgttaacaatttgtacaaaatcttatattatttacaaatcagcagcacaactcttggtggtattgaaccactggcgagcctcatagcaaggccaaaggctgttataatgttagaactccaatggtactatattataccaagagtcaatgtattgcaggacagagcctgtcaagtctcgacaactaaccaaattaaaagaatgagattacaccaaaaaaatacatctaaacactaacacaataaaatcttccattacagaaggaacattacacgcgttgagctcccaacaaagaagatctcaaacaacgacacatgcccaacacttgtcaacataccaacccatactactaacctatttagggactcaagtttcattttctttttttttattgttggaaattgtgaatttttgctacctattgtgggccctcatattttgctcaagagaaagagataacaaaatatatctacatttcccttcttctaccttattcttgatctaccttagggggtatagcttagaacacaatatacaccattaccatgagacttaatccaattcaactatctcaagttttgtactctttgcttttcatatcataataataattctattattataaatattacccaaaaacttctctagaaattaagtattcatcaatggagatttcgtgagattattttcttagatgtagatctctgtccctccaagacttggatagggtattaattaatttctagaactacttgacctgaatatttgtattgcaaaaccaccacacttcaggtatatttaaactacaattttttcttttttgcttcttcttaattttcctctatgtaatatgtagatttgtttgtgtttgttgccttaagaattaataggtttaattccatgcatagtgtttataatatgaatgataatatgcatgtaattaaaagttatggggatttattttttgttttttttttttttatttttcaaaaaattgtatcgatcaatccctataattcatgttcttctaaaagaagaaagattctcttggtctatgaaagctaaacccccaacaacaaactattccaaatttggtaacatatacacgactagtagtgcagatatttacacgtttcacatcattgtttttgtttgccccattatttacactctcttattattttatttgttcccactacaaattatataaaatttgattattgttgacgtat

SEQ ID NO: 42710 - DNA, 2395 bp, Cannabis sativa
agatagatagatagatatttatttgctttatatatcattggtttatttggttttgatagattatttttgtaataagtttgctttgtataaataattgagaacagtcatgctctggtgactgtagcatagtagtacactagtactagtacacactatttattactttgtgagtatagttattagttattgatggtgttttttgattatacatttgcttctaattttgcactttttgacatatatggagaaataaagctgggaagaaggaaatgaatccacttgacaaaatattaccccaaataattcaacgaacaaagttgcaattgaatgaaaaatttataatacattcaaagctacatgaaaataattttatataacgaaattttctggctttgctagtgtttattgcccaagattacacattaatcatacattgatcattataatcgatctcaaagacttatcccatgtataaagaacatttttcctttgtatgtaatcattctactttcgacccctacacaccagagatggccttgcaaatccaagatttctttatttcctgatgtttcccaaatgaacttgaaaagctcaagtgccctgtccaaatgtctcaccccactccagatcatcctttcctcatctgaagttagaatccttcccatacacaaacagaacttatcattcccactactataaaacccaccacacagatccacttcgatatctctgacatgcccataaagataatacaagagaagtgtgaacaagcacttggacgggtagcccaaaattttagaaagtttcttctgcactaagctttcttggagccgagcttccttgtatccaatacttttatcaatcaaaacatccttgatttgagataatccttctttcatggcctcaagctttaccacatgatcaagtagcctgtcttcagttttcaaacattcaataaggtcattaaacatctcaagaacatcttcccatttttgagagcaagaagattgaaccttcttggcaggcacaagccgcatccatgaagtagaatcagggtcagaggaaaaggctgtgttatacaaaaactttagacaattggaaactacctgttgacccaagtgaactcctttgcttgggcactgattattcaaatagtccaactcgggttttaatccattaagcacctcctcaagtgtccttatcaatatgcgatgatgggtaacttgaggggagatcgttgcacgaatcaacttcctttgttgggcagaaatgtttaggatgttgctcactttggtgagtgaattcacaatcatgggttctctttcgcttggtttactgaaacagacaaatggttcaccttcacctacagaaacagctgccatgttagccttgacagttttctggactgatggagatccaatatagactctaacaagtgacttgaaattgtacatttttctttctatacgatcatcaatgatgattgaatcatcacggatattaacaagtcttccatcaatcaaatccacattctttaacaggcgggtcaatttcatcatctctggaaatgcattttcataccaatctaagtgtacgagttcttcatgtgattcctttgaagagtgataaagtatagcatccgaatgaaaagcttcaattcgcctattcctaatatacttagcaccagtacacatgagtttctcaacatgtttacaagccattgttgaagaaaatccaccataaacaatctgtaaaaaaaaactgggctttcagtcagttcccttattataatttatttactacatcccacgaaatggagaaattatttacttcacagaggcaaataatcaaacatatagtatacaaaaaaaaaaaaaagtacacaatgctaaaatttgaatgaaaataatctcaatttctttccagacaaagaaaacattatcataatacttgcaaaagaaaaattacaatactaggtagtttgaaaattaactaaacaaagattacaaatataccaagattaacatattcagccaaacaaagcagagtaaaaagagctgacctcaactaggccacatgttcaagggccctgggtccacgaacatacagacatggcaagccccaacgcacaaccacggggcaatgtgaccatgccagcgctgaaccaagccaagaaggcaataacgctccaatcacgataaaacccacttcttatttttccaatttcttctggcaaaaagcataacagattaaaacaatatgagaccggggatggtatttcagattaggaatttaaacttatcacgttttagaaacgactagagagaactgagcgagagattgatctcatctattcgccaacgagtagcagctcatcaaaagaagacgcaaacac

SEQ ID NO: 42711 - DNA, 2481 bp, Cannabis sativa
  modified_base (2436)..(2455): a, c, t, g, unknown or other
ctacaataatttatacagattaatttacaattattatatttatttatttattttagacaaacagttgcatttcaatcaaaatatacatatatattgcttcaatattttttttataataattaaaaaatattatttcaggttgtatgacaatattatttttattttcaatgaatttgttcatttaaaaaatatatatatttttaataattagcttaaaaaatgaaattgtttgtatatgttgtaaaataaaattcttttggaacaaatgggaatcctcaaataaaaaggcatataactttcaaattttgatgcatatttaaaagactttgaacctcaccatcatccatacttgaacaataaatggctgatttactctcatttagctcttaagcccgaagttgcgaaaaaccttttaaaatcccttaagtgaagttacattgattcaaaattattttcacaagacaaaataaggccatctgcaaaacaaaaatgagtaactaacataatacacaactattatgaaaaatgaatatcaagaaggttgccgcctagttactccatttcccaaaggaccttccatagtaacatacttcaaaaaagtggattcttatttccttagttcttgcaagtaaatcttggctaatagtattaaatggttgtgtccacccaaactcccctaccatctcgaatggcataaactctattcttcacttttctcgccttaataatttgattaaaagaaatggtgttctcattcccctcttttaacagattcaccttagccttttgacttagaaatatttacatgagcaggtctgtaatgctctttggctacaccatcccatgaagaacttcctcgcaatgaatcatttcttgcatagcctcgcaatcatcaaatattgagaccaataccaactcaagtatactaacctattacagacggaaaggggtgaatcactataaaattttcgtgttcatttttgataaaccggtttactttaattgatgaatacttgtgctcatcttgatcgtttatgatattctttgattcgttgacaatatatcgtgtcaacaatttagtgctttcattgagaacagtgagcatgagtgttaatcaccacttgccacaatggtcagtatgaggcggatgaactatgaggaagaagacactgacatccccatgaatgaagaaaacaccattgaccgcctggaggaatttcaacctgctgaacccgcttaggaagggacctctcagcgcctaggcaaacaacccatgcctcaggacgaaggtcaagtctgaggtgctgggaattcctcatcaccatcccacgatgtgagatgaaccactaatgttcatgaggcgttcatggaaaatgaagtgttgtgccaacacctagatgagactctcagacttaatagagagtgacaagagagatataatgcttaagaggccacaaggccacatcgatgtggatcgcgtgggcgtcttggtatggtgagaagaggatgaccccatggaagtcgcttaatgcgtcatcctatcgaaagtcaggagaggtttaggtcacaaatggtgacaacacaaagttgggaaaccacccgtaataccgtgcctcaacgaccttcttgtgagaattatacccatggtaggaggaatgaccgccctccatcacaacaacgccaacgagtaaccacctggggtcgtgagaacgaaaggaatgatgcacctcctcctatacaacaccagatttggagggatgtgtaagaacctattgcccctcataacaacgttccacatcccccacgaaaaggctcccatgaggaacaggacacaacacgtaataatgtagtcttgccttctcaactgtctcctgctcctagggatattggtattgatgagggaggaagaaattgtgtttggaactctccttcgccaatcaggttcctcccataaccaataaggaatcctaagcctcctcatactaatgcaccaccaccatatcaaccagcctagagacagaaatcatgatctagggaggcacctcctaagtcaagacttacctctacctccttgagacaggcgagaggactcacgagatgaatatgcttgttaggagcctcaacctaggggacatggatggaaaagagggtgcaccatctctcgcaataactatgtgtgcctgggaccggcacccagggaaactgaaccacaacatgcgcaacctcatccaccacaagacaatagttacttatcaagatcttgaactaccgcaatgcgatcatacgcttagtaggggccacgcctcgggggtatcaacaacaaaggatagtttcatggaggatagttaccattctggctcaagaagtcgctcattgagcattcatgacaatgctccacctccatactacgaggaaggaactgttggaaattatttnnnnnnnnnnnnnnnnnnnnaccaagtatgtttgattaacatccta

SEQ ID NO: 42712 - DNA, 4635 bp, Cannabis sativa
tttgtggaaattagaaggtttgttgaatttgtttttgttggtttaggatattgcaacttccattcagaaaggaagtttggactgggagagagctttgcgttgtataagacatgcatttcgcaccactccatctcccgattggtggaagcgtgtgttggttgtcgctccttgccataagcctcaagctcaagcacctactccgggtgctgttttcagttctgaaatgatttgtgagggaacagttgaaagatttgttgagctcttgaagcttactaattcaggcaagactttcactaattgaatatttttatgatgcttactactaaagtattgtgctacttcttttttttttttttttggagatttctcctctacaataactatggttgtttgtttttcaatttaaaatgttataaatgtgtaaaagagaggaggaaaaaaaatcaatctgaaattcatacctaggctgcttgaatatgccacttcctttggtctagttacattgacaggagcagatactccgcagaacagtttactagtcactttagtcctaattttttatcatagaggttgcttgtggtcaatacttaggaatataagaaatatttatcgtagtttttgactatgctgatatctcataccttgattcttgcagatatcaattgctggcaagagtggcgtgttttttcggatatattctactttcttattaaaagtgggtgcattgactttgttgattttgtggacaaattagttttacgtctcacagagggaggcgaccaccatattcttaggacaaatcacgtgacgttgctaatagcagaaattatccgagttgagcttgtgatcaatgctttgaataatgatgctagaaaggttgtctttgaaatgtgaaaataaacattgtcatcatgccttcttctctgttactatattattgacaatattttccctagttgtaggatattgtgaatcatatgtactacactagtggatagggcatatggctcatatgttcatagagaatgtacctatgacgttatgcattatgatttctcagcagtgaccagcgaatattttattgttgggtgcattgttcagatagataaacttaacattgcatcacatatctggtaggtggagacgacaagaaagattatgtcttttcatagagaagataggagttctgaccctaatactcctcacgggatcttgcttgactttataagcagttgccagaatttgcgcatttggtcattgaacacatctaccagagaatatttaaacagcgagcagcttcagaaaggaaaacaaatagatgaatggtggaggcagtcaagcaaaggtacttctatttctatatctttttgccatgaaggcaacattgctgctgaatacttgaatgtaacatttacattgcacatccgtgatccgcttatggtttatatgtctttttatatttaatgtggcttttgtgatttcaaagtaggatatttctacccttagtagctctggcagttttacttccgtgcacagtgatgtgcttgataaagatttcaagaatgttaagttgaataatttctatttcctcaataaaattgtttatttttgtggagaaatcaaacttcgtctgtgtaataaggtgtaaaggttataagttatggttgatacaaagtttcttctcaaacacgggaactttttcttaataaaagaattggataatggaaagagttggtcaatagttagattttggcatcagttttagctagtttcctttgttgagcagagaagagattctaagaatatatatgtggaagaattctttgataggagcatgggtttcacccccaccggtaggagcacgtttaaagcaagcccatggttaattatgtaggtcgtaccagttgataataaaattctttgataggagcatgagattctaagaatatatatgtagaatttttttttgataggagcatggattttgcccccaccagtaggagcatgtttaaagcaagtccatggttaattatgcaggtcgtaccagttgaaaataaaattgcttgtgtctgatgcaattgaagagcatccaaactagaaaagtgtaagcttaaagaataaaagaataggtaatctgctcatttaattagaaaacccagaagcatcaaataattctatttaaatatttttaacatggtaattacaattattttttttttttaaaatctggtaaaccataaaaaaatgagacttaaataaggcagaattgtttttgaaaaataaaatgtacatgtacttgtaaacacaacagttattataagaataaagtagaaaataataattttgtttgaaacaaccagccagcaaaatgatagacccccaatccggtatacatatggtaggcgcaagaactaggaggggatatgtatggcagtattatttggtggggagttaatgtgattgtttgaattatcttttgttatctgctttatttggtatatttaggaaataaattgcatgagagtggagggttgggacaggcttattctgatttgtattgagcttggacctaggagagaaacttggactgtcagaatttcctaaattatcaataatattcactctttttttcatctattttctgtgtttactttactgaggtgtatcacaaaactagactagagctcacaattaataaaaaaagccagttcctacaatcttaacagagtgccactgcaatcaaatctaagggaggatcttgacagatcattcccaaccatggatgcccaaaagggggtgcggaggcgaaaatgaatcccataaatagtcttgaattcattggcttggaatttgaaagattggtcaatcggtggtttatgaaaacggattatggatgtgagaaagacaaggttttgatgttgaagctgacaaatttcttgagagtttgatgtcatttgctgactgaatttggttcttctcttttcaatgcaatattatacaaacaaataatacgggcaactacacctactataccatgtacaacacatttcttaaccatttgatttattatcaatggtcacaaaattacccatacctatggggacaaagcaatgcccgcacagaatcaatgccttgtatatatgtgtatttattaattttcgaggctatttatttggaggctgaccctttgttatcacttgatttaattttttaaccttgttgttatgaatgagatcaattgtaacattcattttgaactgcagtgtttgtcttaaaggaactttgcgttagaatatttattcatggcctcttttcctcttttatgtttctttttcaattcaggagaccgtatgatggattatatgaatatggatgataggtctattggaatgttctgggttgtgacttacaccatggcgcaaccagcttgtgaaacagtaatgaattggctgtcttcggctggagttacagaactattaccaggatcaagcctacaggcaaatgacaggttaatggttatgcgggaagtaagtccactgccaatgtcactgttatcgggcttctccatgaacatgtgtttgaagctggcatatcaaatggaagaatcattgttttctggacaggtattcgtcctttttgctttctatcctgtctttgggttaaattatcaagatttatgtgagacttggggcactttatttctttattctttgctatatgtcttaccaaagtctatggtttaatttttaattaagtgcaggaccattaaaggataaatgctttacttcctcatgttttacgaggaaaaatggcatgtgtatttctatcaattatatgcattttatgatgttttatgaagtttttgttcttaatgttgacgctaagctaaagccaaacgcttcagttcccaattaagctttttaaaactttgttgatatgatatctaattgcatgaatgtggcgttttagctttaatgtgaagtatatgcctaaaacttttacattaaacgaatagagaatatacaaattagtgcagataaattaattaacttgtacgataatggaatatacttcagtctctgtactctccaaggcttgcatgatcttgagactgaattatttccaatttttgttagattttacttactcttatttgactacgtttttcctttgataaatgtcacaggttgtaccaagcattgcactggctgaaacttatacacgactactgcttcttgcacctcattccttatttcgctctcatttcagtgtaattttattgctttaagactactactgctctttagtatttttctgaacttctcattttcttgcctacacctgtttttgttttttaattaattttgttccagtgacgatagcattattcgtacatggtttatctgttttgttatattatctcctaatccttacatctactcaaatctaattttcctaattgtttgtagtttctactaaaacttcttgtaacttttctttttccttcttcattttttggtattgtagcatgcttagcaatttgcatcaatcattagctttcttcttttcccttatgtactttctttccaagcaaatttcttggcttatccgtttaagtatttcatttttcatttc

SEQ ID NO: 42713 - DNA, 3155 bp, Cannabis sativa
tctctctctctctctcttaccttgtgaccctctcttattgcttcctctgcactcctatttactacatcaattgccattgggaccaacccttttctcctaagtctctcaactttcattttgtaaactttgtctctgccttcaccctctttggagccagcctcctctttgttatgcctttctctggtatgtatgtcattcttactcagattctgttttactcgtttatgtcctctttctcctttctctgtactttcatttatgacttcttcaaggtgttcttattgggaaggagaaatgaaagtgggatcttcttgttaattctagattattttttaagctacttatttgataccattattgataaattggctggaaaagaaaaatgcaatcttgtattcaacggactgcctgacttgtatactgttcatataatatgttttctgtcattgaataggaagtcttttaattatagaagaagaaatggactcaaagttttatttgagtgaatagttgtttctcatatatagattgaggtcctgaactgttgtaaaagtttgtgccttatttaccagttgatgtactgtggttttatgtgaactaagttgagtaattattatatattttctatttctgtagtaattgggcattgtgagaaggattttatgactcccttcaaagaatagtgtattaagcttttctgttagatttctctttgcggaaagaatggaaaatatttttgaacttacaaaagattgacatgtgtaattatttcctctaacgcttatgttgctatttcctctgcattacttcagggttatgctaagttggataaagacatttgcaatcagaaatgggttctggaaacttgtttagaacaatatttagattaaagaaatctaaagttggttcaaaaccagtgaaggtaatagagcttctctgttttatccttggttattttctgtcttaaaataccaaaataaaagtgggtacatgaatgagatttcttatttttgtaaaaacaggagtccacaaaaccaaatggcataaaagtgaagaataaatcacataagggactcagtcgtttcatgaatggatcccataacatgccaattgaggatgtagctgcaactcggatacaaactgcatttcgtgcatacaaggtatgtttgggtacacgttttgttcacatgtctttagacatttcaagattgactttaccaacttacattggttatcaatgtaagctctggtctatttcagagacacttcttagaaatttgatcttacattgtttatgagaagtgaatagacatggtttctcttcaaactgtatgatatttgattacttttgacttccatttccaagtgccaggaaggaatacatttctgtctgttactaaatagagttcattaacatagattctttattgagaattgctttttcttccatgaaaaccttttcaaagttaacatggtgctttcatgtactattcatgtttcttgctaagtgtagtacaatttattgttttgtatgttacaggctagaaaagctttacgccgtttaaaaggggcagtaagattacaaacacttgcccaaggctatcctattaaaaagcaatccactactactttaggtcttatacattcatggtgcaatatacaaacccagattaaagctcgtcgactttgtatggtaacggaagggcgggtaaaacagaagaaactaatgaatcaacaaaaacttgaggcaaagcttcacgacatagaggtgagatcacctattttcctttgtcggagataagatacattaagtgtttcgaataatcaggcacttcaacttgcttcattaacttctgatactattttatattatctcattctacttgtagttgtagttgtggaggtagaaagaagatattgtttatagaattttattccaactttggcatctatgattaggacttgctaacaatttatttttagtcaaatctaatgcttgaataaatgaaagattacaatcaataagttggagaaaaatcacccaagaggattagctacaatggtaaggcatggggtttgctcccacaagggctgaggttcgagtctctcctgggtacctttatagcaattgttatagtttcctgattccaaaatattgtagggcttggcagtgatcatagttccaaaaaataaaatcagttggagaaaaatccacaaaagacgaaacagccaaatagccagccaatgtctaatttttgtcccacagaaacctctatgtctacttcgattctttcaaagattatcttttttgttcctttcttgccaaatagtccaccaaatagggacaacataattgatagttaagcagatgatgacatgacttgatgtctgctacctactagcataaatgactgtacataagcttctgcaatttcaacagccacccatggtatgggtactttggtatcttgatcataagcacatacatatatatgtaatatgcttcctaaagttgctacaaatgttatgctaatagctgggattgccttcttagcttttcctgactgttttacagaacgtgctgcttgagttgcatcacccttggcagagtgtcttgaacgaatcaagggacactatctttttctctcttaaataatagttgatggatttcaggtggaatggtgtggtggctctgaaacaatggatgaaattcttggaaggatctatcacagagaagaagcagcagttaaacgagagcgagccatggcatatgccttttcccatcaagttagtttttcttagtgcttttccattacatttccttatctttgtacctgcaagacactcagcaaacaagctctaattgcagtggagagccaactgcagtcaaagccaagggttgggcaatgatgaacttggaaaagctaactggggttggagctggaaggaacgatggattgctgctcgcccatgggaaagccgagttgcacctcaattcatcagcccaaagaaaattcagagcaagcaggccaacaaggttagcaaaacgccaaaaactccaatatctaagacctcttcaccaaatgggaaattaagcaccaaagctcggaggttatctttcccatcttctgagaaacttgttgaaaatggagaaa

SEQ ID NO: 42714 - DNA, 2200 bp, Cannabis sativa
tgagacacgagaaccaataccaacctcttgatgagcagatcttcgagacctttcagtctggcgagcaaggcgaatctttttcagcacatacctttagtaatacagcaagcacataaaaatatatcagtcctcaactgatgcattatagaattacaaaaacagtataaaagtagcagaaagaacaatgcagaactcattctcacttcttcttttcgtgcttatgcctaacaagaagggcagaaccaaaagcccctttcccaatttgctccagcacgtcgtattgctccatctaatgtatttaatagtcttttgttttttctgatcaaataacaataaaaaggttcagtttcttacatatatagacattcaagaatccgcaaggattaaaaaaaaaaaaaggcactaaacatacatgtacccgcaacactaacaatagagcttattctaaacatgaatatctctcaaaagtacaaattattatttttatttgttttaagaaagaatatatgttggcttgaacaatcttgatcgttgtttctcgactgttggtgaaagaaataatctctaaaacatcaaaatgaatagcaaatgtgattagaatatatcaattcaggacattaataacactgatttcatcagtaaaatgtgtttgaaagaaaaagaaaatcacggagaaaggcattcggagatattaatacacaattcgaaactctcgtgagaaaaatgagaggaaatagaaagaaagaaaaatcaacattttgaagttcacggcataactataacatattgaactgttgaactcaactaaccaagtacaaattaagtaagtatttaacttgggtgagtgagttcatgcctggttttccagatctcactttatttctattcatcagaaataaactaactacttttttttcttcactttcctacattttcccctctaccaaacagtgcgatttggacacagagacagaaaagaaaaaaaaaaaatcaaaaggaaggtcatcacaagccacatataaacaatctgaaagagaaagcgagagagagagagagagagagagagagaaaaaacaaaactgaatctctaaatagaacatgaaaactgcaaaatgcacctcgaaaaagaaagtacgaaacgaaaatggcagaagacaaagataaagagtccaaaatctgaaacagaaagaggtgcagggagagagaatgtacctgaattaagagagagagagagagagggaagtaagttggatcgaaaggaaagagatcacaatgcgagtgaggtaagagataggaagatggaggaaagagctggaaaacgacaccgttgcagaagcagtcggagaggaagaaaaggaagaagaagaagaagaatcagcatcgtcaactgaggaagttgcagcaggtctttcgccattggattttcactcctagaaactgacaaaatactcagagagagaaagtgtagcacttatattgcagttaattaaatatgattaatgtgagtttaattaagttaaagaatgtgtttgcttcagctaaaggattaaactataaatttaaattaattaatattaatcattgcaattaaaagagagagagaaagagagggaagggggtcaaaatgagaaaaggagcgaagaaaagactgtggtgtccgagagttgagtgactggactgaggaggtaatataaaaataaaaagagttttaagtaagaagtagcagacagtggggaggtgggtatgtttctgtaaatttccccaccttcttgtctttttctttaacttcttagccttttatttattattcataatttttatttttttttttgcaaagtgaatattcattaaaaggaaaccaatgtactcataggaagttgtttgtgtgttgaaggtgttggtcttgaattctaaattatttgttgtaatatataaacgcataatttaaaaaaaaaaaatatatatattcattaaaacgacacttagcccaagctactacacaggaggtagcttcttgagaagaaaagtgctagtggaattcgaaatacgagctcacttgcgatagagttcgcaaaaccatttgaagtttttataataaaagaaagagaacatagttcaaaacttccaagcatagctctaatttgctcaatcattgagatgcatctccaatcaggacaatttgacactccttaaagagcat

SEQ ID NO: 42715 - DNA, 5368 bp, Cannabis sativa
aacatttccacatatatgcttaaataaaacaatttgactcattgtgagatcttgcacctcatcaatataaacaaaatccatttgatcagccttgtatctttcatgcttgagtcgagaatgaagatcattaacaaaatcagcaagatcgaattcaccatttcccattttcatcttttcatatatctgaaatatatcatatattctctctctcttttccagactgagattggagcaacgtccctctgacaatttcagataatcttcacggcttagcttactgtcacttgcttcaatggattgcagaccacctttgatatgagaaattatctctgtgaagactcgagaaggatcaagcttcttccttaacttgtcactaaaatgatgccaatataaagcactaaacttctcgtagttgacttccttcttccttatcaatgtctgaagcaacactgatcttgaatttctaccttgatcataagaaagatcttccccattaaggaatctttcaaaataagatttactcaatgttccatctagcatcattaagaacttgtggaatgtaatgaccaaagggtagcaagtagcaggaatgtcataaaaagagtctgggatgtttttgaactgtgcttcatcatctatatcatcaatatcaatcaaactactttcatctagattgctaccaccacaagcaaacctgcccaagtaacataaacatcatgatatatgattaaaatgttataacatacaatcttaagaatcgacttataaccaccatggtgaagcacatttacataccttttcaagtcagaaacttgttgcttaacggcattgcacagcttaggactaactgtaacaaaaagctgacgtaaaattttattcctcttctccacctgctgatcaggttccatactattttgactaacatggtcaacaacaccactgttcactccatagaactcatccatcgcaaagtggtgcaatttctctctttggaatagcttcgtggtcaaaacagtagtttttccagtccccgaccgtccaagtataaagctactttcattaatcaggacagcctccatttgttcatctgttacttcatatggaagatcaatttccctaccatcacggtcagatagcaagtggtttacgataccatgagacaaggagtagaatttcatcagcagcaaactctcgctgaccttcgaattttccacatagcttcttccatcagacgaggaaccaattaattcactctcagattcgttgttggagagatccttatgccgaacaaaatccaaagagggaggccaagtcttaggaatttccaaattgctagaaacagaacaagaacacgttaagaatacaatatgattgcagtatccaacactcaattagcaatgtgagctagtggctatacaaatacaaaagtacgtacccatcaaaagacttattgttgcagaggttgacaaaatcttctgtatagttgccaaaaatattgtcaaggcgttttatcagttttggtacgtcatctggatgcaagacatcccatatctttaatacttgcacgtagttcaaattctttgtgatgtccacagtgctgataactatcaggccttcaaccttaaatctcattatctccaaagaacttctacttcctgattctacaagcggtctcttgggcctccacccaccagatagcttaagaagaaggtttaaaattgacttttttctccggattgatgtcagctttttaaatgacttcaaaaagttatcactgaaaagaacctataatttggagtgacatggtgaggaagaaaaaattagaatggcacaagtaaagagcaactgagcactaaaaaaccataccttccacttagaatttctgaaaaacatactatcagcgttaagaagatcatcaaattgatcaagctctttcttgatatctaatatagccttggctaaatcctcttcgtcatcagcattatagaaacagtgacgatttttggcatcaatgactagtgcctcccaaatagattgactattagcaagtgtcctttcattacctagtatccacaggcaatgcctgaagaagtcaatagaataagtagctcacacttgataaaaatcatgcaagatcatacttagcaaaaataaacaaagagtatcatacctagctctagtgagagcaacattcattctctgaggtttggatatgaaatccaacgactggcctatactagatcttacagttgaaattactatgatgtcttcctccccgccctggaacccatcaattgtttttactttcacttgaaagccatcatttttttcatatttctttccaaccttttcttgaattgcaactacttgagcagagtagggagacaccacaccaatactaagttcacctcgtgtctcacgccatgctgtgtaaaaaccaaacacatgatgaaagcacaattaaacaactaaaaatttatcttcttatttgaaaaagaagaaaaaaacaagctgtcagtaatttttatgctttaaacagtaaaagaattcatttctcagtttatcatcttctttgatgacatgaaaagaaaattttgaattgatgtacagtgatatacagcttcccggcatattggcattagtttttttttaaaaaaaaaaacagaattttgtcagctaaaaacataagattgaaataaactaacatgtataagaaggtaaaagaaatgaaaattcattactaagttactaacaacataattatcattgacattttagcgagaagttcaaacatatgcatacataaattaatacctttgtacagattctgcagtattttgatgacaagagcaacctcaaccatatttttgcgactctgcccatcatcatctttctcctctcttccaccaataacatttataaaagaataagtaccgaacattgatcctggaagataatgtttttcatagcttttccttgtaacattaggtgcatccagaatctggttatgataaaattttgaatttgggaaagaactaattgaaggatgcattctgtactgaatatttaggagatgccttgaatggttttgggagctcaacctctgaaacaaacttcttccaaaactagcttcctccgaaatctgttaaagagagagcaatgcggacaataaaatatacattaattttttaaaaataaaaaacaaaaagagtagcaattggaataatatacatactttgctgttaacagtagctggtaactgccattcatcaccaaaaagaaccgcatgctttataccaggaagttgtagaggtatagttgactcacactctttcagttgtgcagcttcatcaatgaccaaaacgtccaatggctcgatttttatatggtgcagcttaaaagaactcgatgcagtggaaaatatcaatgaagctctttgaaaacagaagtctgttattgcttccttagatatgaaatttggaaaagtaagttgtttaagggaaccatgaagggttctcaacatagaaaggcacacatttctgacagacagcaaataagaattattcgcaaatgaatcagtagaatcatcaattacttcagcacaagaaaatatcttttctaggtcttcagaaatcaaactatcttcaaacaaaagtgtttcaaaacgatcaagtaactcagcaaggtttgtcatgttgtgaaagttttgatccaaaatgtaactttgtggtaaatgtgtacataagatccaaatgcattttctcaactgctcaacaatggaaacaaatctttttctcacatagtcaagaaatgattctaacttctctgtgctccctttctctttaattttactttcagagctttgttcttgttcttttatcaattcattttccaagaaaacatggtactgagaaacacaattttcaagaaagttaatcatggaagtgaagcaattgttccaaccaagtggtcctaaacactctgtgagcctttggattcgatgttccaaaaatatatcctcaatatctgacccaactttgagtctctccttattgccaaacagaagaatatctcctaatgaacagaacatggattcagattctgtaactatcttcaatacccgagaagccacttcggttattgcaacatttgttggtgcacaaacaagcgttctatagttcaacttcattagggaaacaagaagagtagcattagttttcgtcttccctgtcccagggggaccccatataagctcaaaagcatctctgttctcacagtgcatcatgtgaagacaggaaagaactgcactagtctgagactcattcatattggaagatagactcttcaccaacttctcatcagatatgcaacaattctcctcaaaacaggtatcacaatctttctttacctgttataaacatatataaacaaatcaagtgaggaagttttacacctaaacttctatcataaatctctcctcgtgaacgatatttacctatcaaaatgtgcaaaattaatagtttagaggcttacctcagaacgattacatagaacataatcaagcatcttcagatttcttgacatatgcaaagctttccaaactcttttgtttgtagtcaaattcgccaagaaaacaacgaacaatgatgtcttcatctgcatttctagttcaaactcctttgatgcatttactttgaaataagtagagctactatcatccccgttctcatcctcatcctcagtgataaacgagactgataaaaaggaccatgatctgcctgtcctctctaaatcagaaaaagtttgcggtatagcattgactaaaatcatgatgtctccaggcaaagttttgtaaggctccttactcctatcactgaatctgttcctccagtaatcaacttgaacttgataaacgctttttccatacggcttagtttcatgaaaatcaactacttcagcaaaaggtaatctatacagcacgtccatacttgagtataactgcactcgagtttcttccaacaaaggatagacaaaagatcccaaataatgccgaaccgattcaaatgattcaggaatcttttccacctagaaagaaacaaagtaagtttattagttaagtaaggaagcttgaaacttctatacaaaaatgaacggtaaaacctcaactagcttgtgtttaagagtttttatagtcaacaatcagttgccatggaacacaatggtgtctcaccaatcattgtaaatgagatttgtaagcaccaaaaatgtacattgaaacaaaatctgaaaaggaaattttgaaatgtaccaaagatacacttccaccaactgataaaccttagatatcattccttagatatacacactt

SEQ ID NO: 42716 - DNA, 1981 bp, Cannabis sativa
tttgtaccatttgagaaaatacatggtctattttgttatttaataaaacagagggtctaattgataacttttacaaaacacagagtccaaaatgatatttaccctctcatatattattgtgaaactctaataatttgaagtgttaaaatagattttaaaataacttatttttcatacttttggcacatggataattggatgtcataatttaaatttttatgtaacaatgtatattgtagatatgttgtattgtccacaaaattttgaaaaatttaaataatttatagtatcaaaaaatgagaaataagtaattttgaaatttattttacgcttataagatatgtcatttttttaagtagtttttgacattatatattattcaaaattttatgaaatttggtgcgatatcgtaaataagtataatatatatcctcatgtgaaaaatttaaaacactcctatcggaggggcaaaaggcacccagtcacccactatatttttcttatttctgaaataactttttaattatacatttggttttttttagtaatcatgattgagaatgtaatgaaataaaaccttcaaacttcaattaaataaaaatgaaatatataaattgttacttatattttctttttataattaaatatcctggttcattaatatatatttattttcctttcctaaaattcaaattagatagccggttttttgcaacattgtgatatctggatcaatacttgttgtataagaaaggaaaattatacatgccacattatgtttgagttgactaatacaaataagtggaggctgtttggcatgcaagaaaagaattgcagctggattttcatttttttatatggattatttttttaagaaaaataataataattgcattttgcttcatcaatattccagctcatgagtttatcttctaatttaggctaccaaacaaacaataagaatgttgccctttttatttatttatttatttatttattaaggaggattgagttggaagaatgtgcataagtatggtacatgaatatactaaataactaacataaactgtcacatagataatgttattatgataatggtctaatcatatagtattgatttatccataactattgaaaataaacaaataaaaatctttttatgtagtgggatagctgtggaagaatagagattatagctttcccaatatatgtaacacagacatgagacaactcttatttttctcatttttatctgactttagggaaaaaaaaaattatggactaataagttttaattaattccatgttcaaaattgattccattgtatgttgcaagcttgttttagtcatatccagttcatacaagaaagattattagagttgatgatggaatggagtgttgattaatgaatgatgttgctttggccgaaagtaacctgtggttgatatttttatttgaaagttatgtgatatatgttaggcaggggtgtggttttggagtttccttctagaaaaactaaaccaaacctcaagtcaattctatagtaatcaattaagacttggctttatggagaagtggggatacgcgtcagggaatcaacacaactatcaatttcaattttcaagcttgtgcaatagaggcagaaaatgacttgtacaaagaaaaagagaaaatatatatatcttaaaattatgggtgtatacatatttggtaccctatgttttatttaaatacaagtaccttgtattttcaataatacttattcgacaccctgtattttaaaaacatacatatttagtaccctaaactcaaaaattttcgataaaattttatcaatataattaaattgtcttcaattttataaattttagactcaactatttgtccaaattaataaaattatattgattaaattttactttagggtaccaaatatgtattatttcaaaatataagatactaaataagtattattgaaaa

SEQ ID NO: 42717 - DNA, 5861 bp, Cannabis sativa
ctaagttctaggagtgaggttcttgccttgcctctcgggcatacttgtctctctctctacgagtattgcctcccatgcaagggcctcttatgatcgttctaacatattctaccacttcgaggacttcagcggacactcttcgcttgtgtcctccatctacttgggtcctactgatgttctcaccttctctcttgacggtagatggtgataggtcttgctccgatgcgaccaactaatttttgttaaggtgagtcttcgtgtatcgacgacgacaagagcgtttggtcattttgtaatgattgtgtgcgacttggcttgagctttccattcccacagacggtgccaaaatattgacagtgaaaactcgttaactaactttttggctagttaatcaaactatgcttcaggcttagatctaagatgaaaagaaagatgaaatatggattcaaattgctatctcaaaatagagagaaaatgataaagtttctgtagctctcaaggtcaagttacaagaatgattttccaaccccttctcaaatctgagaaaggggtatttatatgctctaatggtctaaggtacatggtggtcccgggggacaatatgtcactttcatgatgcacgtcacaagtgcaagaggtggccttgcaccttgtacctatatttggtgtcaagtgatccccggttgtaggagttttttccttagttgcaagagtgtggtccccggttgtaggtgtgtgagtgcagtgtacctttggttgggtcctcataccttgctaatgtgctccttccactactcatatctccatagagcttccaagtggcgtggttgtatgcttgtctcttacacgccttgtcctttgattccccgttgaacgacattcttgtttgcttgcacttgaatgaatttcatcttacattcatgacatattcacgttacgcaactcacacgttgcaacacaactcatgcctatgtattatgcgagagcccccaaggcccttaacacaagcacacacgcaccctcacaccactcaccatgatggattgcatgcgagccctcgaggctcacaacacacacacacacacacgcacacctacaccactcaccatcatggctcgcatgcgagcccccgaggctcacaacacgcccacactcgcacacacacctgaatcaccaccacgggtcgcaccctagcatcctcacacactcacgcacacgcttgcatgcgagctccctatcttgtgcccctgcaactgcacacactcatgcatgcacacagtcgcatgcatacacccgagtgcacacattcacatgcacaattacatgcatatgcagtacgttctcatacatgcatgcacaacttctccttctcatacccttgctttcgatgttgaatcaccacagggtcagtcatcgaattgcatgggtgcatcccgaaaagtgcgcatatcgacgacagctttatgaaatacatgttgaggaggtaagctcgttgaatgcactttcattaattgctctaaaattagttaactaacttcaaaagttagcagcgctaatttttcagggttcataattatttatttcttcagttttaattatttatagttaattttttgaaaattttagtaaatatatagtgtaaagaattaacaatcataataccatatttgttattgaaccaattttcggcatcaacatatacttataataacacatacttataataatatacttttgtaaaaataaacaaatatgtatatatatattttttttgttgagctatatattttaaaattatatttaattagtaatgctattaacaataagacatgcatgttattaatatttatatctttttcttctgtgaaatagtactggaaaggaatcaaattatatctctcttttaagtaacataaatacaaatatgtacattagaaatatatacatatatattgtatatataacagggctttttatagagaggtctcccttcaaatgtgccaacccaacccatgccatatggctcatggcatattattatataaaggaataatatttagatatttcattttataatatagtgcggggtagttgtgaaccttaattaattcgtctattgcatttgtctctgtgctttggtattcatacgaataataagcaccacagttttcaataggccaaaaaaggagagaaagagtcactgaaaccattaattttcttaaactagctagctagggtcgttgtagttcacattctatttcatcggccacactttaatttcccagtggccatacaaaagtgattgatatacaaatcaaagaactttcttttctgcaaaagctagagacctaaactaatcacgtagtaattaactatattaaccaaaaataatatatattaaataaataaaaaaagtttcaggtcagtttttaatatggtgctgatctagctacttacttcattaactaagtatagcatttgttactgctattgggaaaatttgtggacgtctcggtaggacatggcgaggaggagtcccatagcaagctcggcttccatggatccgccatagccgtattcaaaggtggcaaaggcaaagtactaaacggattgaaaccaagggaccgaacagcgtcccacgtctgatcttcatcctcctcatgaatattattccttgtcatcatggaactttgatctgtactagtattagtcgtcgtattacaaaccatgttaccaagaatattcccttgaaagagctcatagggcaaccccattgagaagccgttaacatcgttattagtacattggtgatcctcctcgtgtgatattccattggtcatcatcaaatcaacaccctgatgatgatgatcatgatgatgatgatgatgataatctccaagtactgaagacatgtttagtagcatagtggaattaggagaaatattatctggaggggatattgggaataggaagctagctggggagaagtgatctccactactactacagcttgaaatgttattattggagttatgaaaggctttgtaagaagcaaagtgatcaagaggagggtaagtcaaacttatgctactactattattattggccgacgagttttgtatgtcgtttctattattagtagtacaaaactggatcggtgaactggttttggttccaagtgatgatgacatattattattgttgttgttgttgcttgtgagatctgaaccaaactgagtagtagttgtagtagtagtggtagtacagcttggttgatgatcgactgataagtgagaaacccaagattgagagagagctctttgagctgatgagttggttttcttgaatattctacatattgcccaagaatcctgcatgtaacaaaaagtccaatgaaaaaaacagttaatatacaagggttacatagataaatattttttgatacaaataatatcaaaagaacatatacatacattagcggagaagtttttgtagtccaataatctcttcgatggaacaacagagtgatcggtgagagaaggtagccgaaactcatgcatcatccagtcagttttgaggcccttagcagctctacctttgtagaaaacaagagatttcttcaaaccaatgcattttgtgccctcagacgagtatatagggcggtcggtccctgtggctttccaaaaccctgctccggtcacccggtttggtctggtgctgttcctgtacttcctatccctagggcagtagaaataccactctttctctccggtgctcgctaactctacaacataacaaaaaaaaaacgtattttttagtcagatcaatatactcaaaataatgatatatatataaggagataattaatgatttatatgatatcttactaggaagatcccaaggatcatatttatagatgtcaagttgtttgatgagctcaatggagagagggcgctgttgaatctttctctttagataaaaccccacaagttcctcatcagtgggatggaatctaaaaccaggcaacatcacttcctccagtttatctccttcacttctctcatgatccatacttaatatagtactttataaaacccaacaaatggaaacgattgagagagctacgagatctaatatatgataaaatgaggtattttattttatttttcctttttgttgaaacagataacctctagagatcagaagtagtactcctctagtgagagtaaaacaaggagtactgaaacttgtttgagtattttacaagtcatgagcttctcaaagctgtctaagtaaaaccctaaaaatatgtagtatattgtagtagtaatggtaggagtagtattactagtaatatatgaataataagcaagtgagaaaaccctaaatttgaagggcaatatatggttcccgagaaggggtctagctccgaaggttcagccgccttttgtggtgactttaaggactgtgttaaaatagaaagaagctaataatattggccaaatgaagctcttaaaagatcacaacttcaaataccaagatagccctcaactcaagaaaaaatattaatggttttctagggagctataggggactcttatttatgatcatttgtacctgtaaatgaaattggcccccatttgagtttgtttaatccaaatggaggaatctcaataagctactaaatcaacaccttcatggggatttgtgtctctatttaattaactcccccaattatcacatcaaattaataattatataatcaaatattttattaaagtttgatttctactatatattaaaacaaggaaagcttccaaatataaattaattaaattaattaatagtaataagctaggtttgaatagttatttggaaacgtggaccagaacttattgcttccaacacaatgctcaaattaaatacctggtgtgtaagactgtatctgattaattaatatgtattattttttaagtgatacatatttctcaaaatccgaaaatcccgtttctattccattccccagagcttctattccactgactttgtcggattataacaatataattttagggtcagagatacgtacatacagccaaaaagattaatacgtgtgatattaagcaaatctagtaattatctatgcctgtagctaatgaggtaaaagaatctcacttgaatagttaacctggtaaatttattagtttgacccactacatatttttaattatatatatacaatcatatctgtctctttaatgtttgtaactataactaatatatataatctccctcggttatactattaattactttttcctttagtacaagtcaaatgagatcaaattaaattcgtcgattgcttctataaaaataaataaataaataaataaataaatttgtcgattgctcttttcactatatattttatttatttttggtcggtgaaatgtgtattgatatatgattatttttcttcatggcgaaatcgaagaaattatacttgatcaattttatttaaaagagtttactttgtatatctgcatgttatttagaaaaaggtttgacatataacaacatacattttttccttcaaaagaaatgtgctatcatatatattcatatgccttctctaatttcagatttcaaggaggcaacacaactaaaaaaaaaactaacactacaaaatttttacttttggtgacaacaaaagttgtgactaaaatgactaattataaattactattcttatgttatgactaaaaggtccgtagttaaacttaaaggtattagtcacaaaaattacaatgtattgtgactaaatgtgtttttagtcacaatacttgttgtgactaaaacta

SEQ ID NO: 42718 - DNA, 6291 bp, Cannabis sativa
ttgtttccattaatagttttttctaaaacaaaacaccattgtgaggcttgagaagaaccataagcaccttggaagaactggccaaaatctctgttctgccctggattttgtgagaaataccaggtggaaacttcttggattcttgatgttattgagctaaattttctgaaccataagctgaatctacttcccgttggtccttttcaattcgttgttctagagtcatcatctctgcaactggtcttgcaagaagggataatccattcaaaattgcagttatatgatcattgactgacacacaatgaccaactgaatcaagctgatccacaacagattttatcttatgcaaaaactcataaatggacataaagagtttctttgtactcagtaactgaatttgagaagcaaaatactcattaaagtgctctccaaacctgtccagaagtttcacaacccacaactgatctagctgttcccagtccaagaattcttgattaacttttccttgatcatgagcagcttcatcaacatacatcaatggtggacttgcagaatctgaaacgaagtaatgtagattatgatcacgaattgcagcttggacttgctgacgccacatcaagaaattgagattataaagcttcattgacaacaaccaatgagtggggactacaggtacaaactttgaaccagctgccatggaagaatctgcaccaggatttatagtaggctcaactccagtaccatattatgaaaactgagagagaagtgaatcaagaaagaaaatggaactgttattcattaaagtaagctgtgcatatgggagaatgaagaccaccataacagcaatccattacagttgtaataaccgttgacctaacagtcttaattttctatactactgactaacatgttaatttcagtatgtttattttagttttgttttttaagccttgggagctcaaatttcttcaatttggttacttaagttcaaatggcaaaagaagagaaaaaagcttgtaaatcaatgaagtggatctttttattgatcaaatgaatttaaatttgattcttttcagaatgataaactatttagtttgatttatatttatttatttaattcatgttgtaataccaattctctcttacgtaatacatattttggcagcaactaataatttcttggtattcacttttttttaaaaagcatttgatgatattttaattaatttaaatattaactaaaaatcattaaagatctaaaaattaaactgaaaattcagaatttttaaacttaaaataataaaaaaattaatcaagaaaagttaaaaatataagtttagaaattatatttacattaatttctttttttggtttcaagattagatgttatatacatatatttttttttttttcttaaacttgctttgagtatttgtttactttttagaattttaatgatttttacttttataataattattgaattgaaattatttaccaatgtgttattttagtcaaatttaactcaacactgaaaagagggtagaagggtggtaaaaaagtattacaaaaaggattattcgctattatccttttagaaaatgttattcctcgtctgtgatatggtaatgacacttctaatgaatcaaaataataagactgtttttaaagcaaaattatcaatgcaacttcaaaaattgtagtgtgtcagaaacatcattagtagaaagacatataatgaagaaaaaaatacatgcactgaatgaattgttgaccaagatgcatacatatgtggtaagaacaaaaaacttacacactagcatcagtcagtcagtcacacaacacaagctggctaatgaagtggtaaagaggaaattacaagaattcatgcttttactatactacactctacaagatcaccaacattcttttatccatgagcaacatagatatttctagtagttgatctctctaaatggggatcttctgtcagaatttgcttcaagtttcttcactgcaatgggactattcacattctcactctgatagccagagtgttcatcctcagtagagggcattgttgtctccaaaagatccattagttgtttgtctgaactggagatctcactaatcttctcactcaacccctcaatcaatcccaataagttttccctttctgatgataagttagtgatctcttcaagtaagttttttctctcactcttgagctcttcaatcaaagcatctgactctttcaactttgtcttgaatctaaaactcaagtccttgatttccaactcttttgcctccaattctgcttctacttcgaatgcttgcttcttcaaaacatacatggagttttgctgcagttccaatttctgctctacattatggataccatcctcaagctcagcaaccataagcttcttctcttcaatttctactgcagccataatctgggcagcagttattttctcccacgcttcatgtgccagattaatctctgcctgtttcttggagagctctgaagagaaagaaattaatgagttgtttaatttatcttcaaacgacccaacaagctgcatcaactcatttattctctggttcttctgttgcataagctctttttcatgctcaactgttctttctgcttcaattcttgagagcaaaacttcttcaagttctcttctcaatgattcttgctccagccattcaacttctctctggagctgctctaagatcttatccttctctcttaaacttgctttctctgactccaaggacattgctgtttccatctcagttgagtaggcagcagcttctcttgttttgagattttgctctagtagctggacctggtgctggagattatatattctatcatctttttgttccagcatacattgaagatgatgtttttcttgcttagtgatttccccaacatctacctccgcaagaagagaagcttctaactctttacgtatttcatagttttcttcaagatcaaccaataagcctttggcagctgatctccatatgtacagttcaaattcgatttcattcccttcacagattttctcagccagttcagtgtgtgttctgtcgagttcgatgcatacttccctcagtttatttttcaaaacactttccacttgcagaatttgttctcttaagaagatttcacacacagataattccatgatcatctcctcatacctctcaagatctttttgcattgaaagctgctgctggccaatggcatccaacctctcaactcttcccaacaaagaggccacattctcatgctccttctcaatatccttctgtaatctctcaatggtagaattcttcatctccagctgctgcatcaatagggaagcattccgtttgttctctttttcagtctggtctatttgagcctttccatttgcaaacttcatttgcgcctcagaaattgcttcttttaacaccaataacattacagaaatctcctcattctgctgcaagcttaaacagtgacactcttccaagtttgtttcaagctccttcagtcttgcatctttattatttagctgagacctatacttgttaagatctcctgtcatcatttccaattggtacctccattgagcttcttttgcctggaaatttgcaagaaaatctcctttggtctcttccaactccattctcagtgcttttatcattgcatctctaccatctaactcagacctacagttgtttagatcacttgtaacattttccagtagagaattcatttcagcttctttatctctgagacttgcagaacagacttcattcatttgctccacttccatcttcagcttcttaatcttttcatctttactctctaactgagacctacacatgttgagatcctctgccatcatttccagttggcacttccattcagcttcttgagctttgatatttgctgtagagtctccatgaatctgttttatctccatcttgagctcttttatcgttgcatctctacttgccaacacagacctacagttgctcaaatcagttgtaaccttttccagttgagagttgctttcatcctctttaaccttgaggtttgcagtgaagtcttcacgcgtttgctccaactccattcttagctcctttaacatggcatctttattttctagctggttcatccaatcagcttcttgagccttgatatgttctctagagtctccaccgatctgtttcaactccaccctgagctgttttatagtttcatctctactctctaactcagccatacaattgctcaaatcatttatggctttttccagttgagagttccatacaccttctttagtcctgagagttaaagaaaagtcttcacgtacttgctccaattccagtctgagctccttcaccattgtgtctttactttctaactgagaaccacacttttccaattcctgtgtcaatgtctcaagttgggacttcaattcagcttctttagccctcagaattgcagtagattctttgtgcatctgctccgaacatttgagcttgtttcgcagctttgcaacagaaggtgaacctgaagccttttggattagagcttcctgaagttcttttagtgaaaactgtacctcctgcatttcttgctccatttgtcttttctgatattccatctctttaagaagtatctcttttttgtcaagtgcatgtctaagagatgcaatttcttcattcctcttctcagtgaagcattctagttgggattttgcatcctggtaatcattgaaaacattgtcaaatctgctttgaacctcagaaaattgaacttcaagatactttctccggctttcctcatgagccaacgcttgggtacacgtttgcaaccggtcttgaaaatcttctgatattctagtttgagaatctagtcttgtttgcagtgaatcgatctcatcaatcatagaattcttctctagctcccactccttttgacttgccttgaactggtctctcatttttctatgcgcttcttctagatgagtaaactgttcctttttccatttgagctgctcttcaatcttcctcttgtcctcctctagtttgaataacacattctctctttctcctgcttctttggctccctttgcattcttctctacttcaaagcatttcttctgtgaaactgataaactccctttgaagacttcaatttgttctttgtaagaatgaatcagttgctcttgatccacattcttttcatttgccttctctaaagccaagatcagccctttattttcctcttcccatttcctgaacttgtcatcacaatcaactcgaatcttctcattcgcagcatttagacgcctgatgatggactccttttcattcaaactacattgaacatcttcaaacctttgtttcaacacagagagttcctgtgctttgtcattaatttcttcagcctgcttctcaatttttgaacttgctgcctgggcttttttgagttgctcattgtaagacctcttcaagttttcagatacttctgttttgcttttattctccacccggagcttctcaacctcagctttagcttcatccagctcttcataaaccctttcagtattcatttttctatcaacttcaagaaaagaaagaaattacctgttcaagaacgaagcaggcacttagatataattcagcaaaatatgtaaatctacatgtgtttgaacggttgataatatagttctaatgtatgttttctttccagaatacattttaattaaaagagcagacccgacttggtggaatcttcaaaatttctcaatggatttgacagagatttcaaagtatggacgctctgtttggttgcttggaaaatatgagaaaggaatagaaaacaaagaattcctacattgacaatgttctaagaagcataagctcttcattccactaagcagggtataactttttagtgtttgctcgagtaaaagcaaaatcaactatttcggctgcattatctatttcgtctttaattttctccggaaaaaaaaagaaagagctataaatcacaaaaaattctacggaaaacaaaatctaacaagcaaactaactaagaagcataattacattttagtacgtcgccaacttaaacttatcactaaacgagactcaaaatctaacaaatgtcaaaaggtagccaaagacgtgcaatgaattagagttaaagagcaccctttttattttcctacggtttctagctgaacaaacaataattaggaggaacccaagcaaata

SEQ ID NO: 42719 - DNA, 3302 bp, Cannabis sativa
actttaaccccagcccttagatcaacccccaattcaatccaacggctacagtacaatcagggattgtattccctattttggcataacgggaccaaatcatgtccctaatatatatatatatatatatatatatatatataaagtaaaacatgtgacataataatataattgaaatagggttcgtgggtaaaagaagaagacacaattgattataaaaagtgtaactaccaattggtgggaaatgaaatggagagttaataagtgtgtgtgtgggtggtgaattatgaccaacgcatttggcattttgagatttgggtgcggaccaaagattatcattattataattaatactattattattattattaatattattattataggtttttttatttttatactctaaaacagttttttaaaaaaactgttaatttgaaacctaaaccgtaaatttaaaaaaaaaaagtatataggataattcctactattattattattattattattattattattattgttggtttgtttggttcgtggcaagatgatatatgtgggggaccaattcatggatcaactaattctagtgtttcccactcttatttcattttattttcccatcaattttacggatttatataatttgttaattctatttatatatatttttaacatgtattgggaatatcctgttttcaaattttctgttaaatgaaaatgtatattttaagaaattaatatgggtattttaaacagaatattttagcagctgtcaactgattcgttgagtttatatataagattagactttatattcacaataatataaaatatatttttccaacactaaatattttagccaggaactttattttagtttgcttacataacttttaaattctaaattttgttgtaataacattgaattttctgacaactatagctagtattaatttagtttcttcaaattaagaattatatatagtaattaatttctattttgttgagaaaattatcacgttatttaaaaaaaaaaaaaaaaagtggtgacccaaattgatatatatgctctaatatgtacatacacatatgcaatgcaaaattaaagaaagaagaaaaataaaaaagtaagtggaagacaaagctaaatggttctctctattccaccgcccaaacagacaaaatctatgatatatttatgttaaaatacaataaatatatttatattattgttaatcataagtcaaattatatatattaatttgttttaggaaatgtatgtgtgtaaattgaaactgaagagacgtcaaattaaatacgtgctttccaagccttacaatttgcaaattaattaaagttttctcttaataataaacacagaagattaggttttaattataagttaattatgtattatctttcattaatttaatcttcttccatatattgtatcatgggatgtcattttgtgatctaaattaatattttaagatcaaattaatatatataatgcttcatccactatacattattttctccaggaagaattcatcacttattactctatatattcacacttaattaatatacataaatatatataatattttcatttttttggggagtattgttgatgattttgacaaaatttaatgattctgttatagaatgaagaagaagtcattgtcacaaacctctctatatttattgattatataacttgcctacaatttcatgtgacttagctagctagggttggctatatataattagctagctccttatctcttatatatatatataaatctatatatatatgtgaaaattcagaaataataaagtcatattaattgattatagttggtatagggtttattgctacagattacagatagcaaccttattttattttattaattaatgtaagaccccattgggttgtattatattacgtataaatatagcacattatattcgtataagtatagtactaaatagtgtacaatttgtcttatgtaaatatttacattcattgtggtggttgctaacttaattattatagtacgtgtaccttaacacatatattatatatgtttaattatttataagtatgcattattattgaaaatttataaatataaatctactacacatatgatatatatataagttattaattatgtgagtactgtagaagtaataactaattaatttgattaagagaagtagctagtgtaattttgttccattggatatcatcctatacatatatttaacaaaaaaatttaacgagaattatctattaatgagaattattgaaaaaaaaaataagtttttatacttaatttgttttatctaattaacaaaaaattttatctttacattatatagatataaaaaaattattcagtaaaaaaataagataaaattgagtttaacttagatatgtttttaatatagtatgaaaagatatattttgatattctttttaattgaatagttaaattaaatataaaacttaaaaaattttgtttcattatatattattgaattaaaatttaatggtttaatatttttaaaattaataatatttataattaaatttctttttgtaacctgcacgtattcatgtataagtaatattcagaagtattcacgttgatcgttttatattcggtcgaccactatatttaatgtcttggtcatttgtttgtcttttaatgcttgtaaaaattcgatatatatacgtgtatatatatatgtgataatcatgtttatctcaaaatatatacatatatgtaataattatgtcacatataatttaattaattaaacactcacatcagcaattgaaattctagcaccttgtttaaccagtccttgagcagcccaaatactcctccatatgaaactgggattttgtcccaaatcagcagtaagaaaagtgccatgaggatagtaacgagctttgtaaatcttaccaacaagcgtattttccatagttagtaatctccatccttgtttacccaaaaaagagaggttataatcccgaaggatcacgaaatcctaacccccctatattcttatgttgacaaagacgtttccaactaacccaactcacacccttggttgcattcttagattgagacttccaccaaaacttagccatcattccttctaggcttgaacatatctcttgggtcaagagaaaaacactcatagcatagctaggcaatgcttgagcaaccgacttaataagcacttccttacccgctttagaaagaaatttagtttcccaacta

SEQ ID NO: 42720 - DNA, 3866 bp, Cannabis sativa
ctcaaacgagtgtcaggccgttctcaagtccggtgttgttggtcccaaagaaagatagtagttgtgggttttgtgttgattatcgagccttgaatcgtgaaatagtgccagaaaaatttccaataccaattataaatgagcttttggatgagcttcatggggcaaccatttttacaaagttggatttgaaatctcactaccatcagattcgtgttaaaccataggatgttcccaaaactacttttcacacacatgatgggcattacgagtttcttgtgatgctatttggtttcttaatgccccgacaacattccaatttgcaatgaatgaggtatttcgcccatatcttcgtcgttgtgtgttagcctttttgatgatattctagttttagctgcaatgtacaagagcatgtgaaacacctcactatggtcttacaactccttagtaagcatcattttatgcaaaccttaagaagcgctcttttgccaaaaagcaggtttcgtcgttgtgtgttagtctttttgatgatattctagttttagctgcaatgtacaagagcatgtgaaacaccttactacggtcttacaactccttagtaagcatcaaatttatacaaaccttaagaagtgctcttttgccaaaaagcggttagagtacttgggtcacatcatatctgatgaaggggtggcggtgaatcaatctaagattcaagctatgtttgattggccaattcctaaaaacattaaggagctccggagtttttgggtctcacagggtactactgcaagtttgtgcaaggttatagtgtaatcgcttggccctaaactaagcaattgaaaaaagataagttcgggtggaatgtcacagctgaggttgcttttgaagctcttaaaaaggccatgacttccgttcctgtgtcaacacttcccaattttgagaggcctttagtaattgatacagatgcttcgagtcatggtgtgggggctattctaatgcaagggcagcaactaatagcatattatagccatgtcttagggactcaagctcgagccacgcctatttatgagaaagagttgatggccattgtttgttcaataatggcgaccttatgtccttggtcgacgttttgtggtccgcactgatcagcaaagtttgaaattcttgctggaacaacgcattgttgcttcggaataccaacgttggatggttaagttgatgggttatgactttgagattaagtatcgtctcggagttggtaataaggtagctaatgctttatcttgagtgcatccaccagctaagtgtcagaatttgttggtttcccaaggaatccattgggatgcgttacaacaggaaatacgacaagatgccttcttgagtagaattatttcaaatttgcagcaagggcatacactcactgctggctttacaatggaacacgggcagttgaggtacaaggggtggttgacgctatcaaaaatgtgctcccttatacctatattcctacgcgaatatcacaactcaccgcttgggggctgttcaggtgaggacatgaccctcaaacgaattgcatctgatttttattggttgggaatgcgacattcaatgactaattggttcataattgttaggtgtgccaaaaacataagtccatgctacttctccagccgggttattcggcttattgcagccaattgctttaccaactttagtttgagacaaatttaccatggattccattgaaaggcttcctcatttaatagagtatatattgtgctgagggcacaccaaccacccagagaagaaaaattataattcaactaataaaaaacttcaccaaatagatagaattcactggcatcacaaaagggaagtgcaacttttctaattggtaatataaaatgcaaaatgtaagaaaactaatttttatctacaatcaagtgccacatagctaaaatactgaaaattttctttacaaaattacataaatgacacggtagcattatagcatagttaaatgttatacagttttcatttaaaaatttcattagacttgatcccgcttgtgatccctcaagaatcctagtatgtgtctagaaggatctcaaagatatacaaatacataatacgataaataatgctatctaaaacaaataaaagtaacataattagtggaatcccatagtaaaggtactccagatagtgcaaaacaggcacaccagtgatatgtaatgttcttttacgataatctaacacattaagatgcaaccatggcaataagaaaatgtcaaatatcttgtagcagctctctgtaaaataaatgtgaaaaatttactaaccatttggagatcacggcttcctgaagtactttcgactagatgaggtcgggctcggacatcataaatgacaggcctctcaaaccatggaataataatgtgggttccttctggatatacctgcatacccaatataaagataaaaacctagaaaaaatataaccaatgtaatacaagtatccctgagcaataataacaggtttaagaactcaatagaaaagaaaaacagtaatcaattaagtagaacatccaaccagtaaaacataattgcttttcctttttcttcaacaatctctatttacctcaaaaagcaaggtttataactctcagcatgcagcaacctattaagagagactactacaaataggaaaaaagttaacaaccttgtctttgacaccaacgatacggttgaaaacaatagctctgtgccctccctcaacattgtagagactgttagttgcaacatacagaccaattccaccaataataccaatcttaagcaaagccgaagccgcaccacctggaaccttaggaactttaacgttgttcaagttcatttcttgttcctggatgtaagcaaacttcaatatttccgcattacaagttagaaaagataatttttttaaaacaaagtaccaaattgcagctgctagacccttaggagctcttagctgctcctgggctcttactacgaccattagaaatatgctatcaaaattggaaaatccgatcctttctaaataatgataaactttaaactattgttattattattatttgagaaaaataaactttaaattctaattcacaagaagttaatcaaaacttagtaatccagacctacatgtacatcatctaaacaaatgtggacttgtaaccccatcaattttaactccaaaaaagatgtaaaaccgatggtattgatcaaataatcaaagggttcatatcaatgagctgattggtctactgaaacagaaccaactacaattttttttagctctccaaaactagaaccaaaatgaagcataataaaaaaaaaaaacccaaattgaatttgtcgaattatgtccaacaacagcgtaagaaatctaaacatttcggtataaaaaaatatatacagatttcatttcattagatccaaaagatgaagtaaaggacttttcaggaaaatgaatagggaagtgagtgacaaagaaaagtaaaattaccttcaaagtctcaaatgctcaacttgtgggagaggaaagggttttaggtcgaggagttacaggcagggtaagaaggcgaagaaagggttttaaggtgcagagagaaggggagtgggggtaaagaatagggctttaggtcgcttaaggtccaaatgggcccaggtaagccgtgtccagcaaacaaaattgtatttacggcccaattatattaggcctatagtagaagataatagggattattttacaaatacacaaaaataacctagggttaatttcacaaaagcaaaaaaacaacaaaaatacggtatcacggaattttaaa

SEQ ID NO: 42721 - DNA, 7259 bp, Cannabis sativa
ttttgccaccaaaaataaagataagggggttaagtgtataaaaatcaaaacataagggggtttcgccgcaaattgctcttttttttttaatgtttttaaaaatttaaagaacatagtatagaacactataaaaatttaaaaggacaaaattacaaattagcccattttctaattcaaaaaacagagaaaaaaaccctattttcgtctcttttccctctctatcggtctcttggatttctcatcatcccaataatcaatcagtcaactttcgtcgtcgtttgggtatttggagccatggctgcctgcgctagcgtcgtcaagctcaacgcctcatcttccaactgcatcactaaacactcatccgctcagtcacatggatcatcccacgcgccgagtcaccatcccgatcctcgccgaggcttacactgatgaactcgttaaaacctctgtaagtttctttgattaattagaaatggttcatgtaataccgacttttgtaattccaacgaacctgtcgatataatgcttgattagattttgatgattttttttttctcttatttcgttccgacttcccagtgtatgtacagttcgttcctaagttccgattgtaatgtttcgaaatctctgctagggtttctgtttttctttttgttcgatgattatttgcttactgttatttatttataatctctgatcagttagtgttaaagcagttagattaaatcaacctgtgttatgctctttaaactctcagagttgagattagacttaatcgagtggactaaaatagtatattggaaaatcttaaactgtgatatgctttcaaatgtttcttgattattactatgttttttgcacggaatttccgtgacaggtggcttagaaaacaaggtagaaaacttgctcatatggacagggacgaaaacagcaacagattttctgtctcacagaatgattggtccgaatccgaccatgctcggagaccttcagtagcatttgattgtgttgttgcttcaaccttggtgagtgcaggcatccaggagggttcttctgcatcacataccagtgtttgctctatcagtgcgaaaagaactcgcaagcgcaaaagccgatgggatcaggtatcatgggagtatccagtagtgacaaatccagcttctagttctcttcaacgtaaggaactgaatgtggagtctagctcattaccccagacgagcacgagcacagaggacaaagttgtatctggctgtacaaatgatcagcttgataaagttgatctagctcatgatgtaaaacagaatactgcagatgatgatgatgatgatgatgatgttccaccagggttctcatctcctcttttgccttctatgggaatgggattatcacttggtccctcaatagtttttgggcatccacaggagaaatttctctctcgcttacctgtttcatatggagttcctctgtccatcatacaacaatttggtctacctgaaactgtgggaagttgggttgttgctcccggaatgccttttcttccctttccaccattgccttcacttcctcgtggtaagaaagactcttcaccatctgagaacggacactgtttgacgattaatcaacctgcagaagacttgagttcatcatatctatcactttcaggtggaccaaatcactttctagctcatgatgtaaaacagaatacagccaccgatgacgatgatgatgttccgccagggttttcatttccccttatgcctactatgggaatgggattatcacttggtccctcagtggtttgtcattttcattgtcctcctgacactgctgttgggcatccacaggaggaatttctctctcacttacctgtttcatatggagttcctctgtcgatcatactgcaatttggtccacctgaaactgtgagaagctgggttgttgctcccggaatgccttttcttccctttccaccattgccccccacttccttgtggtaagaaagactcttcttcaccatctgagaacgggcactgtctgttgagctggtagcctgttatcaagctgttggatagatctatcactttcaagctttgaagacttgagttcatgagatctttagggatttttcaatgtatatcgttgcggggtttccatgattcatttttgtaagtttcaaactcaaaagtggttgatcattaccaacaaagtcacctgacaactcaaggccagacatcttagacaaaagtgaaatttcagatggaatctaaccttggaagaaagaagaactcaagcgaagaaatttcaactcccaaaatattcccatggcagtgggatttggagagaaactgaagttattgtaattaagattaagcttctggagatgaacaaggtgaaagagagtgttgttggagtggatagagccgtagagacaagaacgctctaggttaaggccaatgacatgaccagtcaaatcgtcgttgtcaacaccatcccatatgagcagcaattggtaccgttagatccccaagttgatgtctagtctggcaatgtatttgaaagctttggttgaaatggatcaaagcattcctctctttaccacggctaaaaggctgcacagaattcacaaaaggataatgatgagagagtaaaaggaaagtacaaaaagttttgaaaacttcacaactaatgatgaaataagagccatatatatatatgtatatatctccatttattcaatttgatgtgtacattttgtggcatttatatatatagctctaaattcaactacttgactgttattattaatgtctcttaccttcaatgcatgtatgttattcaatttgatagtgtacattagtggctagaggtcgtcaagtagttgaatattattaactacggaaaaaagatcaaactatgatatgtaaatgggcatggaatgacaatcttttctagtgtcataacctcattaaaataggtccacttgaattataatttgcgattaccttattaaaactataagttaagatgatctctctaaatgttagctgtggtctgtttattcacttaggagagttagaaaaatgttagttaataagtcaaattgtcttttgtgtttgacccgaagttagttaatttggtttgttccatttagagcaactataaataaatgcaagtcttatcattgagacacaacttgtattcatttcagattaaactaataaagagcattattcattctttcttaaatttcactctcgatccggctctaagaattgaaagcagttcaatgtacaattgtgtgtgagtctctatttgaatcaattgtttcccaacaatttggtattagagctgggacgttcttggagcttggtgatctgttgaaagtgttcttgagctttgaagatgaagaaggagctcttgcaaataatgtgaagaacgtatagtgggaatcatgggtaatgcagaatttaatttggaaaagtttacaagaaagaatgattttagttcgtggagggtgaagatgagggctttactcgtacaacagggtattcaagatgcattacttggagctgagaagatcaaatacaaaatagataaagaaaaggcaaaaattcttaacgaagcacatagtgccatcattctcagtctcagagaaaaagtcttgagggaggttttaaaggaatctacaactgctaggctatggacaaagctggagagtctatacatgatcacttgcaaacatgttatttttgaaacagaaactgtatgcttttaagatgctgcttgataaatctgttgaagatcatttaaacgatttcaataagataattcttgatcttgaaaatattgacagaaaaatcgatgatgaagatcagacaataactgtgttgaattctcttccaatggagtcctatgaacattttgtggacaccatgatgcatggaaaggaatctttgacattagaagacgttcaaagtgccttgatgtcaaaggtattgaaaaagaaatcaaaactgaaggaatagaatcctggtgaaggattgctgattttacgagacaaaacaaataggagaggtaacaaggcaggagggaactctcatggacaatcgagagggggtaagtttaattccggttctctatacaagaaaaaattctacatctgtcacaaaacaaatcatctcaaaagggactgtcctgaattaaagaaataagactttaataagagacatgataatgctgatatggtctgagggtagtgaatttgatggatatgagagtgctgatgtatggttgtctccaagacttactcatgtgttgattcggtcataaatttaggatgctcttttcatatttgtccagataggaatcaatttctagagtacaggaaaattgatggtgggtctgtgagacttggggacaatagagcctgttcaattgttggaattagatctgtgaattgtaggatgtgagacatgttcctgagattaaaaaagaaatctctgtagcactaagaacaataggttgtgatatacttggagcatgattcaaatgttcactaatctggtcttttttctcaaagtcatcatccttataattattataaatagttagaactcgagttgttgaatttgaataattgacactcatatagcaattagaaatgcaaagatgaaactttataaaaagcatgtaacttaaaacttcttaagccattatcttttatataagaagtacaaaactaaaatccaaatgaaaacaacaaggagcccataataccacgactctctaagaaatgaaacaaatgggaaaaatatcacaaaaaagaaagttaaaacaagtaaaacttcatagtcttcaaccttctgcaagattcttgaccaaattaatcttgaaaaaataacaaagaggctgcaatattgacattgtcatcagcagaatcacaatctatccaagtctgaagccaacatttcgtccaattacaattgcatttataaaagataaatttatttttacaagagaaaaacacattaatttaacttgcacatactcatatagcagaagaaataacacagagacaaactaccctttacaaacaactatgtagatactcactcagtttctaatcatcatctccctcaatcttgttctagagatgtaaacaaaccatgctagacgcgtccttgggatcaacatctccccaaaagagactccaataacaagcccactcacaagtcctgccaaaatgaatttccaatcgagttcaatcccggaatcagaatcatcatctttattagaagcagatggtggaagcagtgagtcttcgcatttcttcgacagtggttctccgcacaatccttgattaccctcaaaagagttgttctcaaaagtataaaattggttctcttgaggtataagaccagtgagattgttatgcgatacatcaaacttttggagaaattttagattagttagttctccaggaatctctcctgataggtggttttgagaaaggtctaacgactccaactctattattgtccccaatgatggtggaatgcatccggtgagcacattgtttgagaggttgagtgagtatagagccttgaggcttccaatgattttaggaatctgaccactgaaattgttgctcgataggtcaatgacagctaagttaattggaattttcccatagtttgttgccacacttttcatcacaaatgttgttgaataatcatactcattgagttcatcaaaaagaagatcttcgtaataggttatattttctagtgctttcatgtatgtcaaattactcatcttgaaatttttcattgcattccaagataacatatattcggaaggcaatgcccccttgaaataattgttagacatatcaatgatttgtagcattggaaactcactcgtattgttttgagatttttttataactccatgaaatttgttttcccttatcaaaataacttttaatcgagggaaactccccaaccaggtgggaaactcatcactgagttgattgaatgagaaatcaacatactcaagattcatacaagtagtgaatggttgtggaagttttccttgaaaatgattgtgactgaaatctaccattctcaactcacttttctgttgacattgaagaggaatggtgccgtgaaaagagttgtttctcaaattcaaaactaagatggagtcactaatcccactgtccgaacaaagtggaaattctccgctcaagttattatttgacaactcgagaaccaaaatagaactcaaattacatatagatgaggaaatttggccgcttagaatattgttagagacatcataatgtatgatagatgatggtggaataggaagctctccttgcaacaagttagattgcatgtagaaggtaagcaaattagaccaaggtagaatggttgtgtagttatgaaaccctgttatcaagttgttggataaatctatctctttcatgctttgaagacttgagttcatcagatcctttggaatttggccatgtatatggttatgagaaaggtccaaaaatacaagattattttgatgaacaataaattcaggaaatttgctcaacttacacgaagccaatgatagaaactcaagattagaaaatgtggagttaggctctctttttctttcttcaatgagtaatgatgaaatcatattgtactccagatttagaaaagtgagatttttcaatttgagaaaagaatcaaactttaatgtaccacttaaactgtttcttgagagatcaagatatctaagaattttgagattggacaatgcttgtggaactgaaccagtcaacttgtttgaagataagtccatagattttaattcagtaagatttccaaaccacgaagagatgggtccagaaatttgattgtttcttaatgatatagtggaaagtagggtgaggttttgaaaagaagatgggatgtaacctgtgaaactattatttttgagatatatagagttaagttggcttagtttacctattgaagatggaataggcccatacaatccacaactcagcaactcaagcagtgtcaaagaagtagacaagtttgctaaggaatcaccaagttcatacctcatctccacataatttagtgcaaaagtactcaagctagttaagtttttcaccaatcttcgaagattcgtttttttaagtttcaaactcggaagtggttggtagttggcatcaacgttacctgacaagtaaa

SEQ ID NO: 42722 - DNA, 10439 bp, Cannabis sativa
atctataactactataaaagtgagaatgtttttaggctttctctatataaattacataattaaccttcattaaatattaaattacaatgttatttttttttatgaacaacaaactattaaaagttataataaaatgtaaatattaattatatttttaaaactataaaataatagttgactaataataacataattaactggcttaaataaaataaaattaatacgataaatattatcacatattaatttgttgaaagatttggctaatagagaaatattatcgcatataccaaatatataatataattgaataaaaattataaattataatatttacgctattaaattgattatgtttcacttctaatatcagattcatttgaaaatttctctaaaaaaaatggtctgaaggaccctgcttagtggtatagtttcagaactgcaatatgattgatcttttcgtattcatggtgtgtatggttactggaggttgtgtgggggaatcgagtgagattgtggatgacattgtgtaaatgacgagtaaactgagagttagtagtgaggagggctgggaggagaatgaggaggctgcgtcatcgtttggcgaactgtctctggtaggaagaatgatttctaagagggagatcaaggaatcattattcactacaatatttggctgaatggagatggagatgattccttcttggggatatcattcaagagtcgagaggaagcgaatggagtattgagcaaacaaccgtggattttcaacagaggacttttactgctggaaaaatggcctagttcgggacaatagagagatgcaaagcttgccaagatattttttttggtgaagatgaaaggattgccaattaaagcttttactcgaaccaatgttactcgtttaggggagatcgctggtgaaatccaggagattcagtggattaatgaaaataagatgttcttgaacggatatgtgcggatgaaaatcgggtttccattaaaacaaagtatctatgtgggaaggtatataccttgtggtggaaagagatactggatccaattgaaatttgaaaggctaccaacactttgttttgcctgtgggttatggggacatgaaaagagagactgccataaggaggttttgatggaaaaatcagaaggtggacagcaagttcctaagtatggccaatggtcgagagatgaagaccccacacctaattgttttattgcgttcagtcagaattgatcacaagctcagcaacaaaatgggaggaatggtgatagagttggggagcggttgactgatttggaaaattcagatggacacgttgtggtggcgccgccggcactagttactgatagagaggaggctccgattatatgtaatcatgtaactgtaaaaggtagtggagcatttatggttgataagtctccaatcgtgggagatggtaataaaccaattcatatgccaggtggcattggagaggagaatagtcaaatggctaatttgggtcaagtgggcctggctggggttattaatcataatgggcctcatacattgggccaatctagtaaagagaatgccacaaagattaatagggctgctacagttgagattcatgtgaaaataggggactcgactcttagaaaggatacggtggggactgaaagtgaagaaaaaaaaagaatggagggaaatatggtgaggttgaggaagagagagatcgaagggcacttacaaagggaaaacaaatattgagtgatcaggaggtaagtgtttcttctaaggttgtcaatatcagtaatggggagggggagaagctgggaaaataaagttctaatgggcaaaggaaaacagtgtcgattaagaatcgtgcaaggaatcatggtaaaggaatgtcgatggtgtcaaacgctaattcaggagtgttggcgagatcattggttggcatggattctacttcacaggggaaaacgtttgtgttcggttcagaagatgtaattggaacaaaggatgtggagactaacaatgaggtgagtatttctaattatgctgatttctcatctcacttttcaactgaaggagcggcgagtcttgctaggcaagaccgccgagagcaatgaaaatactaagttggaatgtccaagggattgggaatccttggacattacgtgctctccaatcccatattcgggatcatgaccgagtattattttttttagctcaagtaaatgaacaaagttacaagctcagaaattatgtttgacttaaattttgggtagaattattgggctgttgatagagttggtatgagtgggggtttattactgttgtggaaggaggaactgagtgtgcgagttgactcaagttcacctggtcacctacttgatagggtggtgggtaaagacttctttccatggacccttacatgtttttatgggcatccggatgctacgcaaaggaagttttcatgggaattattaaggaatattaaggaggaagttcatgggtcgtggctgtgtacaggggattttgatgaggtggtgagtttgtcggagaaggttgggggtagaataagaagggatgtggctatggaggactttcggaaagtgattgatgactgtagcttgattgatttctgctcttctaaaacggaccttacttggtgtaatggacatgaggtgaatccggttatggagaggttagatagggggttgtgtaatgaggaatggttgcagaattttgatggagctgatattcttgttttggattggtgggaatcggaccatagaccgttggtagtggagatgccgattgttgccgaaagagaaaggtgcggtaaggtgaaacgaaagagtagattccactttgaagaagcgtggtgtgaagaaccagagtgtggagagatagtggagagggtgtggaataatgaagaagtgtgttggcttctccagggggtttaagttgaagacaaagaaggtgggggctgctctccgtgtatggaataaaaacaagaagaagacattacaggttaaaacaaaaaaattaaagaaggctatttcggaattatcgcctcgacaagattccagtatttggggggagttgaaaacattagagaaacaattaaatgtagtgcttgagaaggatgagaaatattggagacagcgaagccagacattgtggctcaaatggggtgacttgaatactaaatatttttatcgtaaagcttcggccagaaggaagaaaaatgagatcaaaggactagtggatagtatgggtatatggcagactgacactactatgatcaaaaagttgatagaggattattttgggaatctcttctcgacttcaaatctaaacatggatcaggttgatgagatgttaaggagagttaggcctaaagttacaaatatcatgaatgaggtactaatgcatccgtttgcagcagaagaagtgattaatgctgtgaagaatatgaatccagttaaggctcctggagttgatggattaccagcccttttttatcaaaagttctggggtaaattgccaaatgaagttgttgaggtgtgcttgaagattctgaatcatgaggctaatttggcttgcttgaatgaaacaattattgcacttacccccaaagttgagaaacaagtcagagtggaagaatttaggccgatcagttcgtgtaatgttatttataagattgtatcgaaatgtcttgcttgccgattaaggacaactatgagtacagtcatttccgacacccaaagtgcttttgtacaagacagattgatacatgacaatgctattattggctatgaaggactacattgcatgaagaatagatttcgaaatggtacaaagatgactttaaagttagatatggaaaaagcctatgacagggttgaatggccttttcttcgggcaatgatgatacgattggggtatgacatagcttgggtagataaggtgatgagatgtgttacttcagtaagcttttctttcctgattaatggtgatattaaagggaaagttattcctgaaagaggattaaggcaaggggatcctctctcaccatttctttttctcttttgtgcggaggcattctcaaatctgattcaacatgaggaacttgagcgtcgtatgagaggacttcagtttggtcgacgagggctgtcggtatcgcacttattttttgccgatggtagtttaatttttctggatgctgagatggagagctgccagcgttttaaaggacttctagattcatattcggctacctctggacaattggttaactatcataaatctaaagtttgttttgggagaaatgtgggaagggaggttcgacaatatcttgctacttttatgggggtctgagaggttgagaaccatggtaagtatttgggattgccatcttttgttggacgaaacaaaaaggaatttttggaccaaatcaagaacaaagtgtgggctaaaatgaaagggtggaaaagctctatcttctcaatggcgggcaaagaggttctcatcaaagcggtggttcaagctattctgacatatgccatgtcttgttttcgcctatccaagaagactatctcaagtatacaccgaatggctgcgaggttttggtggggatcttctgataaggataagaagatacattggtgtaagtgggcacagttatgcaaaccaaaggataagggtgggttgggtttccgtgatttggggttttttaaccaagcacttctagccaagcaagtgtggagatgcattcggtatccgaataacctttgtagcagagtgcttaaagcatcgtatttccccaataaaagcatcttggagactaaatgtggagtacatgcatcctttgtgtggcggagtttgatgtgggggaagaaggtgattgtcaatggatatagatggagagttggaaatggggaaaatgttcgggttttggaagacccttggcttccaagaccggtcacatttaagatatatgataagcctcctctttcggagaatctttttgtggcagatctgaaacttgtggatgggagttgggataaagactttatccgtgcggtgtttaatatggaggatgcggagctaatactttctatgcctagtatggggtgggaactcgaggataagataatgtggcactatagcaagaatgatgaataaacagtcaaaagcggctataggatggcaagttcgttagctacagaacaatatcagtcaaatgatcaagtgttggtggactggtggaaggcattatggcgacttaaaattccaccaaaaattaagcaatttgtgtggaaacttgcctataattggatccccacaaactctactttggccaaatgcggtgtgtctatgaatcctatgtgattgttgttctggccatgtggaggaaacatcattgcatgcgttatgggagtgcaaaagaagtaaggaattctgggcagcaagtggtttgaaggaggacatgaaacaaattcagggagaggatgtgctctcttttttgatgaggatggctcggtagtgggaaaagaacaggtttgaattttttatggtgatcacttggaatatatggaatgttagaaacaatgtagtgcatggaggggctgctcctattgcaggcgatatggtggactggtgcaagaactatttggttgaatttcagggagggggagatattaaagggagtcgaaatcaacatgaaacttctaagtggggggcacatgagatgggacgagtaaaaataaatgtggatgcaggggtcaaaggtggaggaggtgtggggattggttgtgttgctcgtgacagtcggggacggtctcagtttgcgtcctctattgtgattaatagggagattgctccacttcagttggagttgagggctattttattgggattacgatgggaattcagcgcaaattcaatagatttagcatagaatcggatagtttacaagccattcaattaatccaaaagaaggacgaaggttgccatgatgttgattgtttgctagatcaaattagagctttattgttgtatgattttgttgatggtatctcgtttgtattttgtgaggccaatagagtagctcatgttttagccaattatgctttgactcacaaagctagttccatgtggattggggttgaaccctcttatggaagtcaggagatctctcttgacatgcctaatcctgtatgattctgttattaatgaagatttccatttcaaaaaaaaaatttgattatgtttccaattctttcttcaaacgacaaccatcacgcgctccaccactctccccccaccactcagtcattggaagcactaaccaacccttcatcacttccttgttaccattttacgttggttgcagtggtaaatactcccaccgacacttataacaccaaagataaaagtttgaaatctcaatataaaatctttaacataaaatggataaaagatctaaacacaaaatcaaagaactaaaagagagtattcatgaacctgaaaaattagatctaaagctaaaacacaaattcaaaacaaacctggtttgtgacattgttaattggaggagcggacgtcgatggtccaaggagtagaagaactcaagttgttagactggtgagtccgtgccaacctaacccaaagatgccacctttggtcaaaacaaaacaaaaattttgatcgcacggtcccaacgtcgttgctgccatcacctgaggaaaggagtcggagttgggatctcgaaggaaccaccaacctgacggagctcacgtcttgaagtgccagatggacctctggccttgacggagttggcgtctgaagggacctttggtcgtgacggaggtttctgcagtcgtcgcctcaggcctgagtgcctcgcagtgctgaaaccgcgttgcctaaagccgtcgtcggtggaaatcacagatggtgggggactcgagagagaccttattacttaatatacatataaattataaaatcttaaatttttgaaagaataacaaacagttttttttaagaagttgtggggtgtacttattaagaaataaaataataagaataaaaattaaagatacctattttggtcattttatgataggttaaatatgtaaataaatttttggggtgtagttatagttttgaggggtgtaaatataacttccctaaacgtataaataagataatatataaattaaaaaaaaaatatattaataacagatttgcctttggagacataaaattagaacgatagaaaattaaaataaaaaatcctaaagattttttagaatttttttgagctttttacatcacatactaaaatttttcacattttttttaccgtggggcagaatttttttcaaaaatactgtgtttttgttttaaaaaaaatattgtgtactgtggtaagttttctttgttgttccactgtttttttagttgttctattttgtattttacagttgttttataaaaaaatagtatttaaaaaaaatcgtgtatcagtatttttgtaaaagttaacctcaattctaatatttttgtaaatttccattttttttatatagaattcgataataaatttgccaacgaaaattaggatttttatagagaagattaaaaaattaaaataatacataacttctaaaaataaaccaaattatttgaaattcaactttttaattatctaagatatttacagcaaaactcttttaatatttacaattgttacacatatgaccataatagaaaaaatcgcggtaaaagtaccttatcttacgattttgttacagtcgtaccctttttcggtcattaagtgtcaactcaaaaacacgtgacgatatattattggactatgtattaaataagctaaagaaatatattatcacgtatttttgagctagtacttaactgacttaattgacacttaacaacaaaaaaagtacgattgcaacaaaatcgtaaaataagggggtttcgccgcaaatatcttttatctaaaccttaaaaaatctattttaatcatttatttagtaatttttgaaaaaaaaaggataacctcactaaaatagaacaaccaaattggccattacaacatcgttgatagtggaaggaacattactaccaacaaaaatacaatctaattaacaatacgcatcacgaacaagacaatgagtggcgttgttagcagattgttttacaaaaaaaattgaacattaaatagtgaatcaagtaaaattttgtaatctaaaactaaagaagcaaacaaaaaaagcataataattgagttctcaatcacttggacatcaacaagcaagccaattccaacaacaacatcatgtcatcctttctttttgacccaacttagagcctccttgatgctaataatctcagcaagattgggttgaagacaacctactttaaacaaggtataaaagcctccaacggtcgaccctcatcatcgtcatcaaggcaaccaattcaataggcatgactagctgaaaaaatagctccatccacgttcaccttaatcttattcacttttagtttaatttaatgctcaacactgctattaatattataatgaactaacaacggcttgaaacgatgagaacgagcattcctccattgatcaagaatgactcacgcggagaagacctcaccttgttaatcctagaagatcatttttggcatttcatatagaccatgacaccattaaagcctcctctataatatatgcacggtccctacttaacaacaccataaatcaagcatcaagtgcaacaacatacaaaaaactcagtcaacactcgacctattccaagacaaatgggcaaaaggacaagacaccaagacatgacaaaatgattcctcatccctatgacagaaggtgcaattcaactccataggaacacgcttagaacacaactgagtacgagttggcaaacaaccagaaagtgccttccaagcaaaatggagaacttttggagggacattgactttccacaacttacgcttgatatcagatttcgtagcagctgactaggcccttttttgtatgtactcttaattgtataaaaatcagaattctcatgcctccaaaaccaattatcaacaacaattgaagaactaagggaaagactaagaataagatcataatcccttggctcaaacatatcattgacaatctcctcatcccactccaaacagtccatggccaataattgacttacattagcatcaacaagactaggatgtaaagatatgacataaggactaattccatcaggaaaccaaggaaaattgagaataatcacactcaatcttgagccaatcctaacacaaacccctgatttaataatatcttgtgtctcaaagatatttctccatataaaacttggattttgaccttacacagtagtgagaaaaagtttcagaggatagtatatggctttaaaaacccaactaacaagagaattctcaaaaagcataaatcacgaatcttgtttaccaacaatagtcaagttataatcacaaagacttctaaaactaaaatcactcgtgcttttatgcttacacaaacgattccaaatcatccaaataacacctctagaataatgggaattgccccactagtatttagacatcattttctcaaggtcactgcaggtctataaaggaagaagaaatactgacatagcataacttgaaagagcatgagcaacgattttcaacaatacctcatggtctgccttagaaagaaacctaccctcccaactttgtatcttttttgcatattctccttgaggaaacccaagattattgacttattgtgaccaatgatataagataaccaaagataaaaactattctcatcagttgcaaccatgcccaatcttgtacaaagcctcacatgcaaattagtaggcatattggaactaaaatagatggaggatttagagaaatttaccctttgcctagaggagatctaaaacagatggataagtgtaagtatgttataagcctcttccagctcattatgaattgtaatatcaatgcaattaaatatggacttctaattattttactttaataataactatagaatatcgctacacatttatgtggcaccacctcatggtggtattaggcacaccatagtgcctaatagaaattatcttaaaaaaataatcactcattttgaacataatttaacaaaaatatttatctggatcgttttctccaaaactcataacaaaaacagattataaactattttatttaaaaaaacaaacattcattaatctaagatatattttaatagtttcacacttttttcataaagacacttctgtaaaaaggaaaattgcaagattgaaatctcactctgctaatataaaaaaaa

SEQ ID NO: 42723 - DNA, 3376 bp, Cannabis sativa
gtagagcaaaacataattgcaatgtaaaaatagtgcccttaagaatattctattatttattcaatcaaatcattatatttactttttttaaaattaaaagtaaaagtaaaataattaataaatttgataaaagtgtcatacaattgtaaaacaatttcattcggataatctatattaaacttacacacacaaaaaaaaaatctatatgtttatataaaggaaagcacattagtgtgtaagtggctctctataattttttatttctatttttctaattttgtgagaatttcatgttaatgtgctaaaaagcatgattagtcatcaatcttattttgttaataatcccacatcccacattgtgtttataaagtaatatacactatataaataaattatttcttttataatttttatttttcccaaaatttatatttttttccttcttggataattaattaaattaatcttatctaattaactagttaataaataaaacactttagtctatcagtaggcaatattgccaaaccacaaaattcattcttgaaccaagaaccaatgaacaagtgtggcttttcattgttttttatttttatttttttatcaaactaaaaatctattattgaactaaatggaaaaatgaagaaaaagaaatcatttacacagactaatgcacaaaggtaatatataaaagataatatccaaagccaaaagataactttcttataaggttacagattatagatgaggcaaaactgtgttccactttagcttttgtcatactaaatgtttcaccatgtatggcccttcaagctcataacccagtttcctatagtaatgccgtgttcctacaccagaaataacacctatcttcgtcgacctatgctccctgcgagcaatccgctcggcctcctccatcagaagagtaccataaccctgtgaacaaaaacaacaaaaggattaagaacttgtaatgattaggaacatttactttagcttctttattacttttggttgttttgtttagtagaagcattagtgtgtgtacctgatgctgcagtttgtctgcatccctcccatgaaccggaacagcagttccataaacatggagttcccgaacgatggaacatttccccatgagttcaggacaagttgtgtttcgtccacatttgcgtagccgcagcaggccaacaagaatatcctattgtcaacaaagaaaaaagaaaaaagcatcttagatttcagcaggtccaaactgttttgctagcaaacagaaaacaacatggattcatctcgagcaccattgactgttaaacaattggctcagtatcaccagtaaattggttaacggcataggaaaccattcagtagccggggacaaaatattttcaggaaggtagatggggagagattccaaatacctggcgtatgtcttcatatgagaggaaggtttcccacccttcatttgctgcataatctcggcgtactagctcaacttgttcaggcttaattttgtggtggatatcctaaaacaatcaaacatattagcaagtattttggactttatttactttttcattgtgtcactttcttttcctttttctcttcccttttctgagaaacagaattaccgagtttctcacaattacataataagcacagtagtgcatacttacttggattccagcctctcttgttcgaacatcacgacattttaatcccaagtcctccatcctagctaaagccagctcccgaagatttcctttctcaacccccgatgtaactagaggcatgggaatatcccgctgtaccctgtagacacgtgtccaaggaggtaccaaggctagaatcctagctacaatgtccacgagttgctctggtggatagtttctatacctgcaaatggaaaaaatataaacatttttactaagatattcaacattgatcctcatgttaagccattgttagtgtttaactgcgccaaggtttgttccaaagacaagagaaatcatacactttaagcatctgcaatcactgaaagtaaaccacacaaagcaggaagagaaaggctttcttctttgggacaaatgaaaacatgaaaataaatattgaaattatacctgccagttttccagagctcataaagcccagttccacggatcacaagcgtaggatagattttaagtccatcagctcgaaatgatgggctctcaaaaaactcccgaaaactttccatgtccctctccacaccaacatttggaaggtcaggcatcatgtgtgcaacaacctaaagaatacacattagcatgagaaatgaaaacaagacacttgagaataatttgtgtgcagcagattcacataacattcatgatgaaacatgtacaattagctgtccttgacacaaaaacataaaaaacttaaatcgagatgataaaaggatatgtaacaaaaacagaaaaagcgtagcttttctaataaaaagaccccaagtagttgaaatagattcataatcagtcattagaaattataatcacgtttatcatgtaacttgaacaaagacatgttaagggtaaaaaaacacaccttgaaaccagcatcctttgccaagcagaaacagtcagccacagcagcaactgtatgacctctgtttgtgtcacgagccacatcttcataagtactttgtactccaatctccagtcttgtgcaaccataggtaagcatttggcgcaggtgaggtccaaggcaataatctggcctcctgatgatttggaaagaagcaagaaataaggaaaattgtcaaatatctaaaaaccagagcaagaagtatagttacttttaatctttattaattttttttttttcaaaaagggttggatacttgaaataaaaacttcagatattgggacttcatatctatatacataaaatttaaaactcacgtttcgattgtcatgccaatgcatttagtagcaccatgctctgagtaagccacggcctcttctacattcgcagaggtgtgtcccgacaaagcatcgtgaagattccttatgaaataatcacggtaatctgctggcagtgacataaacgtaccacccatcaaaatgaactcaacctgaaatcatatggtcatgctagtaagcaggtgacaatttgcttcaacatccataagcataaaatagttgttcaagtattttaaatgcaaacaaaccagaccttatctacactgtgacccaaacgcttcaactgatctatcctgcttctagcctggacatacgggttgtatctaaaaccagatataagagcgcaggtgaacaattattaacagaaaatatatcaaacattatactgcaaagaagaaaaaagtaatactgcatgt

SEQ ID NO: 42724 - DNA, 2807 bp, Cannabis sativa
  modified_base (194)..(207): a, c, t, g, unknown or other
taattttaaaaggtaaatatttttttttgggcccctgggataggtgggccctaggcacaggcctagcccgcctatccccagggccgggcctgtatggaacttcattctagttttaagaatagcaccaacaccaacttgtttaattctagaaatactaacacatcatgcatcttgcttattattattattattannnnnnnnnnnnnnattattattattattattaaatcctctaatattattgatgaggaaaaattataccatgcaattctttgatcatagttttatggtatattttagactaaatttaatccaaaatatacatcatctattgaaaatggtctgaaggagcattgtcgaacaataaatgtaaaagatgcataataattaaatatcaagtctaatgtattttaatttaataagtaataaaataaaaaattgttaaccaaaatgtaaaatatcactagtgtgataattaatattagtttcttttatttttatagagatcaccatgtacatgccatttaactattattaactaaaatgtaaaatatcactagtaatgattttgatgattaatattaatttcgtttattttatttttatagagatcaccatgcatgtacatgccatttaactttagtttaagtcttttttaattttcattttacattacaatgattattttcatttgcaactcaaatagaaatactataaggaacacctttactagtgacaccaggctcagaaaagggcttcaaaagttgataaggcacaaccccaactccacaccgattcttcaaatccttattggtgttccttccatcaataattccttccaactctttcaaccttccttggaatctctcaaaagccgcttttataacatcatcttcttcccacgaaggctctatcttctccccaagatactcctcatctggtgaatgattcgatagtatatccaacactgccatcaccgttgttgcttgaatctgcgaaggaaagcactgcataagtgcttcctccggcttagcccaaaatttctccaaaaattcatcgctagcatcctcagttggcacgttgattctagcaattgttggcctattgggaaaatatcccgcgtatgtatattgtccaaaatttacagctgcatgatggcccgatgttacccaaacaattgtcgttatgatttgtactaagtcgtttggagtctttaagattggccaccaaggctcatcttttttgtctccatgacctacagttctaatttctgtccaccatgattgtagctctaagtcagactcaattagggttggctctgagtaataatagttgacatagtcggtgacccattgtttgattatatcccatagaactagaccatcattggcaaaaggatagtcttcaatcgttaactttagaccatgcggagcgctcggatcctccacagccattcccctacaaagttagtattagaatcgcaaaatgcatgtagttccatctcaaaattaattgacaatgagaagagtagtcctaaaagtttatatttattattacatttctacagattagcaatatgagactctctaacaaatattatcattatatattacctattgataaggtcagctggtaatgcttctaggtcaaatcgccatatttggtcatatgcatcagcacataactccatcgagtattttccaggactgaatgaagattcaatgatgcctcctgcattgactagtgcttctcgagctagggcattaatctccattgtgtatcgaaaatgtgggtgcaacaatctatagattggatgcatcacactgagttgtctgtttgttgctattatatatggttcggttgcacaatgtgtccttagcctgtgttcatatacaactaatcaaataatgaaataagatataacattggaaaattttatggtgtactcttaaaaatgggtgcactgatgcaccccttcatatttttaacatcggagtagttttaattttaatttttctatatgtagtaatctaagatattctataaactttcgagaaattcagaataatttaacacattggaaacaagatcaaaacagtttgttctacacctacatctttcattttatacacatgtacgtgaaatagattatttaaactcaactttctatatattataaattattttaaatttttcaaaactttgctaaatatcctaaataactacagtatataccatcattcaaataaaaaacacgaaaggagtgtaccatagaagcatagcctatataacatagaatcatacaaaataattaagtatatataatcatatatatttaccagtgactaacaagttggtgataaccagaatcatgggcaagtacatgagctttggcaaacctccatagccaaacagcagtggcatgccaagaaggagtgaagacttctttccattgtggcttcccatccattggtggtcgagtcaactcaatggccaatggtcttaatgttccatccaaagttagaaaaaacaatgttcttgatccatacaatgttgttccttcgatttctcttactttttttacatatggtaaaagcaaatcatggtaatctaaaataaacaacttcttttcatttatggcctacaataatatgtggagaaaagaaaaaaaaaatgttatgaattattttatagctatataactagctagctagcttaaattaactaataattatcaacataattagttattaatttatgactaataataattagataattagtacctcatcaatagtcatgaatcc

SEQ ID NO: 42725 - DNA, 6958 bp, Cannabis sativa
  modified_base (56)..(71): a, c, t, g, unknown or other
ttcaaataattatactattttaattattaattaaaataaaaaactaaaatattaannnnnnnnnnnnnnnngtggcttgtcacgtaacaatcacccactagtatatatatagagagaataacaatatgattatcagtttgagaaactcgattgagatctaactgccaaggagcaccaaaaatggcgaaatcgagcgcagacgacgatgagctcaggcgagcttgtgaggcggcaatcgaaggcaccaaacagagtatcctcatgtcgatccgtgtcgtcaaaggtcgaggcgtctggggtaaatccggcaagcttggccgtcacatggggaaacctagggttcttgcgctttccacaaaatccaaaggtcagaaaactaaagcttttcttcgagttttaaaatattccacagggggagtacttgagcctgcaaaattgtataaactaaaacatctttcgaagattgaggtcatatcaaatgatcccactgggtgtactttcacgttgggatttgataatcttagaagccagagtgttgctccacctcagtggacaatgcgaaatatcgatgataggaatcgtcttttgttgtgtattcttaacatttgcaaagatgtgttagatcgtcttcctaaagttgttggtatagatgttgtagaaatggctctttgggctaaggaaaataagcctgctgttacgaaaaatcaaagggttgtacaacaagatggtcctgtttcaacaacagtaactgaaattgattcgaaagttactgtggagaaagagcttgtttctcaaattgaagaagaggatattgttggggaggctcttttgggtacttatgttatgggtattggtgaagcagaggccttttcggaaaggttgaagagagagcttcatgctttggaagctgcaaatgtgcattccattttagaaagtgaacctttgattgatgaggtattacaagggcttgaggtagcttcgaattgtgttgatgatatggatgaatggttaggaatctttaatgtgaagcttagacacatgagggaagatattgaatcgattgaaactcgtaataacaagttagagatgcaatctgtaaataataaagctctcattgaggagttagataagcttcttgagcgattgcgtgttccttctgagtatgcagcttgtttaacaggaggtttattcgatgaggctcgtatggttcagaatgtagaagcctgtgaatggttggctggtgctttacgcggtcttgaagtacctcatttggatcctacctatgctaacatgagagctgtcaaagaaaagcgagctgaacttgagaaattgaaagctacatttgttaggagagcttctgagtttctgcgaaattactttgcgagtttagttgatttcatgataagtgacaagagttacttttcacagaagggacaattgaagagacctgatcatgctgatttgcggtacaaatgcaggacatatgctaggcttttacaacatttgaagagtcttgataataactgcctggggccattgaggaaagcatattgtagttcccttaatttgcttcttcgtcgagaggctcgtgaatttgcaaacgagcttcgtgctagcacaaaagcgtcgagaaatccaactgtctggcttgaagcttctacaggatcctcacagaatgttaatgctgcagatacttctacagtgtctgaagcttatgctaaaatgctgacgatttttatcccgctccttgtagatgagagttcctttttcgcacacttcatgtgctttgaagttcctacacttgtgcctccaggaggtgttggtaatggtaataaatctgggaacaatgatgacggggatgatgatgatttggggatcatggacattgatgaaaatgatggaaaaaccagtaaaacgtctgtggagttagcagcactgaatgaatctcttcaggatttgctggatgggatccaggaagacttttatgctgtagtagattgggcttacaagattgatcctttacgttgcatatcaatgcatgggattacagagcgctatctctcggggcagaaagccgacgcagcaggttttgtgcgtttgttgctcggggacttggagtcgagaatttccttgcagttcagtcgttttgttgatgaagcctgtcaccaaattgagagaaacgaacgcaatgtacgacaaatgggtgtcttatcctatattccaagatttgcaactcttgctactcggatggagcagtacattcaaggacaatccagggatttggttgatcaagcatacacaaaatttgtaagcataatgtttgtgactttagagaaaattgctcaaacagatcctaaatatgctgatatcattcttttagagaattatgctgcatttcagaatagtttgtatgatttagccaatgttgtgcctacactagccaagttctatcaccaagcaagtgaagcttatgagcaagcttgcactcgttatatcagcacaattatttacagtcaattcgaaaggcttttccagtttgcacgaagaatagaagatttaatgtacacaatcacacctgaagagatccctttccagcttggtttgtcgaaaatggatcttcgaaagatgttgaaagctagtttatccggggttgacaagtctatcgctttaatgtataagaagttgcagaagtacttgacttcagaggaacttttgccttctttatgggataagtgtaagaaggagtttctagacaaatatgaaagttttgcacaactggttgccaagatttatcccactgagaacatcccatcggttgaagaaatgagaacccttttggcttctatgtaaagagtgagtttgtcttaatttatatgtaatgtttgtagcttcgttagagtgagaacttgtcttaccttgctgctataacttccttttcttataatttgatttcttagacaaattttgctgctataatggtatataaatattttattattattattattatttttctctttagatgattaatggcatgttgccaatgccatatgtggtccaaaaaaaattgaatatatgatagtttgtataacctctcttcatagtaaccaaataggatgtcttggttaggctatcagcagctttattatcatctcagtatgcatgagaaattaatgttttaaggcttaaaaacatctaatggcttccatttcctctggtgaattgatttcgatagtgcagcatcaagatggctcccaaactatcttgattttgctttccaagttatgctttcctaaaatcacccgcaaatgagtcttgcaagcgaagtaaaaaccgctgctcgctgagttttagaaccatgaaactctttatatctctccatccaaatagaccgcttcaaacatattatcgtctctaattcagaattcgaacatgttgctgccaactggtataggatatcacacagttgcagtgaaataagacatgtcctatcgattcgtatgcgttggaacaaagagaacaagttgctagttatgattttcatgtgaataaattgacagcagatggttgggcattatgaatcaatctttactgacgttgtgagaccgaccttgaataagattcagcagaggaatcaatggaatagcctaaaacaataactctaaaaactattagaataagctccaaactaactctaaaatatagttataaatatagttatatttttgaaattaggtactcatcaatattgagctaaaataaataaccctctttcaaaattacttttaccaaataacctttttataaaattattttaattttttaattttgttaaaaataatcttataaaaaagctcaatatcccctttatcaaaccttcttttgtccaataaaatttatacttcaaaataatcacctcacactcacacctattaatataaacataacaatcgaaatttcaatatttatagtatacttttttataaacacatgtacaaataattagcataccttaatttttgagtcttagatctctaagaaataagtgtaaagagaatacaatcaagtgaattttgattttcgattgctatggctatgaaatacacaactctgaatctagaggactatgatgagaaagatctcaaggataatgaattgagaacgactaaaaggttggtcaatagaaaataaaaaaaaattaaacgtataaataaattgaatttaaataaattactcgtataaaaaattttaaattattaaacatattttttttattaaaaatcatttgaaacctgcatttaatttttaaatataaatatataacctacaggccactgtatagctgagttcgtttaaagtattagtttttaaaaaaatataaaccctttaaaatagctgaaatcgtttcaattattcagtaatgagttagtttaggaatttagttgttgatttttgactcaaaaaaataaaaaggtattaaaatagtgtacctacgagttgatatactttttttaatttttgatgggtggtttctttttttgtttagtaatttgtttgtttgttttttttttaaattatataaaaatgataaaaagaacatcagttgtttttttttttttaagattaagataaattactcttttcttttctcagaaattaaagaattttgtttggtaactcggatctcagctcattcttctttcccatttccctctaaaatgtctagtctagaaatcgaagctatagatgtgatcaaaattgtgcttcaattttgtaaagaaaattcattgcaccaaacatttcagacacttgagaatgagtgtcaaatatgtttgaacacagtagataacatggaaacatttgttggtgatattaataatggaagatgggatgtgatactccctcaaattgctcaactcaaacttccaaagaataaattggaggacttgtacgagcagattgtcctcgaaatgattgaggttggtgaattggataccgctcgtgctatcttaagacagactcaggtaatgggttgtgtgatgaagcaagaacaacttgaaagatacttgaggctcgaacgtctgttggtgacaacatattttgatccgaataaggcttatcaagagtcaaccaaagagaaaagaagagctgaaattggtgaagcacttgcagcagaggttagtgttgtaccaccttcaaggctaatggctcttattggtcagtctttgaagtggcaacaacaccaaggattggttcccccagacacacacaaatttgacttatttagaggaacagctgctatgaaacaagaagaacaagacacattttcattcccatcctcaactcttggacataccataaagtttggcacaaaaagtcatgctgaatgtgctcgtttttcccctgatggacagtttcttgtttcctcctctgttgatggatttgttgaggtttgggattgtgttagtgggaaattgaacaaggatttacagtatcaggctgatgaaactttcatgatgcatgatgatccagtgttgtgtgtgaatttcagtagggattcggaggttcttgcgtctggatcacaagatgggaagatcaaagtttggcgcataagaagtggtcagtgcttgcgccgtcttgaacgcgcacattctcatggcgtcaccagtgttttcttttgtcgtgatggaacgcagttgctgagtacatcgtttgatggcacagcaaggattcatggtattaaatctggcaaattgttaaaggaattccgaggccatggatcttatgtaaatgatgcaatctttacacaccatggagctcgcgttgttacagcctctagtgattccaccgttaaagtgtgggatgtgaagactacgcaatgtctacacaccttcaaaccgcctcctcctctaaggggaggcgatgatgcgtgtgtcaattctcttcatcttttccccaaaactagttctaatagcgaccaacacatcattgtatgtaataagacgtcgtgtatatacatcatgacacttcaaggacaggttgtgaagagcttttcatcaggtaaaagggaaggtggagattttgtgggagcttgtgtgtcacctaaaggggaatggatttactgtgttggtgaagacaggaatgtgtactgcttcaactatcaatctggtaaactagaccacctaataatgaaggctcatgacaaagatgtaattggtatagctcatcacccacatagaaatttggtggccacatatgctgaggactgcacaatcaaactatggaagccttaattcaatcttttctgtattgatttgattgattgattcaactattatttatttttgtccatcctattgacattctttaaataaataaacataaattataatatagtgttaaaattgaattttgcttggttgagataatatatatttcaaatttttattttattactatttctttttggtaaagatgatacagagattttgtgtgggactttcatgattagaggtatatcaatccataattagtctcttcttcttcactatatttctgatttttacgctgggactttcatttgctgcctctacttcaagagctacagaagaaaaatcctcttctcacacaagagcatcaggtaataattatactttatctatgagtattatctattagatatgttacttagcttggctatctgaaatagcttcattcaaaagactgaggactaaaaaattcattgataacgggcatcagccacataatgttctgaagtagcatgcaaagcaatttagcaaggtatcagctactacattgacaattcttagacaataaataaaaatcacaccagaaatagtagagcataaatctctagtatcattaagaaagtaaacccaaagaagaatccaacatcgttaaagtactgagcttcttgattaaactttgataatcggat

SEQ ID NO: 42726 - DNA, 9013 bp, Cannabis sativa
taactgctgtggatcaatcagagataattgctatggatcaatcaggtacacatacctaattattatatcttattattgtgttctatgttatatacaaatagatcttgggcatattattaatttatctaacattgaaaactattattatttggtcactgatatttcactggttttgtgtgggtttgcatcaaatatttaagaggtttgaataatgtttttgaaattattgatgaacactatatatattgatgttttgttttatttttcttctctattaacacaagttaaaaatgagtagccatgctcttgtagtggctgatataagtactcctacccatgtagtagctactctaagtcctagtagaaggaagaagcttgctagaaaatcttgctgtcttcctcaaacatggtttctaaattataaggatgtgctttggccaaatgaaagaagagctattttggggagttaaatggggtgatccgtaacttggaggaacgaatctcttggatccaacaacagcagctatctcatggattaattgaacaactggtacttattggtaaacttgcaaacgtgtggaaaagcaaagaagacatgtggagacaaaaatctcatgatatttggttaaagctcggcgatagaaacacgaggttctttcattcatcaactgttgttaggagaaggagaaatcatatttggagcctgagagataagcatggtactttgtggaataccaaagagaaggtttaaagtatgatcaacaactactttttggagatttattcttcaaattgtacggtgttttcagaggatttcgaccagtttttttagaagcgaatcagtaatgaagcgaaccaagttattgctgctattccgtcctgtgaagaagttaaagagacggtgttctggcttcatccgcttaaggcacctgggcctgacgggtttttagaatgtttcttcaggaagtattgggatatagtaggcccaatggttaccaaagctattcaggaatttttccaaaccgatgttttgaatcctattctaaaccatacctttatttgtctcattctcaaggtggagcatctagagttgattaaacaattcagacccattagtttgtgtaattttcaatacaaggtgataacaaagattatatctaatagacttcggccttttatggaggatttggtgtctcatgttcagtcagctttcatacggggtcagtggattgctgaatcttcaattttaacccaagaaatggtgcataaaatctgtcacaaacaagggaaaggtggtcttatggccattaaactcgatatgcacaaggcgtacgacaagatggagtggagttttctaagtagagttcttgagaggaatggttttagtgaaaaggtttgtaatctcattatggcttgtgtcaagagtgtaaccttttcggtcttgctcaatgggagtcctctcaaaaagttatccccttaaagaggccttcgccaaggtgacccactatccccttatttgttcttgttgtgccaaaaagtgttatccaaacttattcttaaatcagagagtcaaggcaaggttcacgggattaaaatatctaaagacgcgcttgctatttctcaccttatgtttaccgacgatactattttgtttgctcgggcaaatgtgggggaagctgttgaatttatgaagtgtctttcagtgtataaatcttggtcaggacagaagtgtagcaaatcgaagtctagcgtattgttttctaaaaatgtttcaaggaaagcagaggtgctcaaagccttggatgttactcaagttagtggcaaggaaaaacatctagggaatctattcgttttcaagaggaggaaggtggaagagtacctgtttttgaagaataatatgaggagaagacttgaagggtggaagatgaaattattatcctatgcgggtcgtctcacactcattaaattggtaattgcatatattcatgtgtataacatgtccacaaataagataccattatccatttgtcgttctttggatgctatggttaggaagttttggtggcttggtagcgttgaaaaatataggtttatggctttcgaggcatgggatactatttgccaaccaaagagctctgatgggttgagcattcgaagatttgaagattttaatagagctcttatatcaaagctggctttgtgtgtggctcaaagagttgacaaaccttgggttgcttgtctccttagtaaatattgtcgttatgaaatcttttggtttgtggctccaaagaccaatgattcgattttctagaaaaaattgttggatgttagaggtataattttgaaagggtctttatttttggctgctaatggagagtcgattgatgtgtggagacaaccgtaaattccttggatgaacttctcagattttagcctacttatgaagcagctgagaagcaagagatatataattaaaagagtggctgattcatctattgatagatcctggaataaagagattgcacttcaaatttttggagaagagcttaggaagagaattatggagatacataggataccttctcatcactctgatcatattatatggaaggaaaatctgaatggtgaattttttgtgaaaagtgcttattgtgtggatcaagcggtgcgttttaatccaaagaaggaaatataataattgatttggcaagggaatatccatcctagactgacagtggtgctttggaggatcctaaataaggctattcctattaggaacaaactgccttttggtgtgggcaagtattgtcctttgtgtggctttgagatggagtcttgtctccacaccttcagggagtgtagtgtgtcgagggcgctctggttttcagggtgtttttatgcttttattagaaattttcttggtgcaaatatgattgagtttgttgaaaatattctactgtctgcctttattaatcttcgttcatttatcttagtgtacatggcatgtatctttgatgaaatttggagcataaggaataaattcttgtttaaaggtggggttgttaacctggatgtttctcttaagtggattcagaagaattttgttgagttctccggttcttctgaggatgctgctactgctttagaggctcaacctcttgatgttgggttatcgaggaatgattttgaattggtgttacttactgatggatcgtggtaccaaggagatgctggtttggctgtggtaatgtataatgtaacaaaatgatcgtgggcttataatgtttaaagagtttcaacctcgtctgctcttgatgctgaaacaagggcaatttgggtggttttatcctgggcaaattagtgcaggggttggcgttggggaaagggccgtgtgttcctaattagaattttcttaatgtttctctttctattttagagttatctaagtgtttttagtcttgtattttttcttttgttaagcagttggctttggattttgtcagggccggtccttggtataggcgggtctagggcctagggctcactcattttagatttcaactcagggtcacccttgaattatgttgatggtctagctaaaagtgctagaatttctagactttctgctggtatttccctggtttccatttttttctggttagttaatgaaatggtagttcttaaagaaaaaaaaaaaattatagattgaaggacttgacaatcagtgacaaaagaaaacatgggattatatatatatttttgatatctattgattactcatgaggtgggtcccactcctacgtacgactgtcctcacctgctgatcaccctcgggtaccaaatcagaagggacttaaaacgatgtcgtatgcgtcaaaactcaaaaacattgaatgaaagattagaatagaatagaatagaacagaccaaatcgatctaaaacgagagaagccaaagataatagattagagagaggcctcagtcggtggtgggtggttgtttgtttctcaagaaaagtatacaaagaaaattaaacaactgaaccaatgatgatgatgaattcatttagagatggtggagtctgtttatgcagttgtctttgaaaatgggtggagaacctgttattcactctaagctaccaagctttcccttgagtatttgctttcgctttagtttcaagtctctgtcacaatcacaatcaccttcttcttctttgtttttgcgcttctctaagcgcccttcacgaccatgatcgtttctcttacacccttaaaaggatctcagttgcagatccattttcatcgccgaaaccgaaaccaacatcgcttaatctcgttttcttatggaccccgccgcttcacgccccgccgtggtgatcgacaatggcaccgggtatttatatatataaaaaattattcccgtaaccctatataagtgtttgaataaattctttcattgggttatatttgatttttcgtttatgtgggtattacgcattgcacacaacctgtttgatgaaatagctcaattgggtttgtgtttttattgttcttcctgtgattgcagctatactaagatgggttttgctggaaatgtggagccttgtttcattgtccctagtgtcgttgctgtaaatgaatcgtttttgaatcaatcgagaacttcctcgaaggctaattggttagcgcaacatagtgctggtgttatggccgatcttgatttctttattggggatgaggcgcttgcaaaatctcgatctagcagcacatataatcttacccatcctattagacaagggcaagttgaaaattgggatgcaatggagcggttctggcagcagtgtatatttaattatttgcgttgtgatccagaggaccattattttcttttgactgagagcccattgactgcaccggagagccgtgagtatacgggtgaaattatgtttgagacgttcaatgttcccgggctttacattgctgtcaattctgtgcttgctcttgcggctggttacacaacgtctaaggttggttttttaagttcattacttatgttaaatttctaataaggaaacaaatagtatagcttggagctaatatgtttgctcttctcatattaaaagtgtaggcagttcattaagctggttttaaatttaaatgtatttagagtgattattgaatgtctgaatttgaagatgcaaaaagggaaaagggcatgattctaatatcttaaatattgtgttttgttggatacttgaatatatagctctccagcaaaagggcacttgcgggtttagagttgagatactagtctttggataccagtagataatttttaatcatgtgataaattctgtctcttattggttaacatccttgtttacattctagctggttcaagatcttgaatttcgtttgtttcgcatttgctttacgcaatgatgacaacgatttagattttttggtaaacatgctggttatttaggtaacatttgctttatgctatgaggaaaaggatttggattgtaggtaaaccctgtatggtaatgaggaggtcaacaagtatttaataattttatccaactctgaatttgtatttactgatttgtgtttattattacataatgtctgtacatacccttttagactgacctacagttttatagtgtgagatgacaggagttgtagttgatgttggtgatggcgccactcatgttgtacctgttgcggatggttatgttattgggagtagcattaagtcaattcctattgctgggaaagacgtaacactctttgtgcagcagcttatgcgggtatgttttttcatttgactttcattcatattgttgaagatgagtacacatcatacacttgcattttgctctacttgggtctttcttataatatttaattgcgactagaatgtattaataactggaatctgttctacttctaccgatttggacttgagtatagtgcaataatttttttttcgtttcttttttttttttttaaatataggaaagaggagaaaatgttcctccggaagactcctttgaagtagcacgtaaagtgaaggaaacatattgctatacaagttctgacattgtcaaggtttcttcatttacttgcatcgtgaagaaacgttgatagatttaaattcagaattttttaagaatatctttcttctgactaaatagagtgacatggactaatttgacagtggtacctacctctcatttatttgataattccaggagttcaataaacatgataaagaaccatcaaagtatattaaacaatggagaggcattaaaccaaagacaggggcaccatactcttgtgatattggctatgaacgatttctcgggccagaggtttgtttcttctctctctttttttcaagatatatattatttatttaataaatcatgatcatggatgtgctgccactgtttttatcaggtgttcttcaatccggagatatatagcactgagtacactactcctttaccagctgtgatagacaagtgcattcagtcagcaccaattgacacaaggagggctttgtataaggtgattaagctttaaaaaatgatgcaaatttatttttaaagattacatgctccttaaggaaacaattagattacattacacattttgtggggtaaataaattcaatgtggtaatggattggttagcctaaattattacattcaaggcactatatttactgttgtgtaatatttcgtggtgatacgtcattttctgtaaatttaaaactcttatgtttttcctttctctacctttcatttgtggtttattaattgctttagtgatggcatccatttaatctgctgagagaaagttacgtgtcaatttgtgatcatttaatcttcagtgtatctatatttatccaaccaattgtttgcttataattatttttgatttgaaactcagaatattgtgctgtctggaggctcaaccatgttcagggacttccataggagattgcaacgggatctaaaaaaaattgttgatgcccgagttgttgcatccgaagctcgacttggtggagaaataagagtatgcctacatgataatttttcttttttaacattatggtgagtaaaaatggtaattcttagagtttttttttttggtgtcatccagtcacaacctgtggaagtcaacgttgtcagccaccccatccagagatttgcagtctggttcggaggctctgtacttgcatcaacaccagaattttttgcggtatggatttcttaaaatttaagttaataattttgcgatgttttttttttttttttttcttttacctccataaaatgttatctatatttatccaaccaattgggtgtggtgtggtattgttgagagatggttggaagtgtagaatttaatcacaatagagtaactagtgacaataacttaacttgatgataatggttgagagcaaaacggattgaatctccttcccccactctcaccatgaacccttcctagagcagaaagataaaaagaattaatatgattatagcttctactctaatcttgtgcgtgtactggtagttataggaataatgtagtggtgctatatctctcctcatataaaggaggttccaagttcgaattctaatcatctgcatatacttccatttctgcaatagtatttaagttgctgaattttgaatctccaccatatacaggcatgtcatacgaaagcagagtacgaggagtatggcgcgagcatatgtcgaaccaatcccgtcttcaagggaatgtattgatgcaaaaataaaaaatcaatttgactggcatttcctaatatggtcatcttaaggactgccttgtcagttccatctcatgaggcatgaccttttacttcacatcctgatgttttcttggcttcatcatgtgtatgcatgcaccatgcatatgcttgtgagagaggtggtgtacaatatagtgatttattccatttgtaagaaaactggatttccattcattaatttcttaggaagttgcagatgacccagaagccaatataggaagtggaccaataatgtttctggcatggcaagtacatgtggcccttggaggatcaagatgagaatcattatccaagtaaaggtgtttttttttgggggctgaattgcatttttggtgttttagtttagccatagaagaatgttaaaattattcttaatctttttgatagttgacaattaagctcgattcattgtacttgtattattattatgtttgagttaggaaatatgtttggtacagtttctgcagaactcatattcatggaaagatgttagtgaaattacttttgtttttttcattatagatttgtgtccccatcaatcatctgatgatgcaatggagtatgaaaaggattgccaataataatttgaggaacaataaattttagttttatcgaaaaacctcatttcatgttcgaacaagaaatatccatacatatatagattatgcaagttagtggtatttcaaatctggctggttaaatgtcaatttacaatatgttgtcttttaattgtaagaacaccaagtcaccttttcatttatggcacatcacattgttttcaattggtatgccgacgaactcaaatgtgcaattatattgtaccaatattaaatatatatatatatatatatttctttttaataatttgcggcgaaactattttaatttttatatatttaacttttttatggcaaattttttttaattttttttttatataaatttaaagtgtcagttagatactactgttaaatataaattggattattactgtattgattttgaagttttaatacacaagtgtatacagtatttaattggcctgttaaatttgcaaaaaaaaaaaaaaaaaacttaagagagttttgttactaaaacaaataagagagttaagtgtataaaaattaaaaatttcgccgtacattattcattttttgttttt

SEQ ID NO: 42727 - DNA, 2525 bp, Cannabis sativa
aattaatctatagtgtttgaactaatattacttgaagtttttttttcctttgtccggtactttttttatatattttttttataattaaagtactttatttaaaacagcctaaagccaaagaaggccacctcaaataaccaggagtcatgatcttttcagctctagtccaacattcacactaggagaaataaaaacaacataagcaaactcaaactaattacacaaataataaagaagacattcttctttaatgcactgtacaattttagtaaaaataaaataaaaagccaaacttgtttttcctttttttttttacacaatttcttagctcataagtctctacataacatatatatattttttttaatttattaattccttttgaaattatataaatgttgtacttaaatattacaccaagtttttacatttctttttcaatttctttttacatttattcttaattgaaattattaaaatcaaattttcaatgtaataatatcaaattttaatgtgaaataatttaaattaaaatcaattagtgtaacgagtgaagttatctatatttttgtaaataattcaatattcttacattagtttcagagactatattccaatacttttcattgcaaagtagcaatgggatattctaatacttctaaggatatttttatatatatgtatataagatattgttgaataatcaaaacagaatcaccaaatatatagagattaaatattaatgtttatgtttatgcctatttggccaataaaatgggtttggcatttagtcttgagattgattcactttgttctcaatttatttcccaaatgagacagtacaagccatgccaaaaatttccactcatcaattatctctatacatgtcatgcaagcaaagcaagataccttagaagattttttttctttttttatcttttctcctttaaacatagaaaaataaaaataaaaaataaaaggtgataaataagtgatagttagtcaaagacgctatcattgggtcttaaaataggatatcccttttagatatatagtaccaatttgtcattagctatggataggtgtatatggtatggttgttcatcacaaaatcagatataaaaattgtatgattaataagtttttaggccaaatatggtgttagtgtttgttcttttgtgtgtccgaaaagaaacccacatcaaattttgcaaaaagggtgagtgagtgagattacttaatccactaatataagttttggtttgttttttgttatataataatataattcactgtattgcatggatgattttgggggccacaaactttttggtcatattgtgtgattatgtccaagttgtcgaatatattctaatacacacactaataatattctattctatattaaccttcgtggaacccaagttataaatatataaatatattgcaaaatcatgaaaattaaacagaaatattttaaaatgaatgaaagattatttttatccttgaactttctcactaaaaaatcatgcctcttgtagtattaaatatatcccttgaactttattcaattatcgaaaattggtattatgctacattaatacattctatcaattttaacaaaaaaaaaaaaaatacattctatcaattttctcaattattttactcatatgacatgatattatctaatttaatttcctaaataatcaaactaaaataaaaataaagtttacaaaattttattttgatttcaattttaatttattttatgttttaacttttttctttggtaacaaattagtttcaagttttttttaagtagtttacaaatataattttaacattaaaatggttttcattataaattagtttgaaattagtttcattatattctttattaagttttcttttactatataattacttataagaaattataaaagttttacataactcttaatttttactaattgataaaactaataaggcatttttaactaccccgatattacgagagacacaatcggataaatgacaaagttttgggggagggggaataattttattctttaataaaaatcttaatttttactcactaataaagttaaggggaattttcgacaacgctaatattacaagaggcacaatcatataagtaataaatttcaggagaaaataattttttattctttcactacaagaaaaggcctttttaccggtgcatttcgccaaatgcgccgataaaaattgtcgatataaaacaaagcctgaattcccactttcattcagggttcacttttgctggcacattattgtgccgataaaacttcttaatgtcagcgcaataataaatatgcaccagtaaaagtgagaaaatgaagcgccaaaaggtgcgagaagtttgccgcctttcatttcatttttgctggcgcaagtacacttttgccacggcgcatctatgccctggcaaaagtctcagaaaaaggggagggcaaattcctgcatgcattttctgtggtaggtgt

SEQ ID NO: 42728 - DNA, 1942 bp, Cannabis sativa
aaaaaaaagaaaaagaaaatctttatatttatttttacttcaatgtgaaataaacacatcaatattataccatataatttttacctatgtaagtaaatgaaacaagttattctaattctagtttattaacataatttgaggtgaatccaattataaaagattttaattatttgtaagtaaacacactattatcatctcagatacaaaatcttccccattagaatcttcaaagaagaaagtcaatatttgttgtttttgttttcaacttttccatatacattcttattccccccatttcatgtatagagtctctatataagtctcacatcaatttgtaaaatggaaaatgacttgaacaaatgatgatattggatgacataaaccttagatttttttttggtcaaaaataaacctgacattttgtattctaccagctatctagctttgttgaacaggaccacatcatcccaaaaacataaaagggaggcatcaaaaaatgttattcgtattttaatcatcatatcatatcttttttttttttagtatatgttatgtatagttttcctcatagagcattagtaaggaccacatatattgctggcaccactactaagcagtgtgatcttgttattactttgactagcctttccagccatttgtagtcatttaatggatatatactctaaccccattttccctaataatggtctacacatattatatatatatatacacatgtatgaattatttagaatctggtggtgatagtaattgactgaactttgggaggcacacacatcttgttcttataaggtaattagtactgaaagcagtcaaattgttttttgataggaacaaaatagtcaaatttaggcccagcaaaaagaaagaaggtgaacatgattcggttttggtaaagatggagaggttggatcctcactgtaatgcttattgtgggggtaactctacctcatcgcatctggttgatatatatataatgttccaatcttttctctctctcactctaaatatatattgatcaatgtcaagatctaacatgaaaatgccataaagtaataatgtttatctgaaccgtggtaccctttggggtacttgatagttaggaaccattggtggcatttataggtcatcatatatagcttgactccttgttttcttaaagaaagaaagaaaaaagaaaaaaaaaataaagtaaaaaagtaaaatataattattaattaaatgttggtacgaatacaatatatatatatattattatattattagggatatgattttttccggtgatgtatttttacggaatgtattatgtggtactttagaggggtctcaggatacattaaatgagtgtcagggtacgtttcaactttttaaccctaattatccctagatcaatctcagccgtcagatcaaataactccatcatctgacggttgccgtacatcacagattacaatccgtgaaagtacaataacggcacaaaatcatatccctatattattattagtacaatttgatatttattggtaccatctcatttgatattgtgcacctcaaaataatgagaattgctaaaagataatattagtgtatattagtcttctcggtgacaaactgctattagtgtaattaagtatgatgtctcatataacttaataaaataacttttaaagaatatcgctaactaatcgtgaggcgtcaattatagaaagtactgagtactactagtgcccaataacaatactctaaaataatagtaatactctgaaataagttagtaagaaagtttaaacaacattgttttaatatttgaagaaggctcacatttaagagttttctttcaagctaattaggatttttttctctttaaattttgatatgtacaaatcacgtgatttgaacttttctaacagttaaaaaa

SEQ ID NO: 42729 - DNA, 11017 bp, Cannabis sativa
ttacataaaaatattgcataaaatacaattcaatataatacaatacaatacaacctaatgcggcgttccaaacgagtcatttcatgtaataagagaataattgtgtaattagaggtattaagaggtttcaattacttatttcaattttcatgaaaatttagtataattacactttataatcactaaaattttctattaattacttaatttgttttatgtataattactaactattcaaaacaagacattaaacctcatctctaagcacacttatccaatcatattaagaaatattttgaccaaactcatctgtaatggcctatttacaaaatatagagtgctttttttaaaaaaaaaaagaaagacttaatctgaacgaatatagtgcaaaacaaaagttacaaaaacttataaacatgaattctagttgagaaattagatcgaattacaaatattagcacacttaattttagagtgatgataataaatatgttcaatacttaaaggatttaatcttgtatactttgctttagagaattatctatttcaccaaaataaccatgataaattaaaatggcaggttatataattgtgattattattattattaacagcatcagaatatgtcatgtacagagtggagaagatattagcaagttgcattcatttcaatctcagatcaattcaaaagaatgttcactttttctcaggaagcttctctagcaactctggtatcacctcaaagagatcacctacgagtccataatcagcaacctgacgatgggtattaaaaagctcattgtcatgtaaggagaaaaacaaagaaatgtatcaaaatcaaatcacttagccccaagagtacactgtagaagtcttaagttaaaattcaaccaattacctgaaaaatgggtgcatctgcatctttgttcactgcaacaatgaccttggaatctttcatgcctgctaagtgttgaatggctcccgataccccaaaagccatgtatagttcaggtgcaactatctttccagtttgaccaacctacaataaccgctcacatctcaaaatcgtagcaagagacaaatgaccatgtgctttcatattcaagaattaaggaaacacatcgaaacatgagagccaaattacaaaaaaaaaaaacatcctccagattaacattactagaattacctgcagatcatttgggacataaccagcatcaacagcagctcgtgtagctccaactaaacaaaatagaagagagaaatggccgattatatgcaatcaaagggaatcaagactgttgaaagcaacatacccaggtacaaccaagatggactatcttaagttcccatgacctccaaacacaatagaggaccgtgattcagacacataccatacttgaaattgaaaatataagaaagcatggcatatgataagcaaacacccctacatagagaccaaacagaacacccatatatactataaagtaatgctcgtagaaaaagatctttatggagtaagtaccagctgcaccaagtttttctgcaagcttctctatcattttaaagttttcagcagttttcagtgcacgtccgccagtgaccacaacacgagcattcccaagatcaggtcgttcagtagcctgtgatgcaagctttacaaatcttgatttaccaactgactctgcaaatataaaccatattatattaaaagattcccaggttttaggtcttggtaactaaagagaagaatgaaataatgaatcaaagcatgaaattcactccagacttgtaataaagccaaagatatgtggatgcctgtttctttaaataaataaaataaacacaccttcattgaaggtggagagatcaacctgggatataggagcttcattagattttgagtcatctataattgttgaagctggaaaagatgttgatctaatggtcaacatgcaagggccagctccagtatatctaacagtggaaagtgcattcccagcatatattggcctgcagaaaaatataaataaattaataaagcttactgactatgaatcaaaatcatactaaaagcccaaagagctagaaattgtcccctgtggtaactgaagaaagctaaacatgacattacctgagatatgagcaacccaatcattgcattaattcttttcattcaggtttcaatatattgcatcttcatgattttcaatttgacagactaacatgaaatgactaaatatacacttccatttaggacatactttaaacgttttcaggccacttaaaggaaaatctatttcattaaacctcacaagtgtatggagaaattaacaagatccaacaccaatgacagccagatcacttcaagtgccaaaagcagtctacacgagaagaaactatcaaaacaataaaataagaccaaaaattatacctcacaaataaatgagaatcagaaatttcaacaacatctgtaattggagaaacatctaaaagtgcagccgccctcggaaaaatgtttttcccaaatgaacctgaagaggcaatgacatgtgagtagcttcctttctgctgagccaaatgtattagtttagcccaaggttcagctaaaggatgtgcaaacatatctgaatcagccacaagcacctataagaaataacaacagttgccaccaaccaatcagaaatcgaaaagctttgtcacccaacaccaacaacggataaaaacccccaaatttcattccaaataatttctccatgcatacctccgaaaccgaaggatgaagagaagcagccatggctgcagcttcccttagggaagaaccagaaccagccaagagcattgaaatggagttgtccttgcctaaagactttgcagcctccactgcacttaaacatgagggtttgatcctaccaccttcgaactcacccaataccaatgtgctaatctgaatggatagaaagaataaaaacccaaatttcagtttttttaattcagcactttttcgaattcattatatcaaacttgaggtatataatctgacaaaatataatccttttaataaaaaaaaatgcattttatgatcttaatttcgaatattcattcaagcttatcaaatttataagtgataacccccagtccaagctaaaagcgtggaaattgacttacagatcgagaaggagagattgacgatgtactactcattcgtcttctgagagctctaatcacggcaatgctcgccatttttttttcgttcttcttcttcttcttcctttggttaggacttaggagataaagatgaatgtctttgtttattaagaaagaaagagattgaaattttaaatttaaacacggaactttcgataaataaatcaataaatcaataaataacgataacgatcaagaaagtacacgtgttttataagacaggtgatcgtggtctatcctaaaaacgacgtcgtacgaataagagtgtgggggactacgaaagtgatccttccgtccggtgaggggatgcaagttcattcttttgatttttctaaacaaatattaaattaggtacactacaagccaactctgagctagagtttctttctaattaaattagttcattttagaattttgatatattttttttattaattattttgtgtatatatattttttaataaatcatgtaattttatcgataacaatcagttaaaatattaaattagaatttttgatagcatctgcagtagcacaggtatgaaggctaaccataacaaattccagtctttttggtggagttttaaaggtagacaaagtcattctgctttagattttacagcttgaagaaggtcttttccctttaaaatatcttgggatctctatgagaccaacaaaatggaaagtctagaattgtggagttattattaaaaagattaaattaagactccattcttgtagatgattgatttttctaaacaaatgtgaaatagcttcaaaatgtaagcgtaatcgcatcaattggattaatattgagtgagttatggctgttttactgaagacagttcatgatccagcgctcaagttgacatccaacacccagactgacatcaagttaacatatgacgtcaatttggatgttgagtaagtgtaaaaatttccaagggatgaactttaagaatcctaagtgatattttgacatcacttagtttgtttccgtgttctggcaaagctggtcaccaattctcggagatgttggtgttctgtagaaatgagagactcgaaaatcttcatttccgagtgggtttcccatgttcgaaatgagaaatgcaaagttgtgaatttaacttctctaactttatggatcttagttattatgaaaaactagatggatggttgaaacggaatcagaatcacataagcagaacccagttcaccagactatttgtcaacctgggcgttgggtactcattctcgagctattgggatgtcattttgatactttcaatgttcttgaacttgaggacgaggtctcctaccctatttttgaccatttcaaattcattggtcgaatcagatttggcatttgaatgatcgaaaccagtgcaccaggttgattgtcaacctcagcgatgggcccaacactagatcaacctgggtgctgagccctatttttaggggctcgggttttttgttttctccctgagttttcttgaatcttcattattttttatgatagaaaaaatgcccgaaacactattttgagaacttgattaaaaacagcccaggttgacaatatgtcaacctaggagctggtcccctttttggcccttcaaaagttctgctttgtccccgtaaatagttgaatctcaatcttttctaaaaaagagaagatgcttgaaagagttctaaaaaaacatcatcggaatcgtcccaggttgacaaaatgtcaatctaggcgttgggtcttgcttttggcacccaggaagtgttgtttcttctccgaagtacctattttctcatttttgatgaagatgaagaagataaaaaaagttggattgtcgatctgatacttggaaggcgcggcgctcgaaaataaacttactctgaatctgattctaatgcctcaaatatgtttgtggtatgtctagttgatgtcccaatacaaagtttgacccatttgcactaataaggtcccagaaactaaaaccctagttgggaatgttaacttgggcactgggtgaaaccctcgtgcccaaattggcttcaggggtgcagattcgtgtaattttagctcccgagacttgtattggattgctccatgttttcatggtacagactgatgaaagttggattcaagttattgaagtccgaactccatcctggagctcccgtagtcaacttgggcgcagagctagagtctcatcccaggtcgactgctattgctcgagtctactcaattctgtgatgtcatccttcttgctatgtgtcaaatattaatgtctacgtcacaaaaaaaaaaaaaaatcgggttaacaatattaaattgaattaataacaataaaactcctcattttgataaaaaaaaaattataactcatggtaacacttttaacaatcctcaatgattatttaacataaaatattacaactttcagggaacgagacataaataaatcgcagtgaagatttacaaagccgatcaaaacaacatatataaccttttaataaaaagactaatataattcgaaaaaatcacttctaaaataggcatactcagcaaaagatagttctctcaatccatatcaatggtgaatgcaataataacataagatcatttctgaaaaattaaacatcaatactttcattttctgtgaacattgtattctaaggaactttgctggacctctactactgaattattattagtatttggaagaataaatcactttatctagtttaatgggaatacattagcgacaaacgtgtttctttttaagaacttttgggtgtgttgattaatagcataacttctctgaatgtgactaattcaaattgaaaaattcccttattatgatagatttgttccagtaaaacaatgaaaagctaccaaaaaaaaagacaaaggaaccaattatacaataagatatattaatgaaaaaggtataactagctgcagctgatgatcattattgaactattaggtctgttcacatacatgtaacaaatgagctggctccttttttttttctttctttttttaagaccatatgggcagctgttgatctctacaactagtacataataaaataactttatataaaaatgaggaaaaatgtaaatctttaatctaattccaaccccctctctcctctcctctcttctcctttctatcccaactaaagaatatggtgcctcaagtcagcagcttgtgaaaatctagagtccatcatctctgtgttgatcaacctaatatgaattatctccttacaattttcaagaagaagtcaacaacggaactccataaccgttgcgatgagacttctgccatctccatgctgtcttcaaactctcatgaagatcagtgtgttttgctgtccagttgagctcgtttttaatcttagatgggtcgctgtacacttcagcatagtcaccagggcggcggtcaagaaaatcgactttgatattcaccccagttgccttcttacatgcttccacaaattccttcactgatctacctgaaaaaagagatccaaacacaagcttaggacaattttaccgaaagaaattgttttgaagagaaagtgaaattgcaatttgaaatcagtcatatattcaatcctttcatccgaccttttcctgtgccaacattgtagattccaactttactaggcttggccttctcaagagctttcacatgagcatcaaccaggtccgtgacatcaatgtaatcacgcacacaagttccatcaggggtgctatagtctgtccctttcacctgcaatgtgttcaatacattaacattaccatactaattttctcaaaaaaaatacaaataaaaccatgaaatggtatataccctatactattagtcatcataagaagcaaatattttttaatttcttaatctcctctttaccattgatgtgatttatgcaaaaggaaagtttgtgttgtattatttatcaaaattttagaaactgtttgataaaacattaacatttatctccaagccttacacagaaaggtcgaatatatattaatagaaaatctaaattagataagacctcatctcgttaccagtttaagcttaattggggtgaaaagtttttttcatctgttagtttaactttcctgtattgatctttgtaacaaatcatgttttccaaagtagcataccttaagcccaggaatgataccacgagctgcatcaaaacaagcaccagagatacgtccatgctcacgcagttcaggtctgggagcctctcctaatctaccctcaggatctgaaccaatcacattgaagtatctaaacagaggaaagaaacaaaaagaaaaggtaaaatcaggataaacattaacaaaaataaatgaaagtttaaatactagatctccattttcaaatatctgacagcattggattacaattggatttacaattgctaacatacttcagtaaacatgaaataatgagatattttaaatttaataaagatgtttgccaaggaaaaaggaagattcattgcagaatactactaaagatagctatgtttcatcaaaatagcagacaaccacaggcagagatgttaatatatatacttctaataaaaattgtcaaatgacaatgctgttacagacaattgtcaaatcatagcttctccctttgattttagagcaaaaattaatattggctacatcaagatatacttgcagtggatgcctcaagacatagaggaatcaagagtatcaaaatgctttgtaagaataagtgtattataatacaaacctcaaaatcatgactgccatgtctgaatttttagagaaatccaggatcatatcttcagccatcttcttagcttttccatatggattaattggaaactgaaggacaaataatgttgacatcaattagacatctcacggaatagaataaatacaattcctctaatagcattccaatatcaactccatgcaaaatatttagaaatgtaataataataaatctaaatatactaagctaaaaaaaacacatttgtccaaaagaaccaatttccacctgcttagtttcttcagtgattggcatcttctccggttcgccatatgttgcacatgtactggagtatatcaatgtctttacaccatgtgcggccattgtttcgagaactatcaaggtatttgatgtaatgttgtgataatatctgtgtagagattttaaaagatgttacaacgtctccggtggttaaatgattttaacaaccatgcatgcccaaaagtatcttgatccataaaatctatgaataagactactcaaaaatgaaatttgagcctaagttaaagattctaagtacagcaaaaggcaaattttaatgacatattttcactcacttgaggggatcaagggtgctttccccaacataagctacggcagcaaaatgcattacagcatcaaatgcattctctgaaaatattttatttacctggagcaatcaattaagtaaacaaccattcttgctatttccaaacaaataattttcaagaagaaaaagaaattattgagaagagtattataaggatacagctttcgcatcccccaagtcagcataaataaactgaagcctcccaggttcaggaaataagtcttggagaaccttaacagcacccaggtttccccgtgaaagattatcctgtaagaatataaaatggttaaatatatataaagagcaaacatcaacgtgatccaactggctcaaaatttaatttctcagttgatcagaagatgacattaccacaatagttacacggtatttatccttaagaagtctcaatgtagcatgtgagccaataaagcccgcaccacctgttactaggacatgagttacaccttcttcatgacgagaaaactggaggaagtgatttttaaatgacgtgttagtaacacttagaaaaataaaatatgagattggaaaatgacacattgagaaagaaatactaaatagcactcataatggttatgttggagaactaaaaacaaggtggcatttaaagtaaagcaaaggtcgatgtaagagaaatgtgtggtagaatgcaagcacatgttgacctcattagacaccgtagcagatttcttcagattcaatgaaaaaatttaaaaaaggctcggatccaaaaaaggggaaaaataatatatatgatattgactactcccaaaaaaatgacccatttatgatcatcttttggaatatatatgaataaatagacacattagtcttctccaaatccaacaatataacatgcaactgtaaatccacaagaaaagtaacacatacacgcctgatttcattacaaataagatgttcttcagaacaagcacagaaattcaaacagattaatcaatgtcctctttgcctacgttttgttttcttttcacttacgaaaaccaaaatgcattgccttggaaatttgagtagatttccccaaaaacaattgaaagagctacctaaagaaatcaaatcctacaactccaagaaaaacaaacaagcaaaactaataaaatatttactgacagtttttcacttaaacagttaaattttatccattaatcgaagtatactttcatatttaccaaccagctatacaaccaatgactaaaaagctcttaagttttatttctgtcctatttcctttgaagctaaagaaaaatactatcctggtagcagccttgcttgccagaaaccatagcagagtttattgatctacacagagcacagacattgaattcatctataattggccaagctttttaaaaagcacaccctgtcttaaaattagaataaattagatattttggcaaagtgtttcacgagtccttcattcaaatggaagtgaaattattacagtaacaaaaaaacaaaaagaaaatttaaataagatagtgattttaccacagtaggggtattaaaggatggggattgcttcagcatgacaaaacataatgctgcaacagtggcaatcaaaagaatctttcctacaacattgttcttcttctttggatctgcataatccatgcctattaagtagaacaaggtcaagaataagggattgaaaaatcttcattaattcatagtaaaatatctgacataatcccattgcagtaaacaaagtaaccaagaaacagataatagtataaaataatacaatatatctgattttttttttcctcccttttttgaattcccacctctacccaccacacgttttgcaactctatccttgctttatttgaaaaccgtttttgtctcatatttcagagaaaaaaacaagagcttgatgtctagtataaaaatataaagcagacaactagtctacaaagttcaatctttaaacctcatagggttagtttcgtatagctttgatagccaccatgatttaaatgaaaattaattacaaccaccaaattttagattctacacaaaaaaagcaaacaaggacttacctccaagagacaaggatctaccagaccttggttgagttctggtcctgcctaaatttagcatttgggaaatttgtactgtgctggctttcaaatatttgaatcaaatattaagcctcagcaagaaatcatgaaaaagcctctgccttgatatgttcttgaagaaatgaactgcaaagaataaaaatcagaaatgttcagcaaaagatattaaaggtgaccgaaacagaggcaaacgaaaaagttgttgagctgggtcccaaactagatgaggaaagttatcaaaaagtatgaaaactaaagacatcgaaaaataaataaata

SEQ ID NO: 42730 - DNA, 2163 bp, Cannabis sativa
tttttgacatggcggttggtttcggtttttgaaataaaaaaatggttaaactaaaaaactgccaaaaccgccaaaaaccgtcaaaaatcgtacggtcaatttatacggttataatttctaaacagtcggttacggttttcataaaataaaaaccgtaactgaccggtcgattataaaattgtaaaaaccgatcataaccgaccgattttcactccttgaaattctaatattgtgtcggtgcttgggagagtaaaacttagcagaagaaacaatgttttgaagattgtgcatagaacctcgaggaccaaggaaatataagaaacaccattgtactccaaactagaggcttcaatgcattgcagagataatagggaaagacatagaagaaattgataatccgatcagatatcctaagagctcttattcatttacactattctactaatcccagtgtctatcaagtttgacagaagtgctggctcgatttatatttatgtttgacaatatactattacttatatcctattttcactgtccttcaacacaagtttttgttttccagataaaataatagtaattcatataacaataataataagtaaataagaaagaaagaaaaaatagtcataccatttcttgcaatgttctccttcaagacaaaaaacccaccaggtttgagaccaacctagaagtaacatggaagttagtatacagatgtgaaaaatgtatcataaataagttaagtaatcccttaaacacttgatcattcatttttatgagataacaagtgttaataagattcagttccctcatttatctcttgtttacattttagaattttacccgaactaaaccaaaaccgaatcatgaaaacattagcacatgagctcattgatagaccatcaatggtcaacattctagtgtgtcatttaaacaagtataatttaaaaatctgcagtacccatgaaaaaagtgagtgaattctaaagcatgattcaagagagaaaaaaaaatgctttaccttagctctcttgaaaaatgacacaaagtcatcatctgttaaatgcccaatgcaccactgaacccatatgacatcatatcttcctgcatctggagtaaattcctaaaaccaaagttgagaaatagcaatttgagccttgaggtgcaaagggaatagaaatagaatagaaaaatctagtaagttctgaccattgtcctgttagtttggatattattcattcttttagaatcgagaatatgtggcgtgagcataagaagattggtaagtgtttttctaattgctggaataatactgcagcatcaggtgtggaaggatacaaactcttcttcttctctgtttttttggcacaaaagggtacaagcttacgagtaagctcaaacacatgcgattccataaggaggtgtttcagaacttacttcaggaaaagtgaaggcttatggggtgaatacaagtgctagactatacaccgagaataagctgcagagttattcattggaagtttttaatctcatgaaaacttctaggaagggtttatttatgaaaaataaaaaccgtgtggaaccataaacaaatggcacgttgcgaaattctggttatcatacacttagtataggaacaatttggcgacattgagaaagaagaaacacacaatttgtggcaagtgcaatgcataagctagtttagagcttggttaaagacatttgaacttctttagataaaggtgccaccggaagaactaaagatagacaaaagtcagtgtactgtgataataaagttgccataaccattagtatcttacagaatcatgtgcaccataattgataagctagtgaacagcaggatttgtttcatatacttagcccaacttgaggggagtgtaaaataccttgaattagatttgtctaaaccaagtttgatttttattttttattatttgatcaattcaaattttatttctttgaaaacttaagctggtagataaggttgttgagaaatatcctaaaaaggttttaagtaaaatccagctataactgattattacacttgttgggtacttagaaatcaataaaccagtgttttatttgtgaaattgttcgcaaatgatttaatttagaagtaacaaatcaacattttatagacct

SEQ ID NO: 42731 - DNA, 4453 bp, Cannabis sativa
tcctttcgagtgaagtggctgccaaatgtgagcactggtataataaccagtccagactataaaatcttaagtaaaatcattcacaggagactatacatgggttgtattcataatagggggaacgaaaacgattattgggtgatactcactaagcggggaaaagccacttgaaagaccattagaaaggacataataagatctaaaagaaaataaaccgagcacatattctaatattgtaccgtggacaaacttcctcgttgagcctccggaggaatctcaaattctatttcagggatctgcatttgacaaaaccaaaacaagaagctcactaataaatcaaatacactatgatggcactcaaggaaactgtttaaacattgaaatgataaaacatatatttcgaaaagagattaggaattaacccaaaattctaactccttttacgacagcaatacattataaactacaaaaagaattgcagtaccataaacacaaacaagagcacatagaaaaaaatgcccacttttcatgggatgcaaaaactcttacgctctgagagaatcaaaatttacttctctacaatatccgtgactaagcaagaaaagtggcttgcccagtgcacactgaagccaaaaagaaaaactatcttatgttttcctctaatgctaagagaataaaagcttactttctgcaagttctaaaactaaaaaaaaaaaaaacagcaacttgccataacagaatccaaaatttccttcgatgattaaccacaaaggatgggaaagatattttttaggactggctaagttccaaccaagcaactactctgatctcatggacctatactacatcctacgaagaaacatcacgcaagtttgcttttctgttcaaatcgattggcacacatttatcaaatggttcgcacaaactataaatcttttcaaacttttctatgtctgccagggtagcctgcaatcctgcccaggaacttatataaaataacagtatgactaatcccatcccctacctcccacttacttcaaatgacaatctaaaactactgtaactggtattcaattacgacaagatagataaaggaatccacacggagttcatatcatgtgaatggataaataccttaatagttgcaaattcagattttaccacttgtctgtcaagtatctatttacgagtaaagaaaagaaaaacaaatctttattagcactatggtgagagaggttctgtcaaacaagaaattctagaatttattaacccttttaattagaaaaataattgagaattataaagacatgaatgacaaaaacaacttagatggacaactcataagcttaaaagctttgtcaatcaattacagaattcaactgctcaatagaatactaaaaatttcatgattattcaaaaggtcaaacatagtagataatataaagttgacacaaccttagggtcacctgctgggacttccaaacggtagttgcatccgttgggttgattctcaccagcaagctgaacttcattatttctcgcaaaacaaaaatatagtcatctttcacattacaaagcttgtaaagcagagtacccattttccttcatagaaaacaaattctccaaattgagattttacctctccccacaatgtgtacactcaaaggcaaataatagaacctgtaaacgaatccaaagaagaaaaaaccatatttaacaataataataataataataataataacaattagctaagaagaaaaagaaccaatttttctttaatacatgcctttctgaagtgcggaatcacagtaaaaaaaaacttcgttgtacccaagtcacaaaacaaatcccaaatatttgaaaaataacaacgaaaatttatttgaatatatataaatagttagagagagaggttacattttcatggcaatgcatgtagaggctgtcgaattggtaaagaggggcatctccgacattggaggaaacaacttcgacggcggacccaatatgatattcgtagaaaatagaaaagaaagaagataagagaaagggagaaagacgtgagactcaccgagttggggttttcgtcgaatttcgatgggctttcctcaaatcttgttgggtttctgtcgaataaggttggggttgtgcgaagatgaggttgggacagaagacaaggaggatggaggacaaaggaggaggctgggacgaggaggacagagtacaggaggaggcttagaatcaaggttgaagacaaagtgaaaagtgtgtgaattgaattggggtttagggtaaattgataagattagcgtcattgtacaattgaagctatattttgtagtgtaggttctaaaatgaagggaagaaggttagcgagccttttcaacagacgctaaagacagttattttttttaaaaaaaaaatgcactattactgtcggaagtgtctaataagtaactgacgctaattaataattttttcgtcgatttagaagtgacaccctaatattcccctatactattcacgtcggttgacgcaatgaacagtagcgttaatcgacgtaaatagtactttttttcgtagtgtgaagtcaatgataaaattaatttctcgttgtagtggcaatcctggtaactcctcaggacacacctccagcaattcccttacagccttgacatcattaggccaaaaatatttctcgtctgctagagtcaattacaactgctagaaaccctacacatccattgtgcagcaaatccctagcttttaatactaaaatgattggaatactagaaccataaatggatcctacaaacacaaatggctcctcaccctctaattgaaaaaattatcattcttcgcttgcaataaatgttggccgagtacttggacagaaaagccatcccaagtataatatgaaactaagaaaaatctaattacaccaaatcaatacttaattccctcttctaaattgtaattggcatagacctaacaatcattttggagataaccaattctacactaggtaataaagttccacaccctatcttaataaaatcaccaggcctaccaaatttcttaattacccttgctccacatatgaatgtgtagctccaaattcaaaagtacagcataataggactcattaactagaagctaacctgttaccacagaaggactgactacagcatcttcttacataagggcaaacacccgagctagagcgggtttcagctcttgtttagattcttccctcttcgactatgggaaatctttctagaaatgctcaactacaccacactaaatgcatgaccttcatttacactccctgaaattgtgcttcttacatcaagaacactcaagatatgtataggtttgatcaccatatgtacctcggctcctttgaaaccttttattttgactctaccataaccaggagtaggaaaagtggtggactaaccaaaacatggagaccctggggcctcctatagaaattatactacacttttggctcgaagagccttctcaaccatctcggcataagtttttgtgttatttgtagtaatgaccaaatcatgtatgatctgggcatttaaacttgccaaaaatttttccttcttactaaaatcagtaggtactatacccgaagccaacttggagcagagcctagttcaaaggcaccttatcagattgctccggcagaactcaaggagctaaaaatagagcttcaagagattcttgatttagggtttacccaacccaatgtgtcgccgtgcggagctttgattttatttgtgaaaaacatatattgatcccttcgaatgtttattgactattgagagttcaacaagatatgaattaagaatatatacccattgcccaaaactgatgaattattcaatcaacttgagagtaagactatcttcaccaagattgatttgcgctcaggttatcatcagttgagaattcaagaggaagattttccaaaaaatgcattttagaagagatatggtcactatgagttcttggtaatgtcacttggtttgacaaatgctcagtaacttttatggatctcatgattagagtgttcaaggatttccttaataactgtgttatagtatttattgttcatatccttgtatagtctcaaattgaagcggagcatgagatacatctttgaatggttttgcaacgactcagagatcacaagttgtatgcaagtttaaaaagtgcgagttctggttatcacaagtgtccttcctagggcatattgtcagaaaggatagaattatggttgatctggggaaagttgaataaattaagaactagatgagaccaaggataattgttgatgtttgaatttttcatggaatgattttgcaacatttctatgccgttaatagaattagccaagatgaatcaacgattcctatggtcagacaagtgtgaa

SEQ ID NO: 42732 - DNA, 1907 bp, Cannabis sativa
ttcctgcaaaggtgtattgtactagtttgcacctgctgttgctgttgctgctgaccaccactggcacaggcaggcactcgtagacaatggcaagacaagtgagccttcgatatgcataaaatataacccaattcaactattcctccattctcaccatatcatcatcccaataaaaaagaatgctaagattccaattctaggctcatattttttttacatatccctagacctttcatagtatactatctctcaattatcgatgcttgataaacaactttcccggaaaaaaagggtaaagcaaaaacacttaatatgttcttcaaaaagatgctctttttgtataccccaaaacagtttaattcaaattcaattgaatcgaattgaagttgatgagattagaatggaaaactcacatgcattccttcaatatggtttgctgaagcaattgtacatgaaaacaccaccacttttcacaaaataataaaataaaataaaataaaaatttagacaaagatgaaacactctaatgaaaccagaggattctccaaagactcgttattattattacccagctgcgaagaaccaacgtcgttattattagtattactctcactctggctcttctctttactatccccacccaatgacttgcaaccgcctcgtccggttccctttgacgagtttctcgaaagtccacctcgactcactccaccggttgttcggggagccggtgacctcgaccgccgggaagatacctcgccaatatctcgtcggattccggcatacccatcgttgcgttgtatggtccttccctgactcgattccctcccacgaatggacttattatcaacccgattcttcttctccgctgaccgttcgggtctgttacccgaagaaacgggtcctcttcctcttctaccggagagctcggctccgcagttgggacgcttccggcgagtggtagccgttgacccatttgttattctgggacccacttctctctttcgcttgctaatagcttcgtcttcgtctcttacctccgtaatagtcgttgtcgtcgtcgttgacaagtaagaatagctctcactgacttcacatgtctcggaaaggtaagaagcttcggagacctccacaacctctggttctttctcgtctttagcggctgcggcggtagcagtggtcatcaagtgactcttctttttctctgtaaaagtttctgggtttggggtcggggttttcgaaacaggagtttctgagaggacctccttaacggactcttcttcaacgaccggaggagggtgtggagacataatgtgggcttgttccatttccagcgccggagttgtccgtcgaaaatgttggtggttgaccggcggcgcatctggttgtttcagttcttctctctgggttgacttggttgaggagctgagacaacatcccattttgggtcttgggaatgtgagaaagtttttagagtgttttgaggtgaaatctcatggcaagtgggagattttgaatccaacggtcataataaaaatggagagagaaagagagagagagaagagagtactcagagtaggagtggtggtggttagtttgagagtattgagattgggttttgggttttggttaaggcggagatgttgatgaaatgctatttttggacactaacactactagttagaatttttggtacaactgggaatttaatacattacataacaacaaaaacaatgaaatatgtacatataaatttgtgatgaagagtgtgtatagtatagctacgaaaatcatttcacgtgtgaatcatatatatttagatgtgggtttttaaaagatgatgaatgagtgtgaaattttttgaatcatggaaatgatttttcttttttttttcgtcctttaatttt

SEQ ID NO: 42733 - DNA, 2734 bp, Cannabis sativa
gacaaaaattcttaaatctaactatctcaatagttcactaaaatttttaacgataaaaaaaattcagagacataatttaatatatttaaaaattcgagggaaaaaatcttaattaaccttcttgaatttaacatataacgaattattctctttaaagttaacaattttattagttagaaattattttaactattttgaaatttttaaaaaaataatttaataaatattaaaatttagggacaaaaatacaaattagactttaacttatttattttttcaaaattattattattattattattattttcctttaataattttccaatttctcttccgttgttctttttttctttctcattttcctctttccgggaaatttctctctcttcctagaaatttttttcttctttcgatttcgatttaaagaaaatatattcagagaaagattgtaagagagagagagagagtttaagactcaattcacagattcaaactattcgattcgcgattcgagtgagttatgagaccgattcaatctccgccgccttcttcttcatcttcatcatcatcctcttcatcttcatcttcatcgtcttttccggggactggctcagctccaccactaccgccaagacgacgtcgtcctgacctaaccctacctcttccacagcgagatccttctctcgctgtacctcttcctcttcctccgacttcggctccatcatcatcatcatcttcttcttctcaatcatcgtcttctacttccggtgttgttgttggtggtggcggtgttggaactcatctgaatcagaataatcacaatcatcatggtcgtaaaagtaatcatcagctcatccatgtatcggagcttgagcgagttagcagagtcggtagcggagctggaggaacggtctacaaagtgatccatcgtcctactggtaagctctatgctttgaaagttatctatggtaatcacgatgagtcagttaggcgtcagatctgtcgtgaaatcgaaatccttcgtgatgttgataaccctaatgttgttaaatgtcatgatatgtttgatcacaacggtgaaatcgaggttctcctcgagtttatggatcgtggttctcttgaaggtcagaaaatccctagggagcaagacctagctgatctagctcgtcaaaccctacgtggattggcttatcttcacagccgtaggatcgttcatcgcgatatcaaaccctcgaatctactgattgatacgcgaaatcaggttaagatcgctgattttggagtgagtcggatcttggaacagactatggatccttgtaattcttcggttggaactattgcttatatgagtccagagagaatcaatacagatctaaatcaaggtcaatatgatggatatgctggtgatatttggagcttaggtgtaagcatacttgaattctatctaggaagattcccttttgctgttggtcgtcaaggagattgggctagcttgatgtgtgctatctgtatgtctcaaccacctgaagctccaccaacggcttcaagagagtttagggatttcattgcttgttgtttgcagagagaaccaagaaggagatggactgcttcaaggcttttgcatcatccattcatagctcagaataacatagctgggaacaatcaggttcttaacaatgttcatcaacttcttcctcctcctcctcctccacgcactttaccttcctagccctagatttcaattttctatagactcttattttattagcttagttctttctttctttctttctttctctcttttggggttttctattttgtcaattaattttctttctttttgctctgtttggtcttttaatatttttaacgatcatagtaatgattttgtgtaatttttgaaatgatgggtctttggattgatcatgaatttggttgaatatgcaatattgaaggagaaacttttgtattttcccatttccatttagattaggttgattcacacattagtgaaataaaagatgctaaatttagttatgtttttttttttcgttttgttgtttattttggttaaatttatgtaattaaggcaatttttttaggagggttgggaagaatcacatggtttcgtttgcctattttggttaattgaggcaattttttcagaaagggttgggaggaatcagtttttttctctactgttaatattagcttagttctctcttttgggttttgtattttgtcaattaattttctttcattttgctctatttgatcttttaatatttgaaggagaaaagaaactcttgagaaaaaaaaaaagaaaagaaaagcacagaacaaatcaatcattcatattgttctacttgaattgtttattttaactagttataggaaaatttaattaactaaccaccattgattgactatctaagcttttttactaatacattttcgtacttggttaagttgattcacacattagtgaaataaaaaatgctaaatttggttatgggtgtttgttcttttttcgatttggttcttattttggttaatttttttttgtaattaaggcaatttttcaggagggttgggaagaatcacatggttttgttgcttattttggttataattaaggcaatttttttcaggagggttgggaaaaatcacatgtagatttataggagaactctttgtgcttaacttaattagggtagttatattgagtaattga

SEQ ID NO: 42734 - DNA, 3331 bp, Cannabis sativa
aggacaagaactcagacacatggacgcgcagccacccaaaaccccaaacccagaccccattattccacaaccaactcctacctggcaagacaagaaccctgacacctgggcagccacccaaaacacacagatcaggacccttcaatcccgaatttggcctgcgcccaaacaaagaacttttcaaaaaagaatgacaacacacaaccaaaaagtaaagccacttcgtataggccaaaatgcccctaacaaggcccgatcagagacacgcctagaccatttcgagccctagttagagaggacaaaatttattgtacaattcccctttggttaagtataaagtttgactaaaaattacataacaacatcatagatattgtggacattgtcccacatggaataaatggtagagaagtgagtgatatataagaacatgtgctactccactcattgccaattagttttgagatggaaccccatgattctcaacaatagatataagcacaaaatgaactgcaaattaaattaataattatatacaatatatttaattcaaaaatgtcacctcagccgataatataatctcgttcataatatttatataaatatttatattctattaacgacgtacacaattagttggaaattatgaaatataattagaaagcttccaaagtcattgttttcctcttcctcacgatagtgtcattccattcaaacaaatcaaataagtcatttgttgaaacatttggatatatactcgaatgaagctacaaatcttcttgagtagtttttattaccaatttgtgttcacaataatgaactagttttttttcttcttcatttctacaaatcaatgatggtatttttgttgataagaaacagtcataccttgacgtcaacctagtaaactcaagtcttaacaagtactatatatgctacccaaaaaaacatttaaatagtataattaaaattgccttttttgtataaataatttgtccaaagagaagagttttgtattgggtttagataggtgagctaggcccgcacttagggcctacttattttaggggtccgaataaaaaaatatcttttaaaaaatatacatatattttaataatttttaagaataccatttatctttatagtaagggctcaaaaaatttttttttgcctatagcctatttcaactcagtatcggccttgggttaaggtcaacttacttgatttggttgttgtcagtgtttaaactctctccttaattagtgtcatggccatcctacgatcaaagactcttctcgtctaatctcagatctacaagggtcggccctaggctaaggcgggctaggcccgtgcttagggctcgctcctatcaggagtccaaatgaaaatttttaaataaatatacatattttgttaataatgtttaaaaatactattttttataaaaaagtaaaaaaatttatttttcgtaaggtccaaattaacttaggatcaacctttggcttcaacataccatcgaaagtatcattgatgacataaggaatttttatttgcacctttatattaaaaaaattaatttcaataattttttaaaatttctttttcatattattttctcttaaaatcaatacttattttaattttattttcacatttttaagaaaatcatctattattttttttctaataaaattatatataattttttatttgaacttttttgtgttaatatttcaaatatattttatttttatattatagtattttttttaagaatatgaaatggaatttttttttcaaaaaaaaaatgtaaattaaatatatatattttatataaaataaaaattattaaaattgaggtatattaataactttatgacaatgtcactttcttttttgggtcatttattaaaaagtttgggcctaaggacggacctaactcaccttagtacaaaactgggcctgatacagaggtccaaaaacatccacaaatgccctatgaagcttcagaatatgaatttagcaacctcgaaaattagtgaaacaaccaaagactagagtttgagcaaatgaacatagaagagagctttcagtatcaatagtgttacagaatacattgactaatcacttgaagaattcatcgaaaatacaaatcgaaactcgaacttcatcataggcgaaaacgcgaatatttttatgaatgttgctctgtcaatttcagttcaaagtatggagaatgagcaatgttaaggagctttgtgtgacatttaaattgaaaaatcaattctttgcaacactacttcaattcaaaaaacaacaaaaaacaaatctttgttcttacattctatgcaatatttcaagttttgtgtaagatttttttctgtaatcaatctctaatcatacctcactttaattaagatcctaaaaaccatcatcaagtgaagctaaacacacttaaaaagttgtaactgtgaacaaagttagataagctaaattgataacatactcacttttcatgggcaaacatatttacatctttacattatcaaaagacaacaaaatacaaaagatgaaaaataagttcctgggtctcacaaattctcttagtaaaacaaaaaaaaaaacacatatttacattgtgaaagaatggagacttgaggaatatggtatgacatgaaatcaaattgaaaggccaacaacatgagctgaaaaaggtgaaaatgtagtagtataaaacaggatctctattcgtgttttcgctagctgaaaatgtaagaaaatcgatggatcgatcgagtctattgtgttgctgatgttactagctgatccgaaacagctgctagaccctgcattaacctcacaatttcaactgtgtcgtcaagatagtacttggccttgctcggtttcttaccaactgtgcaggcaaacacttcagcccctgcagcgatagaagggcctgatgtggcacttgagataacctcgaacatgtcttcatctgatcgatcatcgcctatgcatagaacgaaatctggggctactcccttatcttgcatagtcgaaagtagtcgtgtggccaccagtcctttgcttaaaccctgctcagtagtaaatcacacccgaaatttgataagcctatttgcagctagcgatgcctagcaccacttgaagtgtcatattactattggtgcaatcaagtatcgagtctcactaattgaatttaattaattattatgtaatatcgctaactatttgtaaagcgctacctgatgctcattaaggaaaaacattaacaataatttgaaaggagaataggtttcgaacctgcggttta

SEQ ID NO: 42735 - DNA, 3428 bp, Cannabis sativa
gtgtggattggattggatcgattacttttacatgtcaattaacattcaatccgcacaagtgcggattttgaattttctaatccaattcaatctgtactttttgctgattaaattggattagatcgtgcgaattagattggaccggctattttatgaacaccctaatcgatgctataccatcaatattgatggatataaactaactagtaaaaagcacatataaggcatgtgcttattcagtcaagagattaaaaaaaatctattaaaaataatttttgtttttgtgaaaatataaataggatttatgagcatctatcaatgaaaaatccatcaatgaaaaaaaatcatatatttataatttattttctatataaaagataataaaaattaattttataaattaattgaaaaaaattagtagagagaatgcaatgtaattagtaatatgtttctgcatatatattgatctaattacatacgtaataaaaatacttataatttcttggacaaaagtaataataaatttaaaaaagattgacatgtatataatgtacataaacaaaataaagacaaaaaaatatggactgttaaaaaataatagacaaaacatgaatggaaaagaaactgatgatatcaatgaaaatgtacaaaaagaaaaaggttaggccatatatttttagccaaataagatatggtaggattaggatatgcctattatatcatgagtagatatctcattgttacttaatttttaatataattgaagtttggcaagctagagtctaaattacaagtttaattcaaatgaatttttatacaatattatcttactatggatgaatcgatacaactaattttagagtttgcattatttatttatttaaattaaattttttgtagggtagagttagcattattaattaattaccttgttcgtagtggttctagttgtgtggtcttgttcccattttatataaacttcatattatattattgtacctgaccaaaaaaaaattgtatcatttatttctataaaaatattttatgtttctaaaagtagtgataataactagagaagaaacaaagggtataagctgctgttataattgaacccaatctatagcatgatcggattcattattacttaagttactaagcctagcttagtggtgaaagagggatgaaaaaaagaagagaatatggatttgaacctaagatctttaaattattaagctattaaatgattataaaatccattacgttacactaaaaaaaagaattctttattacttatataatatccaatatcaaaaatctaattccatacaaatatattttaatattattgatataaataaaagaagaacataaatagagaaaaagtacgtactttaattccttgatataaataattaatttagtgataataattattaggtaataatcttttaaaaaaataagacataggattctctaattttctctcgggaaaagatggaaatcgagttgctcttattttttgggaccactaccaatatataacatcatagttaggttattaatattaagtatttctaatttaacttagtaaactaaaaatatcgtatataaggtatctacacatttagttcatgacattttaatactcatgacccacaattattaaaataattattttatttgggtcaaacttcaaataataatacaccaatacatatgagctcatattgaggattttaatccaacaatctctcacttggactacatatgttttcttatagtgtgtaaccttataagcgtttaaactttgctatcataaattataagtattttaaaacaatcttgttcattgattatagtaacataggatcaaagcgtctttcgttacatttagcataacaaacccatcattggtcacgtatatcaatacaatcaaacgacatagatcaatcatgggtgcataatataaaaattacatgcacatgtgatcttagcatgcctatctccaactggtctccttaattgagatcattttcttatgttttctaaccttatacctaaatctcaatagaaagaatacattcagagtactcaaaacttaagtccatactttatctgcagaattaaaccataaatatgtgtcagcttgatagaacattctaaatacaaactcccactaaacatttgatatatacacaatcatcaaaagcttctatctcaaaatcaaatgagaatactaaatgaaaattgtgtaattatttacgagaaacttacttgagtttataaatagatcttcttaatttgcaagtcatactctttggatctttgaaatacaaaattttctagttgtaccatataacttttgtcatcaatattacaattgattaatgacacttttaataatccatttgatatagcttaaaactataatgagtcgtcaatgtcatgcttatccttaaatagccttttaatatatgctttatgagtaattcttaaaaaaaaatacaagacatactttatatttctctacattgcaatttgcatcctctcggttagaaatattcatttataaccaattggttttacaccttatagcaatagaaaaaatacaaaattttattatctcacatcaatttgtactccttatttataatatcaatctattttttagagttgaaaccttcatggtatgataaaagttgattgaatatatcatcttctattaatctatttttttcttatatcttttctctcactgttttcttcaatagcactggtctttgaggttgttgagtttgatcatctaaaccatttactatatattgaatggaaagttgtttcatattgtcttatcaaggttctagatttacttcttgatcaatggaaggcttagaaacctaaacattgtcaaaagtgaatgttagacttgagcttaatgcaaattccccttaagaatagctaaaataatcttatttctccccaaactcaacatcctcaaaatcctcctaaagacatatttggaacaccttaactttattttttatacctcttgtaaaagttatagataatttcatatctactatattttgtattttttgtagtagtgttccatatacaatatactgagttttatttttatatatccttatcctttatttttacaaaatagctaaagaagcattcttgtctcttttctttacttaaaaatttatctcatttagcaactttctattattctacaacaacaatttctacattattttaaacaagtcattatagatatatatttatatagttctatgtatcttctatatgattttaaattttgaattgaattaaagcttttcgagaatgaaaaagagaaagagcataccatataaaattggggtttttgaaatcgaagttgagatattatatgcccttaagcc

SEQ ID NO: 42736 - DNA, 2163 bp, Cannabis sativa
agataagtatatatataaatatatatttagtgtatcgtgaccttgaaataattcaaaaattacctaagcttgggaagagactctgctgataacatgttattaaatatataagaagaaaagaaaaggaaaatgaagagagaaagagaaatttaatgaaaatttcgcagttgtttattctaatagaataaacttttattaatataaaagtactgactaaaagaatgactaaaagaatgagaaactaaattaatataataaaagaaaatacaatcaagtattaatggtgataattaatttaatgatttggacattcatatataatatttcataacaattttagagatttaattttctgaaggttatttttatcattttttttaaatggaggtccaaaataaaatttaaaataagagaggggaccatttgatattatccctgatattagttaacatatttccaagtgatgaagcaaaaaacggaaaaggggctaaatgacaatattgcatactagaatactcgtataggagatcttgggagaatcatatagctgataataatattgttgtcctaactaacagctgcttaaaaaagcatatcaaaaccatgtgcttacgtacggtttcactagctatgtattatgcacacaaaaagaatacaaaaacaagtaaaactgaatcccaacattaaaaccaaatataaaccaatggaaatcacctccaggattacaaaaaccagagcccaaaacctaggagctaatgcaatctaccaaaaagaaaatcaaaacaactaccactcagtcccacccatttatgaatcattttatttgcaagctttagtttttggtttatctctctctcaatatatatatttattatatatatatagatctattgccctttacttatgtgttttcctttttcggggaaattaagtgatagagaagatgaataaaaatgtaagtgagtttgagaggtcattcatcaaaaccatgcaagaaggaagaaataatagtgatgcaacggaatctgctgctgacaacaataagggcattctagggatttttggtcctaatcttccaaaggggaaatgtgttgatgaaaaaagaaaaaaagagagagctgagaatcttgtacatttgatttgttggggacccagttgaatttattatttggagtgtttattaaagagaagttactgtgttttcttcttacttggtggagtagctagaggtggtagacctattaagtagttgaaaattctattattagccttttcttcatcatgatgtagaattaatatgtttatatgttaggttgtgttttttatgtttattatatatatggtaggttgtttctttctaccttagtaaagagactacagtacattctctctagttttttaaaatttgctcagtttatattattattattattttgaagatcaatttatacatatatttttttgacaaattatataattgttccttgataataataaaacataattttgttaaacataaataaattggtattttgaatagtacattaataaattaattaaaaagctggacgatattcaaagtttaaataatacagtagaacttttatctaaaaatactctattgaaaaataatctctaatttgttataaaaaaaaaaaaaaataagtcccaatttgagccaattataaataagaataatccctaaattacaattatagttctaatccctaaattacaattatagttatacattttctaagctccatatgaaaaaagtatacctctatataagaatacactactacaaaattgggctttagaggtggtttttaagggtttttagtgtcggttttgatgaaattcgctaccggcgctgttcttggtgactccgtagggtaaataacacccgacggcatagggactatggcgtcagttattatgaaaaagttgacgacataaggaccctatagcgtcggttattatacaataatcgacaccataggggttctatggctccataggggtcctatggcgtcggttattatgaaaaaactgatgccataaggtcttagtttttttttcagcttcacaattttgtgttttagcataattttcttatatattattttattattaatataattaaattaagtataaattata

SEQ ID NO: 42737 - DNA, 1768 bp, Cannabis sativa
ggcgtcacagccccaaaaaccgaaatccgatgagattcaaatagaagagaaggaattagtacaagcaaccgtacccgaaacccaaacccaggttcaaatagaagagaaggaattagaaaaagtaaccgtacccgaaacccaaacccaggtgactcgacggccgactcactttcagtcgaaatccgatgagattcaaatagaagagaaggaattagtacaagtaaccgtacccgaaacccaaacccaggtcactcgactgccgactcactttcagtcgaaatcgttggaattggtggaaacgatgacgacgttgccatctccgccatttccgctaacgactcgaccgagttgttactcttcttcatcatcatcatcagaaaccgaaaccctaacccttcctcccctaacacctgaagaagaagatgaaatagtaagtaagcttaaaagcccacaagtattcgaagtcgaagaagctctaatcacaatgagaaggatcacgaaaaccagagaagaatcaagggctcacctctgttcttatcaattgctctcagccctaaaatcgttgataatctcgaggtacactggaattcaggtgaactcagtcgctgctctgttaaatctttctttggataaaaccaataagatgaagatcctacggtcaggaatcgttccctctttaatcgacgtcttgaaagggggttcaatcgaagcacaagaacacgccgtcggagcaatattcagtttagccctaaacgacgatatcaaaaccgccattggagtattaggaggtttacctccattgcttcacttgctccgatccgatagtgaacgaactcgtcacgactcggctcttgctctttaccacctgactcaggttcacagcaaccgaaccaaggtggtgaaactcggagctgtaccgaatctcgtccagatggcgaaatcgggtcacatgaccagtcggattctgcacttgatctgtaatttagggtcttgtacggaggggagagtagcgttgttggattccggcgcggtgggttgtttcgttgagatgttgagaagtgggaatttgggttcggttagggacaattgcgtggcggcgctttacttgcttagctatggctgtttgagattcaaggcgctggctacggcggcgggtgcggcggatgcgttgtggaagttggagattattgggagtgagaaaacgaaacagaaggctaaggtgataatggagattattaaagggagaggtgacaatgaggaagaagaagttgattgggagaatttgcttgattctgactctgattctcattctcttactctaatcggtgacgacgccggcgccggaaacaaccataactcgtctgagttttgagtacagttatttatttatttatttattttgagtttctgtttttagtttttttttttttttttctttttctccagaattttctgttggggagttgggattgtaattatgatgagaaatttacagtttttttttttggtttgaaattaggagtttattttttttttagaattgaaagtgtaaatttaggagggttttagtgagtttatatgattattggtacattattattattattataatttaatctttctaataataaaaagagagactattattgaatgtggtttatatgattatgttgtgtagattaatgttttgccataagatttttatttgaatgtgtgaaaattgaaactgccataagatttttatttgaatgtgtgaaaattgaaactg

SEQ ID NO: 42738 - DNA, 1122 bp, Cannabis sativa
aattaaaataaaagagtagatgtgtttggaattaagatctcctgttattatgttaaacgaattaaaatttgacaccttaattaattttttatttataaaaaatttaaatctctaataaagtaaataaaattagttaacatatttaatataaattaaattagttaatgtgttaaattttaatagatttaaaagaatatggaacactaattgtcaacatgatcttgattcatgtgtttgttagcattgttacatgtcaaatcattaatactgcatgtctgtcttatttattttgaaatattaattaatatatatacataatatatgttacatatttctatataatgtggtcctaataatatttgctctacctttaggtacattttcataggctgtctctttatatttcaatataatatttcattatcatgagtaaaaggctagctacatatgcaatcagaaccgagcaccagccttgcccttcaggttaaatttgagtatcgatgaaagtataactttaagaagactttataataaaaataatgctatatatataattcattgtaataatatgtataggttctacttcttcctttcctagcaactagggcacagctagactacattaattaaagataaaacttttgttacgtaaggtcaacatctaaatgggccaactgatgaggtgagagaaaatcagatgcctgctcttctggtttatctgaattattagtgaactagttggtttgtttttttcttaggtgtttttgttttcatcataatttatttaaaatagagttactataaggtctttcatatcgttctctccttgtcccttttgggtaactgaaaaataacttcaaagtagtagaataataatgttctctggacagctgaataatctatatatatatatacaataattaattataaatatttattatttattactatatacaattgaattattttaattatatgtgacactctataatgtttaataattatcacaatcatttctaaaaacaattagaataattgaccataagatagatttcaaacaataagttatgtgtgtgcctctaattctttataagcctacaaaaaattattttgaaattaatg

SEQ ID NO: 42739 - DNA, 1836 bp, Cannabis sativa
aagaagatgaacatgagagagagatgaatagtttaagatgatgaaaaaaaatatgaaaatatgaaatgtggggtaacgtgtgattataaagcaaatataatatattaagtttttttattttatttgttactttttttaaaaaaatgtgagttgccatgatttgaccatgaacatcacatcaataactttttaaaaaaattaattaataaaaaaaaatagagaagggcatgcaaaatgacaagtgtcattatggacagtataaaacactgtataaattgtacagtatttttgtaattctgccgtgtggcagtataaaagtaataaaatgccaaaatacagtataccatgtaaaaacctcaaaccagatgagaacatgaatggaaaaatagaacctcagccgaatgaagaaattggctactgaagaagttgagagtgtcgaaaggaaaggggaagtcagccacaacaaaacaggagaaggcatggcgccaaggaagaaagaacgaggcaagccacggtggctcaaggattttaagagccttttccctatttgtttataaataagacaattgtaaactttgaatatattttttttggaatgaattagcaagcaattgcaagaggagattttctttgtctcgaaaagagccgattatgattattggcgctttcattgcatccttctcactatgaagaatgaggagtttgtcgtgctaattcaagatctcaatgctgtgataggccttaaattttagcagatcatcgatagttaaaaggtggaattgcaaaggatggtgaaccaacaaattgcttagtccaaaggatgattgacccaacagatgactcaggcgaaggaacgcttagctcagggtcttcccaagtcacccactcatatcactggagaagctagtgcaatgggggtgatgataaaatatatgggtaagtgttcaaaatcattctctaattgtcatgaatttaatactattctcaagactttgatagttaaggtgccaagatttgatggtttgaatgtggaggactgggtttataagatcaataaattctttgaatcttcatcatgttgaccatccaatgtgattagcggtgattccttttcatttggatggagctccctctacttggttctaatgtacggagaagggggtggtatctcagattggagttctttcttcatagctttgcagcaacattttggtgtttcgatcaatgatgtgttgaaattttgtgcctaaataaaactcaatttcactgtaatttatttactttcaacaaagatcagaaatcatatcttgacctagtcatatgctttgttaacatatttatgaattgattataaatttaatatataagctctattaaatctcaaacatataattattgacaattacggtgatgtcatcacaattgaaagtaattgtgattatatgcttaaaattatttagctctacgatttattagtgcactggatttacactgacatgataaccaatgatgaggtttccttacatttggattagtcaaatgtcttttctaaggtgtttaccgaaattttttaaaatcgattaattagaacttaagaaaaatataaaataataaaattaagacacgtagtttttttcgtggttcaggcattaattatccttagtctacaagtctattgtattagccttataggcaaatgttgtatattacaaatgtttacactaagaacatgaaccctttatttctttcatcccccttaaagaagaagaagcttgtaggaattttagcagagtttcagtaggtcgaaaaattgtcctcctccgcacatggaaaata

SEQ ID NO: 42740 - DNA, 3290 bp, Cannabis sativa
gataacttactgacatgatgtgctctgagagcctcttatccagaagttcatcaggcttgtctagcaatatgaagaccaaatcaaatcgtgacagcagagcggcaccaattttcagattttcgttcactgttttcgcacggctgtgaattgaaccttaaaatgtcacttgaagctgtaaaacaaatcaaagcataatttgcaggaaatatgaagtagattttatctttggatcacagtggacagatattcaagtgaaagacaacattacttgtaatggccaccgacggggtttgctgctgctaagacagaagtacgtgctgacaaacttgctactagtccagcctttgctacggagacacactgctgttccatggcttcaagtaaagcctgtaagaatcccagtttcagttagatccatattttgatgtgatgattagtggtgaacaaatgctaaagagtttatcacaaagatctacaaacctgatgctctgaagtcattttatcaaactcgtcaatgcagcacaatccactgtctgcaagtaccatggcacctattggaaaatacatggttaaatatggagaaagctatagtattaacagagactatagttcattaaagcacataattaattaaagaaaaagcttcttggtcacaactgagattaatggtccttacatcacatgagaacctcagtcaaaaaaaaaaaacataacatcacatgagaaccaaaacagctacatagaaggaatcttacctgcttcaaaagcataatcacttgtcattggatcctttacaacagctacagtcaagccagcttttgttgtagcattaccacacacataaatgcctctcggagaaactgctgctgctgcttgcaggagttggctcttccctagtccaggatcacctaccaaaatgaaatgttatcacttacaaattcttcaattgcctagttcatataaattactttttcacactaacttccagttgatcaaattataaaataaaaaagaataaaagaccattcatatttacagaaataactctcagaatataattccaccaagcaaaaaaggaatggttatatcataccaacaatgatgacatggatgtctcctcttacaggaaccttgttgccatcatttgaatgttttcttacacctccaagtagtgcaagtgttattcccgctagggaaagaaaagaaaaagttctataaatcagtaacatttcagtgtgaatctcacaaataacaagacatttgacatggacaagtagcacaaaagctcacctttaacaagctcatgaccatagatagatggacagatagattgaagcagttgtctgaaggtatctgaaccatgttccttagaaaacttcacaataaattccagatcccttgaagaaaatgagaataagtcaaaaagctccattggtcgtgcatgagatttagaatcttcagggtcttcagatgtacaaagtgacttggagtttttgactgatatggcttctagatacaaatagtaaaatccttgacttttactttttgatttccctaaaaggggaaaaaaaacaaaatcagctgcacttatacacaatatgacaatgctctacttaacgataacatgtttcacaatagttaacaagtggtatatgtcattcctgaaaaactaatactttgctaagaattatgcagaaacatcagtatacatttacctccgccaatatccatataattgttaattactcttataattccagtaacagtcaccacatctccagggatgcaggcatcaactagatcttcagtcaactcacactctacagttcgaggaacccggccctcctcgtgatcctcaggctttaggagctcctgtattctggggtgatacccatatgatatcccaattattaaggattacattcctatacagtaagtagtgatactaatatataaacaaacctcaacgatattgatggtgatgacattgactaaatataaattttaaataagtgaaccaaccttattttctgaaaatctattgtctgagcagttgatcgaattggaataaaacttttgctcttgcatccatcgaagcaacagatcattggtggcgagaatttcccgtcaggaaatattcttaaaatctttgtcttacacttggcacagtcaaaactcatttcaaccacaagaggcctaacagtgctaacttttactacggagccacgaacagatacaagcttgtctgtcactcacgccaaaccaacatcagttcaatcactagcaattatctcagagcatagcaataaaaataactgtgcattccaaaaccatagaattaccaatatatgcagcttttaggttcttcaacgcaatcaaagattgaggataattatgcagacgtatgtttactttggtaccatccttcaattctctttcattccatttgttcagcagtacctgcttcttttgtcaattagtttacttaactcaataaaataaaattaaagttggaacaaattcccaaccaccattgccatgtaccttgtgcactgaagcactcatgcataaaagagcaatcttcggtttatcctctaacaattcataaaattcatgaatatcgcaatcctttcgaaatcgttgaaagtcgaccgagaaaatgtatatgccattatcacgcttgacctatatccaaccacatatataaatacataacattttagcaaaaacaattcatgcagctcggaataaaaaccctagtcgagatttctaaaagacaaagagagttagataagacctgagaaaggagattttgcgcgggtggtgaggaaaagaaggaaatcatcagagaaacaaggttggacacaactttttcatcgccaagctccatctgagaaaagtacttacaccaaatatctccaaagtctccaccaccatacacggatccatactccctttccgagccctttcccggaacaccaaacatcgccgccaccccacctcaaagaatcgagctcctgcgactttagctgcgatttagaaaattggagtctcacgtgttttggtgggaaaattaaaagcagaacatattcataagaggtttggcggagagcgactacggcgtcgtttagattcaaaaataataataataaacaaattatatacgtaaaactcatattaataacataaaatctaattagaatttttgccctgaactttgacgtgtaccaaattatatcttctgaacttttaaggtcgttaaaaatgcctcctgaactattgagattgtt

SEQ ID NO: 42741 - DNA, 3821 bp, Cannabis sativa
aacaatgccaaacaagccaaattgtttttaaaaacaattttctgtttttaaaaacaaaaaacagttttttaattatgatgccaaacatgcacttagttttgctaatttggaattcgatcccaacctaataaatgctccaaaattttattggtttaaaaatatcaaaccattttcttcatgggaaaagcataacatattgctatagaaataaatgaaagagttacaccaataaagcaaataaaaagtaattacagttacatagttttccttcttaatataaaaattttggttagcataaacattagagataaagatcagtacaaaacaaaactaaacaagattgcacactaaaaaatcaacgtgtatgcatatttagcagagctctagaagagcctccagatccagaaccagaagtagttgatgactgagtagtatagctactataagtacattgagtatgttcattaatggttccagtttgcccatctgatgtataagtgaacctaagcatatccaaaggcggagcaaaatacaccggcaccggcaacttcgccggaagtctaggcaagggagcttcaaaattgagtgtatttataacttgttttatagagggtctaattgtgtggtcaggatggcaacaccataagccaactatcattaaacactcaatttgtctttgatcaaaccctttatttagtctctcatctgcagcttcaaggatttggccttttccatatagctcccaaacccattccacaaggcttgtttggcttggctctgctttaagatcaactggtcttctcccacaactgatctcaagtgcaaccactccaaagctgtacacatcggtttctttactagcctttcctattgtgacacattcaggtgctaagtaccccattgtgccagccaaaacggttgtttgtgaccctaactcgttgtggtctatgagtctggctaggccgaaatctcctagctttgcattgaagtttgagtctaacataacattgcttgacttgatatctctatggaccacacattgttcccactcttcatgaaggtataacaaggcagaggctatgcctagggctattttgtgtctcactgtccatttcagcataagcttgttgccaaagagatgagtgtcaaggcttccattgggtaagaattcatagacgaggaggagttcgccttgttcgtgacaccaaccaatgagttgaaccaaatttctatgcctcaaacggctaatgattttcacttctgctatgtactcttttttcccttgctttgatcctcttgacacccttttaactgctacttctgtattggattcttttagtaaacctctgtagacgcctccgaatccgccttcacctaactttccttcttcaacaaagttgtctgttgctctgcttagttcatcataagtgaacctcttaggtccagtttctttctcaaattcattgtccatagataattcacctccatgtttcacattaactactttttctttactagcctctcttctccaaaatatgaaccaagcaaggcctgatccaatgctcacaacacaaaaccccacagataacccaatccacaatccctgtttcaatttccctttcccattatcaacctccaagcttgagttgaatgaccaagaatttatgttgtgtaactcaacaaattgactggtagaagcagagaaaccaactctaacaaattcaggcaaaaactctctcaaatcaacaatatgagaaattgtagaattttgtacaaagataggattctcagcataagttaaaaacacactcaaatttttgctagtagagtcgtaacttacccatgcatttgctagtgatccatcttttatgctattttcccatgtgacatttttcactgatattatggaattaatgtctattcccacatgatcagagctaggatcccaagggtcttcaaagctatcaaactcaacagcaacaatgctgttattgccagaggcattgaaagcaaattcaggagtaaacaaagcaaggtaaccaccacttgaattgaagggaattccagactcaaaaggtgcaaggaagaaagagattccatccccatatcctgctttgtcaagtgcttgcattgtaaaggagaagtgtgtagtgaaatcagtgagccttcttgttccagcttcccaaaggcgaatcggctgcgaatatgaggctcggccagcgctgccagccagggaaccaatagcctggttctttgtgagttggagagctccacttgatgtgaatgaatctccttggaatgtaatgtccaccatgtttggatgaaaagaagtgaagttgaagaaaactgaattgccatgttcgggtactaacaacaatagtaagaagagtatcttattaagaacaagagatcggagtgtatgtgattgaaagaggattgaactttggtcgaagagagccattgtttgaaaattttgaaatcataaacaaatagtgtttatttggatggagaactctaggagtattagctagtagttaatcaacctacctagttgtcctaattcataataacatggtttttataaattgatagggaaatacgtttggagttttatgttgagttattgtgactaaatattataattaagaaattagaaagtccactatagtagtgcctaattcattttgaccatttttccttaataatttctgtagtattatttgtatgtttggttatgtattatgatatgtaaagcaaaggaaacaaagggattaattagtttggatgataaaacaaggggaaaagacaagattggactgaggaagttatatcaaatatttgaaaatgccatgagacaaatggcaggtgatgtaagtttccatgcatgtgtgtaactaatatagagtatatatttctatgagagccgaacaccactaactgccggttgccggcttggacttatttctcaagtttgggaaggcataataaaaagagtatcgataagattggatgcacatgaaagggtcattttcattctaattgaccttatgcggagtcaacaagaaaagaaaaaaaaaaataaaaaaaacaacagaagatgaaagtactgttatgtctgtgttgttaatcacacgtattgttgcctcatggcacttcagctggccggcctttatatatttatgtatatatatgtgtgtgtttcttatataaatcattgaacaggtgggctttatgggataatcaatgcctctgtatatgaacttgaagggttttttttttcttctgggtgtgtacttttcctttcttttttaagaggaaataaactctaatatgtaatgttgataaaataaaatgtaaacaaatatattaatgtggaacaaattggtaattgtgaaagttgtacaaacatcatttgaagagtatgagtctggttacaacttataacaaatgtgtaaatgagagtaacatatcttaattttgaatctaatgagcattaattgttcttcagttttggaggagatgctatttggagagctaacaagtgtttgaatgtttcaaagtgatatgggagaagatttgaagtgttttggtgagtttttaaccaaatatgaaaaatgccacaagagacatatgttgctcatagtgtgccaacaaacatgtcgtctaccactttgacaacactttaattttgggggattttgtgagtgtgcttgagcgttctaacacccaaatagcctatcatatattagtcccgtgagctctcaattttaaatcagtaacaagtaaagaagtttttaattttaatctatgataaagtttta

SEQ ID NO: 42742 - DNA, 2998 bp, Cannabis sativa
aaaatgataaaaccaaaaataaaagaccctgtaaacatttggctgaatgaaatcacaactgaagaaaaccatattgaataaatgatcccaccttattgattctgaatctggattctgttgagtgcgctcccgcctgttactcctttgaacggagcttggcatgcgaagcaatgtcacgggtaagttcataacctcatgctgacatacctcacatttcttgcttcctcttgaactaaaccatttcactgcacactcttcatgtacaagcctgagggcacccttgcaactgcattccattttgagtgtattcccttcatcacattcatcgagacaaatcctgcacactgcttcctcttcaggaatctcttcctcttcttcatccatcgttgctggactaatttgatctgattttttcaaaagcaatgtcagtgggggtgatggttccattgttgagtttaagcgactttcataattcatgtgtcggctttaactgggttttggacatgaatatatgttcattgaactaaaattcaaaagacaagaaatgcatccatgaataattaaaacgatttagttttttcttattacaatgggatgttacataccgtcattaggatctggtatgttttgctcattacgagtagcgaatgatacagatcttactataaccatgtttctcccaggaatagagagggaccttgaaactgtagccttatcttcttctttctgcacaaattgaacaaaacataatccccatctttattcaaattactgattactgagccacaaaataagctgacgacccttttaaacaatgacatgaaaatcaaaggtaaacattctcctaagttcaagattcatatgaccacattagtctagttttagtgtagggaaacatacaagtgatttaggccgttcattagacattcttgctgaaagaggtgtggcagcagaaggaaacaattttgattcttgtctaacaggaagtgaagtacatcgttgccaagaaaatacagacttcaagttggctatgatgggactttcaggagctctttgggtgtctgtgtctgagttgagaagagaacttctctcaccctctggtacaacacctttcttcttgaaacttaaagctcgtaagaaacctcccggtgaagaactacctttagcagaaccttgagactggagcaaacccttcccgcttcgactactgccaaaagctacaggtctagggggtatttgaagtgaaatatctgggcgcttcccacttggtccaggctctagtacttcgtttggttttacattctgtgaatcggcctgcatcaagaaaattatttaccatcaatagaatcagataatctttcaagtaatatgttatctattaggcctgggaaacaaaagcatctaagacataataaaccacagaaaaccatgcaacaatgccaaatgacatttcttgagatgttcatatccgcaatcttgttttacaaggtgaacaaataggaacactagtaatttggtatgcaatatacactacattgtacttgcttcttcactaaagagttgtaataactcatgaaacttgctcatgtatgaaatgaataggtttaaaatgtcaactttaagttaattactatcagcattaggcataacaaaagatgggaattcagatatgaagttgttcaatcccaattccggatgtattattataagccaaaaaaatatacttatacgcctagaaagttatctagtcagcacttggctagtttatctatcaatagtaagtctattaatagtaaagcagagaacagcatagtttaaattaaacccactaattaagattatgtcagctatgctgaaactcactcaaaaatggaattagtcttgaaaaaggaatactaaagatctgcactaaattacccacctaggatcttccagaaacaaaagcatattacaaataaaataacaaagaatattacaaggcataaacagttcatctagatctgcaaaacaaccatatttgattgagagttaacagttcaactaagcttaaactagtaaaattagccccaaaagaagaaaatgataaagtaattagattttcactccagaaaactaaatgacccattatcagaatcgtacataaaacccagataaaaactacccataagatgaaaaaaaaaaagcaagttgggccacctaatttaagcatagataagaggtaaactgcataacccagaaacaaaataagtggatacaaatatagtaataaatcaataatagatatgagaacattaataccatgagttaaccaacctgagaagttgattctgcaactccattaatgtcaggctgagcagcttgcattattgtaccaaaggccaccaccaaaaagaaaaactcagaagaaaaagaaggattttgtggaaagtggcaagtttgaagggagtacccagatacccaaaaaggaaaaataataataataataataatatattatataatctaacaaagattatgaaaggaggacagggcagggcaacccaggagggagagagagagaggaaggaaaaacaaccaaccaaaccaaggaatataataaggctcttgaagtttgatgttctgtgatatgtaatgtttgatggttttattaaactaagaataaagtatgaatatttatttcatagaatagagagagagaagacaagaagttgagttgggagaagaaagaggacgatggtctcgaaccaacattggattggaagaagacgagaaagtttgtccgaggcaggcatgcattggtcccaccacacataacaatatgctaccacatcttcatctcatttcatttctttcatattcccaacttgcattttcctctacactcattcttcgctcttctcttttctacttttttattaggctaataagaatttttgaccgaactatgaaatgtactaaattatatcttatgaatttttaaagtggttaaaaatatttt

SEQ ID NO: 42743 - DNA, 5372 bp, Cannabis sativa
ataaaaatatataaatttttatttctaaacattaaaaattaatccttctttttttccactaaaaaaatccacaatcactatcaagaattagtaaaaaccaaaagtcctcatggaaagtgaagacacactaatattagaaaattaaaccaaacacaacaacaacaacaacattaaacaaaattcaataatctcaatcttattttggttgataatcatcacattcacattttgactcttaatgatttaagtaatttgtaggtgctaattaggattaaagttaaatcttttttttaaaagagaattgaaacgtgtcaaaggtagaaatagtcattctaattagtgaatacaaatgtaagaaatgcacaaaggaaaattgaaaagtgaaaagaaagaattttgaagccaaaaaaccaaaccaatcaaagcaccaaagaccaaaacccatttattattattattattattattactaccaaatagtaaagctcaagctggctttctatttatttatttattaatttctattttatattttaaaaattaaaaattaaaaaaaaaaagttgaattgggagaagaaaaagaagaacaaaggtctttggtggaacccaccttaaaatctgtgacatagacggcagtttcgttccatttctgactcagtttcctctttttttttttaatatattttttttatataaaattcttttaatttcttctcaaccatttttgttttccttcttcttcatcttcattattttttttgttgggtgttttttcatagatatatgtatagttagttacctttctctttgctatttttctttttgaataatattgtataataaaaatcaaatctttttttaatttggttaaaaaaaaatatataaagattggaactttgtattcttatgggtgtcaggctgtgtgaattttttcctcaagcgaagcaaagtcttctctttcacacctttcaatctcaaaaaaagcatggaagacgaatctagggtttgacagcatcaactccaacgaggtctttctctctattagcaaacccttctgtgttttttttcttctttggttgctttttctttctttgcttcttcttcagtcactccatttttgtaatttcctatctgggttttacttcaaacccctttattataatttttctttttctgatttttaacgaaagtgtgatctttcctgtttttctttgtttttgttaatttttctcataaactcaactactactttctttttttaagttaaaccccatctaaaaaagattatccttttcttttaatactgagaaaaaatgggatttttctatctgggtttttttgggttgttgttgtacttcccatgattgaaacaggtatctgggtttttttgttgtttctgatttggattattgggtttgaggaattagggattttttaatattctgttaaggggggtttatcaatggatgaggttgaagaagcaaataaagtagctgtacagagctgtcttagagtactaactcttcttactcagcctcaagatcaaattcagcgtaagagattatttgtagaaactgaagaggctgtgtttaggttcaagaaagttggttctcttctaagcagttgtgtaggtcatgcccgagttagaaagcctaagaaatttccaatacctttaccccaaaatttactcttagacaatcctaattgtagaacaaaaacaacaacaacaaccgaacatccatcacctaaaacacttctttttcttcaatctacaacctttcctcctgaaaaccctcatcaagatatgggctctaatgttaaaagttcattgtgtttgggaaacacatctttggagcttagttctagtgggaaaacccctattcaacaagtgaacccagcaccatatcgtctcattcagcagcagcaacaattacaacaacagcagctgcaacaccatcagcagcagcagcaacagcagcaacataagctattgtttcatcagcaccagcaacaaatgaaacatcaagcggaaatgatgtttagaaagagtaatagtagtgggatgagcttgaattttgataactctagttgcacaccaacaatgtcatccactagatcctttatttcttcattgagtatggatggaagtgtggccaatatggatgggaattcctttcatttgattggtgcgccaccgcctactcggtctttggatcagaattcacagcacaagaggaagtgttctggtagaggagatgatgggagtgtgaaatgtggtagctctggtagatgtcactgctcaaagaaaaggttttgatttttggatccttctatttccattgttggtttttctatgtctctatttttgtttttgcttcataatgtttattttgtttttctctgattgcaggaaacatagggtgaaaagatcaatcaaggtgcctgctatcagtaacaagcttgcagatatcccacctgatgacttttcatggaggaagtatggtcagaagccaatcaagggctctcctcatcctaggtacaatgtttatctcactttatatgcattgttcttgtttggtgatattataatttgggcattggattttctccttttatgaatgatccatgctaagaggatccaattcaaatcatgctatgtgtgtagatgtatgtagattcattataggacctatgtaatgactaatgctacaaatagaatgagagtagtaaagcttgcaaatttactaggttttcagttgtaataaacctttttttgattgtttgtgaacttgtttattattattattaggggatactataaatgtagcagcatgagaggttgcccagcaaggaaacatgtggagaggtgcttagaagactcatcaatgcttattgtgacttatgaaggtgaacataaccatccaaggatacaatctcagtctgcaaacacctgatctgatctgatctgatctgattctgacccctatttattatgatgaaaaccataatgggaaaaaagttttatcatctgtgattggcttgagatgatgctcctgtacatattttgcatggttcaagcatgggatataaaatgtggagcatttttattttctttctttcttttctttttgtggctttgaggaattggctcttcaagcctttttttaatttaggattctacaactttggtggggaagaacaaaaaaaaaatgaaaaaccagttaggagtcttgtttgtcatgtgaaaaagtctgtgtagaattggggtggtgtataatttaattgtaagaactcttcttccatcatcatcacttttagtaaaagcaatggtctttggttttggttcttggttattttttcttttaagcttttcaaattgaccatttgtttatttagtcataatttttttgtgttaggcttaaactccttgtcatattttgacaaagttaattaaagattttaggtgtaacaagagctatctctatctccactcactcatagtaaagtagtaattattcctttgtaaagtaaaattgaatccaataaagtaaaaagcatatatacttatactagtagaatttgaaaattgaaccgttgtaagaaaatgaaaatgaaaaatggaaattattggtttctttagtaggtagagggtgggattttggtgtctatttcattgctttagactttcttatgagcatgagctgtgtactattattgtacaagcaatgcccattttcttctattgccatatttatatgcacatacatatatgtatatatttctaagtcaaatggggcatttaatgcttcttcattctaaaatttatcttagtttctttcattattaatataaagtgaaagttttattggatgagtattgttattggtcatgagacttaatatttaactgcaccaataaataaatatatgacactgaaaagagtattttttaacatttttcttgtttgattatactacaaaatttggtaaagctaaaatctttggcaagtccagccactattgccctttttcagttgcaaattagcccaaaaaaaacctttttttttaattatttttatttatttgcatgagaatgagatgatgatgagaatttttacttgtcaaagtcaccaaatatataaatatattctcaaacaagagaaggaaatcaaaacagtaatgaggggaccaagcacaaaaaaaatccataagaaataatccaaaaatattttgatatggtttttctaattgatgaattcctccattaaagtcctagaatatttattattctttttgggtccaattccaatttctatctctatctcataaattcttggatggttttactactttgattggtgggagtttttattctatgctcatgtacaccattacttgattaattattgggttgttgggaaaaaaaatgccattttcttatttgttatttttattttctttcaagtactaaaaaattaattgtttttgagtacatttgtagatattgttggttgtgaaaacgatttggttctctttatcttttttttttttcatcaattatctaatatagatagatacaattttagattaaggttaagaaaacagaaaaagaatattgttattaaatggtattatgaagactgattttgcagtcaattatgtgaaatagcagccataattggaatgaatggccaccaaaaagggtttaagagtaaaaaaaaagtctaaaaattattattatagttccaaattcaatagttactaaaagataccaatagtgtctaataccacttaagttgttatatcgctattgatgaaattaaatattgagtctcaaataatttaatttaataattattatagaatatcgctaatcatttacaatgcgccacttccatgcggtattaggtgtgaagtgacgtcttataagaacatttcagtgttagcaactattagggtataactgtgtaattactaagttagttgtgcaattactagagttattacactatattttaaaatataaggtgtgtttggatatgaggtggtaattacatatcaattcctaatcttagtcaataatatctaaaatagaaagtttttagtaattgcatagtgtaattacactcaattttcacggggggctatgggaatttgagagtgtaattcgaacaccttaattaccttcaattacacaattacaatgtaattatatggttaaacaatcataccaaattgtgtaatcacctctaattacaaacaaattcaattacactgtagctttccaaacgcgtccttaaagttatcctctcaacctcacactatttttttttaagcttatcaaaatttaaatttcaagagtaggcaatgata

SEQ ID NO: 42744 - DNA, 2368 bp, Cannabis sativa
tttcctgccaaacttatccgactttgtcacctaaagtgcttattcccataataattgtattgtaatttagtgcattaaatttttatgaggtgtgcaccgcagtcaactagaattagtacagaaggttatcttagtttatatgaaaaacttcattatttaattatattattagagtatcagttttgttgagaggcatattaatgcttagatcaacaacttagtgatcgaacccgttcttctgttctaaaatgtcccaagcttagctgctattcttctattattgtgttgcgtgtgcatccgcactcatgttattttttttccggcaaaggtttagtggcatttgtttgtaggaactaagtagttggatgtttagaattgtgctaatcacgctatatggggcgtaggcatatttatgcccagtaattcttcctagaaacttctgctgcaattaatttggaaatctcttaggtgttcgaggtgtgttccttacgaccatgaaacctgcagcttctaatgctggacatgtactatgtttctatcaaaacaggaatcaccatttctcataaaggaagtttgttctatcttggggccttacacgcaattcaatataattttctcaagaaagccagccatgcttagttttcctttgttcatataatatatattcagttatttaaatgattttggtattggtctgttgttctagcatctgatgttctgtctgttattcactgtctcaacgtgttattcttaatttttctaatggtaaaatggttttactgactaagagtaatcgtttagtattaaacatgctgcttaattcttcgaacttaacctttaaatacttattaatatattggtagagaaaattgtactgttgattttttttttcttttctgttcttattttctttgttcttcttcttcacagtaataaggaaatgaggaccatagaagcaaaacatcatccgaattgtttgtgattttcttttgagagactaaaaatgacctttggatttccacctaaatggctatgttctttttcatgtggcaggtgcactgcttgccttgaggagtaccgtgacgaagatgtattgcggatccttccttactgcggacactccttccatgtaacctgcatagacatatggctgcagcagcactcgacatgtcctatttgtcgaacatcactgcgtgagtgtcctgatagaaaacgattgatgcagccgttgttcagctctgctgtccgatctcggatcggtacagaatccattgattcacattcttgccagtatatcttgactaataataatggatcaagaagtcaagaaaactgtgggatgaattcagttgaacaaggtcatttaacgaccaagggcagccctgcagagaccggggaaaatgtctcctccatcggtgagggtgatttgagccctaaagacatggcaaacaagcatgtagaaagcccatctaatccatgaatgtgatgattttggtttccagtggaagtatttgaaagggacattgtccataaaagttaggaattttttttccattataggtggtacactggaagcttattgttggtctctgtatatatggcaaaagggactttctcatcctttttggcgaaatgtttcttctttctttccaattaacggttgggttgggctgtttggctagatgattgaatcgagttaaaaagaaggaaaaaaacaaagtgcaaattaaaactaaccatcatctcatagacaattaaattgaacttgaaacattttatgtgttaaaaaaatgaacatgggagttgggaatataacatgaatataacattctgggcaagataaaaacttggataataaaacgtcatcgttatatatctgtatcagttaagcctgctagatccaggaagtttgctaccattttcactgtcaacacatgcatcgttaatagccatagtgtttcattttggagggtattttttttaattttatcaagtatgcatgtaaaaatgattatgaaaaataagtagtaatattattttttattttgtatgattgaacgggaacttgtgccaattgtagcatcgtattggttatgcgttgaacgggacatgcttatttttttggtcgaagaacactacatgcttggtgtgttataatattgctcttttctaatacgcaattctcaaattagttggtcacaagttgagagtggccacaatttttaatcctacttaatgcattatttgaatgttttattgggctgacaccatgccatggggacatctcctttataaatatctattttgtcatgttgatttttatattcaattttggtggcaggtaaatgtttataaaatatttaattca

SEQ ID NO: 42745 - DNA, 3781 bp, Cannabis sativa
  modified_base (2264)..(2269): a, c, t, g, unknown or other
caaaacaaaaattcttcttattcttatatcacaaaattctcacagtatacttctactacttgtactcttactctcagtctcacttgaccttaacaaaaaacaaaaactcttcagttttaaccacaactttttcttttgatatctctatagcttttctctctctcttttaaatctctctgcagagttaaaagagaaagaaaagaagaaagggaagtgatccgtacggacagaagtagtagaggggaggctccaattcgccgcatattattattatcaaggctaaaaaggtacagtggtaataaatagtggtagtaatagatagtggtccaaaatatatactcaactagtgctataataatatatatataacttaataatttgatttttattttttttttctttttatgtttgtttaaaagattagtgataatttaattatctgaaattatatatataaatacagagacatacgaacagagctaacccaaaatggttctatcttttctctttgtctttgttaggactctgcaaaaatgaaactttatatgacagcagcaccctgcaaacaagttcatcaagttcaagttcaacctttggttaatttccaaggtggttcgatcaatcaggtgggaataaatgtcgacaccttcttccgccgcaaagacaaggtggtcttcgtcgttggagccacaggaaccggaaaatcacgcctagctatcgacctggccacaagattccctgccgagattattaactcagacaaaatgcaagtttacagagacttagaaataacaacgaataaagtcaccgaagatgaatgccgaggggtccctcaccaccttctcggaaacgtagccgatccccaatctaacttctccgcagctgatttctgccaccacgcttcctctgctatcgaatccatcctcagccgtgaccgcctcccaattatagctggcggctctaattcttttattgatgctttgattaacgatcaccacaatcatcgccggcctcaatttcgtcttcgttacgatatttgtgttttgtgggtagacttatctttaccggttctacacggctttgtctccgagcgcgtggaccggatggtagccaatggattagtcggagaggtgaggcgaattttcgatccaacagcagattactctcgaggaattcgacgagcgattggtgtgcccgaactcgataaatacttcagagctgaattgagaggagatagtgagaaaaacaaagctagattactccgttacgccattgatgagatcaagaagaacacgtgtgttctagcttgtcgtcaattacagaaaatcaatcgcttccacgagaattggagatggaatactcatcgattggaagctaccgaggctttcttgaagcgtggccaaggactagaagccggtgacgcttgggagaagctcgttgccggaccggccacgatgatcgtcgacgattttctttacagtgaaggattagcttcaatggttcctaacgacgccgttttaacgaccgctcccgtttcccttgcttccgttgttgctgccgttacccgctaattaattatgtaattattatgaaactgcctctaacgacaccgttttgatgacacgtgtggaaatctgaattgggctgggcctacagattctgtaaacggacggctatatattatcgtccagcggcaatctaataatgctataaacacataaacaaaaattacattgaaaagaagaaattactgttttttcttttactgtaatttttgtacatttactgcagtagttaaaataattatggcctctttcgttaaaagtaaaaaaaaaaaaaaggcgtggaatgacataggagttgttgctgtcagatcgttgagaaccgaaatttggcggccgtacagttaggagaattttagaaattcgtgctggctttttttgttttgttttgttttttttttttttgagaaatatagttgaaaaaaaaaaatttgcacgcgcgggcctttgtttctttaagttgagtggaataaaaaattccgtacaggttggtgataggctcctgtggggtccatatatatgacgtggcaagagagttttattaaagtaatttgcaggatgaattgcaaataaattttatgttttatttgtgatggtaataatattttattttcattttttttgtttaaaaattaattaaaatatagaaataaaaaaaaattatgtacataatgatactttgtgttattattattattattnnnnnnattattattattattatttggcaagagagttttatttagtaaagaaaactagaaaagtaaggaggaagagacttgttactagagtgacatgacttactattattgatatattttggtatctaattttatatattttagttaaaagtaaaatgtataagagttggtactaaattgtactcattaattgtaaaatgttggacactatgatactttataacaatgctaaatgaagtgttgattgtgtcaattaatgtaatgtgggagttaatattttttcagaggttcttattttttttttttatggttccaatctttttgagaacatattccttacaaaaaaaaaaaaaaataggaacattcataaatagtatgttttcttttaaaagcattgtagaaagagtatgttatttgagtgtgttgtaatatttaagtgtaactcaattgttactctattacagagaagccttactttcgtttttttttttttttgggtaatgatttaaaaattatttactagtcataaactcacgaaataataataataatttttttaaaataaaaagtgaaagaaagaagcactagttgtttgatatgatggaggagagtgaatacatatggtatggattaacaaaggcaaagggatagtggaagagaggggtgagactaaagaagcataatttgaataagatggttaatatagtagatgcaaaatgaatatgggaatctaaatatgaaaagtgacaaaaggggacaatttggtggggtcatttccatatattctatctttcatgcccacatgactccaattataacattatcatatgtgggtgacctttatacccactcaccactcccattatatgaaaatcctgtggaccaaaccaccactactactactactagtagtagtattagagtgtgatgagagaacaaaacaaaatgtacataaatttcaatagcatttctttttgtatgaataagtataaattgtcaaaatcatcttttactacaaatttggcttcatctaaatgttgaatattttcttttcatccgcctataattgatatggatttcacatattcattctcttcatgatttggaatagggtatatatatatattaattttaattacacttggtatttatctaattgtcaaacacatgagagtaatgtgggacaagatatacacacataagtttttttttagctttttttatttacatactactataatttaaagaatattgtaatagttgaattatgttgttattgaatgatccaactttaattcaaaaaaaaaaaaaaataatagcaatactaatacacattaatatatttacattttgtaatacaaatctgttaacgcagattttcgttaactaaaaataataagtatttacgtaataattatatcacagaaatggtaataaacgattaaataactctaagaattttacgtagttatgcagttaaatttgcatactccacgagtctatcttattatgatattt

SEQ ID NO: 42746 - DNA, 6053 bp, Cannabis sativa
  modified_base (26)..(47): a, c, t, g, unknown or other
ttttttttataattttttttaatttnnnnnnnnnnnnnnnnnnnnnnttttttttttttttttacaaattctcgtttttactagtttttcacttttagtttttctcttgaaaaaaaacattattttcacgttgctttcccttgtattttattaaaaaaagaatactgtaaaatctatatttctataaattttttgtcattttaggtatttatgaaaaatgaactttttttgttattattattttcttttagttacatcataagctactatttttcctaaaaaaaattatatttttacatttaaataattttttttttaaatatttttatggttttttataaaaataatacgaaaacaaaaaaaaaaaactacgtaacatcaaaataatatcaaaacaataacaaaacaataacaaaaaaataacataaaggtaacatataatcaacaataaattaataagagtataacagacagtattttctgtaaataaaatcaaaaaaatagtaaaaatatttaaaattctgtaaaatagtatttttgtaatttttttgttgtttttgtgtatttgtaaactaattccttatttctatgtgttttcatacaatatgggcctgtataggcccattgggcaaacaaacattagagccaagtcctttctccgtctctgtctctctgtgttttaaaccctaacttttaacacacacacatatctctctctctctgccgcctctcctctctctcttgaactcttctcttcgccggacagaggtaacaaacccatttatggatgcattctgtgaatattgttatattgtttagaattatgactttttaggatccatttctgactcattgtgttgtttgttttgcaggtaaggtaagttaagccatggtgaagcacaacaatgtaatccctaatggtcatttcaaaaagcattggcagaactatgtcaagacatggttcaatcaaccagctaggaagacccggagaagaattggtcagtcactctttttcatctttaatcatcttattcaggcaattgttagttgtgtcagacccatttgtatagatctatttggtttggtttagtgaaatttgtgtttattatgaaattatcatcagctcgtcagaagaaggcagtgaagatttttcccaggccgactgcgggaccccttcgccctgttgttcatggacagactttgaagtacaacatgaaggttcgggctggcaggggcttttcattagaggaactcaaggtaattatgataattaattcttataatgtaaatttgaagtttttgcaaatatggaaaatgtggtatgtgtgtcttcatatgtttcttgatcatatgtactttacctaatggtttgaatgtgtttttcatggcttggtctgagctttcttgtcgatccaatgctgtgtgcctgtgtgaaattatgaacatttttacatttgggtccattccattcatgtgctatgatttcaagttcttgatgtaaatggtttggtacatttaggctgctggaattccaaagaagcttgctcccaccattggaatctcagtagatcaccgccgtaggaacaggtccttggagggtcttcaatctaatgttcagaggcttaagacatacaaagccaaacttgttgtcttcccaagacgtgcccgcaagttcaaggtgaatttcgatactcttttttgtattcattgggttgtactagtaaccgtgtttatgattatgttatgacatcttttactcgtttgctttttaggctggagactctgcaccagaggagttggccaatgctacccaggtccaaggcgagttcttgcctattgctcgtgagaagccagcatttgaacttgttaagattaccgatgacatgaagtcatttaaggcttacaacaagctcaggctggagcgcacaaacgcacgccatctcggtgctaggttgaagagggctgcagaggccgagaaagaagacaagaagtagagagtttcggttttttttccgaagaattttgcgttttgggttggaccctattttctgaactatagagattttgttgttctgtgatgttagctaagttgaagatttttcaattattgggtatggttgcattacttattgcacttttggtaaattcattctattctcaaatcactgctgaatcagttttttattattacttgctcttttgtttaaatttaatcacaataaatgatgaagaaagaaaacatcgaatgatattttctttcatgtatatgagaaagatgacaatacttaaaatcaagtagtatgctaggcaattcctgtcatagtaccatagggtcttgtatatttctatttttagtatcttgttataagtgatcaatttgtcaaattgagtttgaaatcaaagagttagtatgtttacttggtgtgtgtttttttattttattttatttttttaaataaagcatttataaaataaagaaaaagagttagatctctcggttattacaaaaaatagaggagggcttcacatgctcgaaacattccgagtaaaagtttacttagttacattatggacttcaaagttacaatatttgaaaataaatgagaaattacagcataaaaaatgattagagtttagagagttgattacaaagattaatataatttcaatattctaaccttgaatagattccttttaaagctttgataaccttctcccaatcactctcaaccaaaacaaaatagtgcttcattaaaacaaccgattccaatactaactgatacgtcgccaatcagtagatctgtgaagttgagcatgttagttgctacctacaaaattgtccccgtgtgatccttagccaatgccgccacacacatagactcactaccaaccttaacatcacagttgattttgattcaatcttctagaggaggaccaagagggagacaccacagctaacgccggagcaaacaagcatgtttgcttgggtttagtgcatatatttgtgtgaattgcatatgtaattatgtttactcaaattttttctgataaaaatgaataattttattatacacttgatttttttttttattttggtaagcaaagattatttttgcatcaaagaatcatttacaacctccaaaatacaactcgcactcccaacagggaggccaaaacctcaagacatcatctatacaagtaaggctgtcatccaatctttatcagaagtaggaattttatgcatggaaaaattcctaattatattacaaaacatcagtattgatttgcttcattgtacaatcaaaccttagaacctttccttcccaaagtgcttcattgccaattcttccatatcaggtagacaaagctgccaaaccagttatgtaaactcctctttcgaaatttgataaacctttgccatgactcgaccatctcagtaaaaaaacatcactgtcatttgcactataatagcaagaaaagaagaggtgactgatctcctctcttccatggccacaaatcaagcaatttggttgtacactaaccccaaacttatgtaatctactgctatcattttcttgtacatcaaatttatagagtaaggtttactaatcagatcatcttgtctttaattttaactattttctttcaataccagctcgcatttgagagggccttaaaatcccactagttagtgccttttatgtagagcaacaagattccaattgtaaatatctcttaaccccaaccctccaatcttctttggtctacaaatgtacttccaacttccaagcaatcctccatggaccatcaaaatctgaagtacccttttagagaaacgccctacaaatgttattgatcctcttgaacactctcttaggatggacaatagtttgagcccaataagtatgtaaggaaacaaggacatatttgattagagtcaacctgccagcaaatgagagagttttgaaactccaccctcaaatgcccaaaaccaacttttcaatcatgccttcacaatctttaattgagaatttcttagcacaagtaggcaaccccagataatgaaaaggaataatcccttttctaaaaccaaaagctattaaaattctctccacctcattctcaactgaccctgagttgaaatgggctataggcaatttttttgaggcccttattataaagataaatagtaattttaaaaatcattaaaaaaatatgtaaatttttaaaagataattttttatttggacctctaaaatgagcgggccctaggcataggcctaccccgtctatgcccagggccgaccctgcagctatgccactacaataatttaatttaactactatataagtaacaactcatagtatagcttaaaaacaaaattctctagctaagtaatgagcaaccttattttcggttgagtaatattattacttagttagatccaattcaaaattaatttgatttctaatgttttggcaattttctatttcattttaaataatttctagttaacacatgaaactatgtcttcattcattatcaaaagcaacaactatcaacattaattttgatcatatttttttaatgactttgtccaattatcattctcactctatcgacaatgcacaatcaatcaataacatagtcgagtttcaactgtagtgaattcactactgttgaatcttctattgttgtaacatgattctgaggttgtaatatgattctaaggtgagttcaacgaggattcttgtaattttaatttggggtcaacctcaaaaaaattaattttatttgaagatttcagtttttttttttgagggttttgatttacatgaatgtggattttttctttgagaccaaaacatagtcgttttgttgttgctcaaatcctcaaatctttctctgagcatatcttatttcttaatgtatgatattaatacctttacacttataattaacacgcttcgattgaattaagttgacaaccaaccacttaggtaactacactaaacaaaactaaatttgcttaactaaacattagttaatgaagcaattaacaaacattagaggtcacaaaaaattattgtaatgtttcaagtcaacattttcttttgacagatcttttgttggaaactattaagaaaaactcaaatgagaataaaaaagagggaagaattttcataaattttattgtttatttaattcaaagtgcttataatatttttatttgtttcattttgaggtagaaaatcagtggtaaatacacagactcattcaacacattagaagatatgatcaaaaaaccttcttcagaccgatattgggaaagttgtcataatttcatacacacaacattgaatctataagaaagttcagaagtcaaaccatgtaacatggtaaaaatacttattttttttaatcaaaaacagaagcaaaattttgttaaaaagaaaaatcaagaagtgatatcatagtttaacaagaccgactatacaaaacgactgagaccaaagtcaccaaaccaagaagccattttcagtttcaaacattcaaagatgacaacaatctatcttaacagaaagtaatcattaaacataaaaccacctattcatgaataatctatacatgacactatgactcatctatacactataaaaaacggctacctttagtgacaattttttagtcacaatataattttttttttgtgattaaatgtgacttttagtcacaatatttagtcacaacaaaaagttacttgtgactaaaatatagtatttagacacaaattgtcactaatttagttttagtcacaacaagtattgtaacttaaaatatattaagtcacaataaaatgtaatttttgtgattaataattagtcacaacataggattgatgatttataattagtcacaactattttactttgactcacaagttttgttgtgactaaaagtaattttttttatagtgatacactgccaaaaggccttagttgttgactttaaacattaattaagacaacaagtgtaaagcccgcttagttaa

SEQ ID NO: 42747 - DNA, 4444 bp, Cannabis sativa
tagtggacttgcaggaacagacttgcacttgcggcttgttccaaatcatgaagttttcttatcctcaagcatgtgttgcagctcagcaatgaagtattagcatgtatgcactctgcttgacatattgcaccacagaatattggaggagcgcatatgaaggcacaattatgccagtttgtaacgagaatgattgggaatcgattgatgacatagagaacatgacagttggagtgaatgttaagaagaaaccagtagggcgacctaagaagcaaaaggttggaagaattaagtcaaattgaactacttgtaatggtaaaaggattgtgataaagtaaacttgtatcaagtgtggtggtaatgggcatgactgaaagtcttgcacctatagaggttaaaaattcttgttgaattttagtaattgtattgttacgtattcttattaaattcttgttagaatttgttaaaaaaaatattatttgtggcatgagcaggttttcatttacttactgcaacatttcatatggaaaaattgatagtctgatgcaggtccaatggggcccgatgcgggtctgatgccatttttggctatccaaccttatattttgaaaggcccaatcgaaccatacatcaaacgtatatgaggtatgtatcaaaccagacaaataatttttaaaaaattgtgactaacttggccataatgaacaaccgggtcatacatctgacctggtacaaggccattcaaaaaatacttttttaaaatctgagtaattggccataacgaaccatcgggccataaatcgaacctacattgaacaagttgcggccattcaaaaaacattttgaaaaaattgagtaattttgccataacaaaccatcagtccatacatcggataggtatcaagccattcaaaaaatatttttaaaaaattgagtaatttggcataacgaacaatcgggcctatatcggaccatacaaaaaacttatgaaaagtctgtctattttagcctacaaaaaacttataaaagtcaatattttatgatataattggaaagtgatcccaaaaaattactgaaattttatagcaaatatgaaggatcaattgtttcatctattggaaagataatagattgttcagcaaaatatcctaaaagtaaagattgttcaaaaaatataagtaaaaaatcaaagttcacgataagttctagtagaataaatctaaagtccatcatacctaacaaaaaaactttgaaaactttgataagtttaatttagccataccttaaaacttaaagaaaaataatcgaaaaagtcaatattttaacatagaaagtcccaaaacagtaaaaggcaagttgtgacaaaaaattaaaaaaaaaaatacatagttcattctaggttttagtagaataaatctaccatccatttgcgtctaaagagtgggatgttatcatcatttactggatcaaatggtagatctagaatcttatgctcggtatgctctatgacgtacattccgcaattgttactgcattagtaaaaagcaacaacttagtaaattatgatcatacttatcaatgtattaatgtacttagtaaatgtattacctcgtgtttgtatgtggtacaatcgctctgtcctcgatgagttcccaatcgaatggtctgacttggcttttggaggctgccatctaaggtaccataatcatgtaatgggtgttaaatatacgagattgatccagaaatgatgtgaatatcccgaagaaatcctccatcaacttcttcaaataattaggggtgattgagccaatactaaaatcaaagacgaataatttccacaagtccaaattcacctccagaatcacccaatgttttttagcctccaagaagatggacatgtatatgcattctttcttctccaaagatgtcaagaactggattgcatcaccacaaaccatgtccaagatggactcatcccaaacaaagccttggtggtctgcatctcccttccaagcattccatcgacccttcaacgacgaaggaaataaagtgggcatgatggtacattagcatttgtacacctctgggtaaaagtgttttcgccttctcatcatgtgaaataccacatcaatatactacacaattcatacaaataagtaagaaacaatcacattaaatggaaaaaaaaaaaagcagtaaatagtatatagttttagaaacttacatcatcaaatagccattcattattagcgagcaacttctagaaccaactcaggtcatgtataccagagaagcactccctctaatactttttcccaatgatgcctatacaccagctaaggagactcaacaataatttcttatcaactggtcgaagcgagtcaacattcaaatttgcaattgatggctttgaattcttcttcattttagtatactcatcaaaccacctcagcctcttcttcgatctcttctccactggtggtgaagttgtgtttaaaacttggacctcagagtctgagtatctccaatgaacgtgatgtgcatattctcaggtgtatggagaacatcagctacatcatcagttatataatcatttgggagagtgaaatcatcttcaggagactcatggtgtggctgggactctacctctgcatctggccttctctaatcttccgtgagtgccattagggtcttcaagcagcccataatttttgtctgccctttcaaaatagcaatctagccttgcttcaaagcaatttgttccctttcaacactttcccatttggccaagatggcagagcatactggtttttgagcctctgaggtgttgggaatagattttgacaggggcatggatactgacgggatcatagatgctgatgggggaatagatttcaatgtgggaacagaatgggcctcatctggtggagatggtggtggtgtatcctctctggagatttgagttgtgtactcccactcttctaaggtttgtacaagcttctcaacctagctacgcaaactgttctgagtaggttgtccatcactacccaacactagttcttccaattccaaaaatagaggtacctcacctctagttacgttcctcaaaaactcttcttcattaggtcgtggacataaaatggagtacacattcaacagcatataagaacagaatactattagactgagattaaaatgaaataataaaaataattgtgaccaagtacaaagaattaaaaaacttacatttttggaaaacaactgaataacttcctccttgtcgagtgccatgtccttactctcccaattgaccattttgggaaagcaatgtgattttctgatcgcaaatttgttaccaagctccaagatggaccgtaagcccaatactgcaacgctatagtatatccataggccgagtactttgactccttttaagtcattcccttttgaatttttctcatccatatgcttcttcttttccacgatgtctctactccaagtttctatcagtatgttgaaagaaatttttacctgcgggtactcgtagaagagcccaaggtcatcagccattctaataataaatggaaaaacaaaggtcttctcctctttcccaatgagaacacccatcacaaataaggccattcccaactggtacacatcgtcctttttgtgcaactcacaaagactttacgcagttgacctaagttgatggatggatccccattgaagtactcgactatcaatcagttcaaaattaccttctcttcaatttcaaactcactaggtcaagctaacaagtttagcccagtcactagaacgaactcagctcggttgaatctgcatctcttctttgtagtgtaaaagtgcaattcatttgccttatctgacttgatcatgtgcatgaacaactgatggataagtgcagccaaaaactgtaatggcgctctctcagtgaattgcttggaagggaattccttcactctttttaacaatccaaattcctcaaattttgattttatctttaggtattaccaactatcgccccaccaagtgacacgcctggtgtaatagtctgacaatggaagtataacgcattgagtttttgtagactgtaaaaaaaacaaacacacaaaaacagaagttagaaattttgtgaaaaggcatcggaccacaatcggaaagtatatcgggcctattgggcctagcacaaataaaataaaatgaacctatatcaaaccctacatcagtccctatatcaatcctatcgggcctaacaaaaatataaatttggacaatatcgtaccctaaatcgggcccacaaaaaacacaaaattagacacagaatcatgccttaattagaccatatatcggtcttaacaaacaacaaataaattagacactatcagaccctatattggaccatatatcagacctatcgggcctaaca

SEQ ID NO: 42748 - DNA, 3382 bp, Cannabis sativa
ttcttcttcttccttttcttcttcttcttcttcttcttagtcaacctcaggtctaacttcatccttgacctcaccaatcccttgagtagctcgtctaagtttctccttggcaagctcctcttcttccattttttaggaaaatggccacgctcttctccacgttgggctttaaaaaactaagggtaatgcctttgtttctctgccacactttaaaaagtgaacgttgggccatttccttaactctcctcttggcttcttcctctttgttagtcaggtccttcttgaaattctcagtagcttctttcaaacttcattctagagttgcaatcgttgaggatttctcttggatatcagtttgaacgttgctaacttgagttttgagcttctctctctctctctctctaatagtagaatccctttcagactccagagcttcacgtgtcttaagggccttgttgagctcaagagtgagccgagttatattctgctagtgagattggaagccaaggcttgccattaatgccgtctggttaaaaaagaaaaaagagattattgaaaaagaaaaggaagagaggagaaaagaaactgctcacgctgagtagggaaagaatacttacagagaacattatgtccttgcttcagctaaggaggtcagaagacgagccataattgatcagtcatccttcacgaagtttcagatgtaacaactttcttggtaataaaaccagaacatgcctttgcttcagaaactcctaccttgtagggaagagggaggattgggtcaatgagctgcacctcagggaactcaagattaaaggttactgtgcgtggatcttgaatttcacatttacctttatctcgagcctagttttcgactgcctttggtggagatagtggggcctcgacaaagggaacagtctcagtgttggctagttttggaggaggagctatcttgtcagccttcttcttaggtgcttgaggtcgcttggaggatatgtaagtggatgaagtaacttgctttttccctcgcttcacaggaatggtcgaactgttcagagctgcttcaaagtccacatcaagatctatatctgcaaagataaaacaaaaatggattaaaatctgtaaagcgaggataactataaaatggcaagatcaaaactcccacctaaatagttgttagaagttctaaaaccaatgatcataatagatcaaatgaattttgtggagacaagtcccaatcccaactagcagctctattagcatttatgctatattgatcgacaatttcataataagaactgagtcaactgaacatgaaatttcagttaccaactatcaaacttatggcgtgagaggtcgacacagttctagatatagaagttatattggctatccctgaattttaccaagcttaggggactatcaataaaaagagaggaattaccttggggagccccttctgatgccatgtctgaaggttgacaagctacgacgctggatagctgcggtcgaagtaagtctcttcagaagagctgaaaaataaaaataaaataatgggaaacaacaagagaaaaataaataatcaaagaaccatgatggaagtgtacttactgggtagttggatgaaaggaagccttgaagaatttttcactaagaacttcttatactaggggtctggttcgtaacaatgccaaggttgagagaaaaaggtggcagaaactcaaaggaaggtaagagacaaagagggcattcactttcagagaaaatgggggttggcaaattgaaatttttaaaactcagtgaaacgggaatggcgatatacatggagtttttgatcttatattcaaaaaatgataatcgttcgatcgtaatgatgaccaatcaaacgagtgggaactattgagaaaaaaattgtcagattaataaatgctaaaatgatatctttctcaaaacactaaaccacctaaatgaagcatgcattgtatgttaagaaaaaaatacgatcatacccttcattattaaaaagtcattttaatcttaaaagatcatttttagggagcaattgttatacatatattttgagcaagtaatatggttacgacacgtatgaagaagttaaaaaatgaaccggctcagattgcgaaagaataaatacgttcaataaacttgcctcacaaaatataattggtagaaattcgaattcatcctttctaagataagagtgagctgtgaataacaacaactgttttgtaagaccatcaagatgaacaatcaacgtaaaaggtctatctcgggatgcacagagtatactacagaacaacagtcaattaaaaagagtagataatgagttctttaagagcttacaaattattggcccacatacttacgagtatgttgaaagaataaagtatatatacacaatgtaattcgtcttgtaattatcacattatgacagtatctcaagtagatacatttgtctccttcaacattatagaagaacatgaaaaatacttcccaagattatacttagacacaaaaaagtatcttcaaagtaaagcatcaggagatgatcatttgtgttacaaggtgaagaagcataatcagcataaccgtgtgtacataaagacaagagtagttattgcaataatttatttttatcccatgtgttataaatatgaaatgtgaggattatccacgtttcatgaacggttacaaagttaagacctctagagaataactaacatcccaaaatacctacaaataggaaaggatttcccagagtgggacacagccaatttaaggattatagagaacaatccgaatattatttgtattctgtattttgtaaacactctgaaaaatctcaaaaataagatggacacatggactagtgagagttaacttcaaaccacgttaaaaactttattgttctttatatatatataatattactattattatttattataattgtggagtttatttactaatttaaggcttatttattagttaataaaattcgacgttaacgcttaaaatgacgaatataatgttcaaacagttacttactaaacttacaaaaaagacagttatgcgtgcaagaaaatatttaaatcttattttcagtactgtaaactatttagagcattctaaattttttacaaataattttatataattacaacgtatatgaacataaaaaaaaagtaaaacagaaagtcattctgagtatgaaacaaattaaaatgtaccaaacaatctttttaagaagtgttaacagaattctactacagacattgctctattgtattttcatcccttattgtcacatgtttatttatgacagttgagttagttagataaattaggtttgttagttatg

SEQ ID NO: 42749 - DNA, 2886 bp, Cannabis sativa
cctaggaaattctgaatttgatatctagatggaatggctcgatttcttcatttgagttgtagcctggcaattttcatgttctcctctgatattttttgaatttatcctcctgttcaattattcgtagttagatgggatccacttattactgatttgtattttgattaagttgatggcgtaaatcaggtgcattttggttcagatgcttgcgaaggtcaggttgtctttgatttacgtgcccgcaaagatcaagctgcctttgctcatagttacttacagaccttgtctctgagtaactctcggattgataacttcttgaattacatatgctttcttggtcagtataatgacgtcgagatctacttccttctcatatttgtctactcgactgactatgccctcgagacgttgactgtcccgagcttgagcttgcttcatctcgcactagccttcttctttcgaagagattagactaacgtcctctatataagtatgtgtgtacattgtctctatctactcagaaggacgttgggatgtctcggaggaagcctgctttaccttggttgatttcctggatttctctcattattgtaagggattccctaattccctggtcgaggttgtcatgcctctttattcctgtgagatgcttttggcacatcagttcgttcattcccttggttagcaaatacatgggaagtttgtggaatatctcgccgatgttcttgattcctagtattattaggattggtttgattgtccattgagacatcccttgtattcctcggttgttcaacctgggtgttttggggattcccctggtttgttttctgtctccaagttctagagccttgaggtcttccttgtggtcttcttaccgttgaatcaagttggtactaaggagttgttccctaagctgccctggctattacagcctctctctctaacttagtgtttcttgggttagattcagccaattattctcgaatttgtctattctctcactctaccaatggtatatatctagttggatcataagcatcctcgctcctaggtacgtatctggcagaatcattgacatcctcattccttctttataagttttgatcctttttaccatcattccttcttgaacgtggcatttcaaaagtgttggatctttgagatctcatgggctttttgccaggatgatgggttgttttcttaggttgattattgttgtgttgatcatcaccagccattaaatatgggtagataatgtttataaggagggatttttttctagtttttatcactaaggctctcaatgaaagcaccaaactgttaacgcgaattttcgttaacgaaattatatagcctttttgtaataaattcactatagaaataaataagtaataaatgataaaataatactagatatttttcgtggttttgtagttaaaatttacgtactccacgagtccttcttattagagatatttttgagtgcaaaatacaatatcggtatttgaataatagtaatattttgtctcaattttgtcgtccctttctccatggattctcccctatttgtaggagtataggtaggcagttcttctttttgggattggttcaaatataattgttcatgaaatgtagataattcccacgttttatttaatcacatatgagataatatctaataactacccaatttctctttatttctatcaattagacggttatgctaatttggaaggttgtatttcgtcagacttgagttctcattcttgtccatcttgataggaaaaatgctaagcgttggaaaataattcatctcgtcgcatccttccatttgacttagcatttcaaggcgatcttctcgctatgtgcaatgcgaggctattgtgtgctattacatttattctacttgagtagatgcatatcctttttttgtctatttagttgtgtatattccgaggcagacatatgtctcgttaatactagtttaatagttattattcttgtctcgattaagactatatatagtcaacgcgtttgaatattatctattcaatttttatttaattttaatgagttatttgattgacatttaatgatacaacattattatattattagaattgattcacattcctcttatttgacacatgtcatcttctagtacataggtgaatttcgggtataacactctatataaaagcatataacaagtagtaaccccataaatttagcaaaaaagaaaaagttgcatagttcataatgagcaagcaaataataattttagatgttatttctatgaaggtaaatctcccatgtctctctcttttaaaaagtaatggctatgagtaaatctctaaacttattatgaaacgttgaatcctttttgtgttatctttaattgatcaaatcttgtagagataaatgttatctataatattcaagtaaggtatgttagtatatataaatatatatatgagattttgtgaatttttgaatattttctatgtattattatctcaaagagagggaatatatatacaacttagaatttgacttaataaatatttagaaagtacactattaaaatcccttaattttagaaagaataaatatacaaaatatttggtattaatacaaaattgatttctatatatagttttggtcaacttcctaattactgaaataaatccacactccccctcaagctgggttatgtatatcaaacatcccaagcttgcaaattaaatcttcaaaactagttcttggcagagctttagtgaggatgtcccctgtttgaaatcttgatggagtataactagcttgaacaatagcattcttaatcttctcagtgatgaagtgtatctatctcaatatgtttagtcc

SEQ ID NO: 42750 - DNA, 4676 bp, Cannabis sativa
tattttgatactcgggatcccaactcttttggttattaagctataaaatattaaagttatcttttgagtttagtaaatataaaatacgggcgttacacctttgatgtgagagggggttgaaaaatcattgaaaaacttggcctaaagaaatacaaatagtacttttttcatagttgttatgaacaccttcaaaaatttccatcatcttgatctccattctaagttctaagttaagcttcgatttcctagattgatttagttgatgagattctactgtcaacagcatgcctagatgccaccatggtaccttgatcttggaacaccgaacacctccaaatgtactaccaatgacctctacccctatcctaagttagtcaatttataatagcgttgaaattattatttcattcttttgagtaacgctcaaaatgtgaaccactttaattttaaatctaaaatatctcagtatttgcacgatatgctagcaattctcatctttatcactttcaaattttatctaatacttgaatacgttgaaggaaaaaagtaaagtagatgccttgattgtccaactccaagagtgttattgctcacaaaagaaaaaaaaaggagtgatgatgatatatttacgatatatctatatctaattgttttgcacgcacaaggattagctaccctttatcatgatgtacaaacattaagaatccgaggacaaggcgctcgatggcaagggggtcttgaaagatgctataaaaaagaaaggaaaacgacaccatatacactagaaggatgcttctcgaaaaatattcaaaagtgtgcacaaaaatgaattaataaattataagaggttgagaatggttcacagaacacgtactctcttaatttggcaaataagagagagacatggctcggaaagctcatactcgcttgttataatagataatacaatgaaagagtgaaaatcaactcaagaagctcgtacttgttcaaaaaaattagaccacactgacactgaaaaaagaaaacgacataagcgcctaacaagaccacaaagtacaatgtgattacacgagtagaaggaagagatgcctctacaaggctaagtatgccatgcgagagaaggatcgaagaccatgcacaaatcagtgttcacaatattctcaaaaagtttacccgaccatcttttgcaaaacactcatcctctcaatatcaagaatgggttaagtctcctcatccaacagctgtgggacctgaaggtcatttgcaaaaccagaagggacaagtaaaaaaagaggagaagggaggtggaaagaaaatggaaaggaaaacgagcataaaagtttacttgcaatgagaaagtcaccacgaacgcaatccaaacccttcacataaaagaatgaacttgtccatttcctgtaatttcaaggagcccccacaacatagagaaataacgcaacaccatacgaaggaagtaaaagcctctatttttgggaatagtagccatgtcatacatgaaatgtacctcaagtggagttggagggcgaccatgatgttgtttaaataggatgttcaaacaactaagaataatccagctgtgtggataaagttggaaattggccaaataaaaatacctcaagacttccacaaagtaaggattaaagggaaacacatccccactcctcatgatcaagggctaagtgccacaaaatcagggggagtgtggttttctatatcaccattagcaaggagatagcatataaatctctcacgtaagcaatacatggcagtaatctatgcaagcttggccataaatatttctgaggctatggcgtcagccgctacaattactttcttgccctctccatgaaaatccataagaggataaaaaaagagggaagaaggggaggaatgaaagaagcaagaaggcctccaaaaagactaatgctaagatacattaagcttgaaatctagaatgttaaatcctatcaacaagttaaagaaatgatgaaaaaatgaagattcccaactatttaggggtgtacttatatgaggagaagcagaatcttaaccctcagataaaaaaagcaaccaatagagtagattaatccatttactcatgttggaatccgcgcatggcaataattggttgacacacccatgttgggatttgtgaataagcatgattggtcaacattcctccaacaaagtaatacatagatccctaatgagtgtatcagggggaaaaggtagtggaagcatggtcctaagtgtcaatacgacttgatacctgacccccactactttgaattttggccataagctttcttctcataatgtgtggtccgcctagggacaacttagggccatgatatccacctataaattcccctttatttcatttgagaaaggggggttgaaaccttgtaaaagacagaaaactataattcaaatacaagatcttctccatatttaagaatgattccctaatcaagtatctaatgaaatctttactatgacattactataacacctatatttttacacacttaatctctctacttagcatgaaaatcaaggtttttggtccgtaacttcattaacgagttttcactgtcaacacatgttaatgattgagggtagaactttaaccatcatactgcacatcaacttggaaatgcacttatagagagtgttacaacaaacaatcaacctatagtcaatagcttttgaagctttttcaatcttgggaatcaaagaaagtagaatattatttagctgagaaggaatcttctcagtatcaaagaaaaacaacacaacctttgaaaatttcctccccaatgccaacccataacactttaaaaaaaaatcagaacaaaacccatcaagacctaggatttttaaatcatgaatattaaacacggatttctttacatcaaagctagtaaaaggcttaattacctaagcttgttggtcggtattaagagtagcacctatagccaaacaattcttctttatatcaatagtggtcgaacttggactgcccataaagccttcgaaatggttcaaataatggactacctcatcataatcatctttaaagttaccatgattatcaacataagaggcaatttgattgacttccttccttttttaatgctagcatgaaaaaaatttgtatttttatctccaaacttcaaccaattaatcttaattttttgccttaaataactctcaaccatcttagcataggagctcaaggtctcctttatctctttctctttactttttaactccacataatgagtatcatattgtaactattgttgaagccaacaaaatcaagttatagctaaattgtaagtaagttggatatttcccaaccatgttcctattaaaatcatgaagcatttcctcactctatttagtttgctcatggtctgaaaaaactagtacaacgagtaggttgttgccaattctccaacactagttgcttaaattcacaatgctctatccacatagttggacattttccaaccatgttcctattaaaatcatgaagcatttcctcactctattgagtttgctcatggtatgaaaaaactagtacaacgagtaggttgttgccaattcttcaacactagctgcttaaattcacaatgctctgtccacatattgaataatttaaaaggttaaaaccctaaatttccaatgtgaaaatgatacacgatttgtactgcaagtatcactagtataaaaatgggtttcagtgacctactgtaagcgacactaaggatttttagtgaccattcaccgcaggtcactaatgtgagtgactagaaaagtagtatgtaatgatcgatctattgatggtagaaacttgtcaacgagttaagaaccaaaaaccttgagttacttgtgaagttgagagatttagtatgtatataagaagaaatattcagtgtttaaagattagaaataatcttgtattgggattataactctttttcttacaaaaatttcaaccccttcttcaaatgaaatgaatgggtatttacaggaggctctcgtggcccattgttacaattgtattactctaagtggtccctagggggaccacatgttgtgagatgaaggctaatggccaaaaatcagagtagtgggggtcaagtagtggtggtcgagtgttaggccatatggacacttctgatcacgctcccactactttttccccctaatacaaatcttactttatcaacttttacaggtgtcatggtcatacccttgttgggatttatgccctaaaagtaagtatttaatggataatatattatagaatatatgaaatgcaattataagataaatgaatacattaattatagaagtataattaataaatatttgaaaattccttattcatatggcgatggtgtaatcttgtaaagtcgtacaagagaattaatattatataatatgaataaaataagtcagtagtgtattaaagtaagagatatttaatttagaattaccaagtacagtttgatatattattttataatataataagtgtagattaaaatgtggtaatatatattattatatgaataatatatagtgtttgataaataaatgtgtaacctatgatttcaatatacactttgtaacctacatgttgtaac

SEQ ID NO: 42751 - DNA, 7660 bp, Cannabis sativa
ctgatgcacttctcatacctgttgcgttttgatataatgaatgcatttgttatgttgaaccaaactgacaacaaaaagtcaatacagatagaaaagtattttttgaaatcctttttagagaaccgaaaaatatcattagttaaacaatcatcaatccaaattatcagcttcataagtatgacaagagcacaagagtgtgtttagtcaagcagattagatttgaaacaaaggcagacttcttcacgtataatttgtcggtcagatgataaacatttaaaactccaaatgtatcaaattaaacagaagcatatttattttcacaattggtgagactataggagtgtggggtaatacctccttgtttttctcttctccttgtatcgtgaaattgcaccctctctttcctggctggtcaattcgtatgatggcactttctggaaatctgagaaggctctagaattcataggatgttgtggttgctcattatgaccatcatcattaacatggcaccaagtgtcatcaatttctgaatgtttctcaaaatctttataacttcttttgagatgactactaaatgatttgtccacaagaactttctgatctgcagtctcaccaccatcaatggtccactgacatgaaggagtctgtagaaaaagtaattccttcaaaggtttgcttaaagcttaaatctcggttacaataaataagctagatattacaaggaattaaactattaataagatttagttatatctattaatccagctagctgacacacaaattcgtgaggaaatatgtttgtccatttagttatttccatgagaacattccattagatcgttttacaattctgacctcatttgaatggtaatgcataattcaaaaatataaaatctgttttcaacaagaattgaaactaaatcgttttggaatggaaatgcaaatctcagctactacacaacatcatcgttcaagcgatgagagtaagggtgtgagaatttccattcctctaattcaacagccttactcatcattaccttcttcatcttcaatacgctgaatcgatctaatcaataagaaaacgaaaaccagaaagaattgtgcacatatgaaaagatctaaagttatatgtactcataaattaacataactagcaagctcaagtaatatcgagaatagagagaatgtttcacctcatatgttggaacggtaactggctcagccccagcattatcaatacacgctcttcctggctgcacactttgttcaggcacaagagatttgaaagaattaagaaacttggtagtgtcaccattgtcgaaatttgtattgggttcgatctttgccagtttttgaagctgagcaattacttcttccttgtattggccgcaaacagcattacgattctggttcaacaacaatatcctaaacccaagtcaaaacttgaaagctagaattttggtaaataatcaagatgatacaatttgagaaacaaataaaatataatcatgaactttaaccactgaatcaaagtaactataataatatccaatttagagagacaaaagcatatcccaccgaggaatcaagctaaatccttagcgtaaacaattcaaataaaatatgaagcataagaaattatatatatttattattaatattgttttcaaacagaatcaaacaaattaccttcaaacaataatttaaaaaatgaaattgtaaaacctccaatcaagacaaagtggaaactcttttcaggcttaaaaaactatatcctatatatgtgtacaccaatcaaaatttgattaaaatatttcagtgaaagagggtcaattataatattgtagaaaggagaaagaaagtgataaagagtaaaagtacacaccttaggcagtggaggaatccccatagcctgaaaattatgagacgaacctgaaacaatgaaatcatcaagactaacaatagaaggagtgtcccaaagcgacaaatctaaaaaatcatcaggctgaaacccggaagacccatctctttcctcattcgaaatcagagattttttgtcaaaatcgtcaaaacccagaatacccagaaggtcagttacagaagggcaaccattgaaaccctcaagaggtcttctgtcatggaccgaagagagagatgggttatgcctttcccagtcacagttttgacacaagacggagctctcagaggagcagaaaatggaagccggagagtcatgacaggcgtcgcagagctgagaacgagagtgcttggtgaagagctggttggtgccatggacttctcggtcgcaggtgaagcagagcttggccgagtctgctcggcagtatagcagggcggtcgcgtcgttacagtaatcacatatacgacgtcgttctgaatccattacggtgtcgtttctggtgccagttttttcttaatgagtgtcgttgagtgaaactcaagattatgaatgtgatggatttatgagataccaaaaacaaatgaacaatattcttttcatacacaatatatacaactcaccaaaataaatatctctcaagtcacttttcttgcttggtggccaagaataatctataatgttgtaagcaaattttattttccagcttaattttttcaactgtataatcaaataatattcaatttaggctcacaaaatatgtatttcaattttatatacattaacttgacataatttcttttattaatagtcaaaattagataataatttattatataatcatatatcattaatacaatattagtttaattaatttaatgtgttaagcttgtttagtgagaattggtttagttttgattagttatttttgttacaatcaattttgtttttcttaattagttggaatataaagaccgttagcttggtctagactaaccagagttagttttattttttgttttgattacgctcctctttaagctatatattgaccatactttgtattttgcgcattcaattcgattcaatataattacacttttcttccatcttcttatttcacaatatggtatcagagcgtagaagaagagcttccccccgatcttgataattccttcctcatcgttgtgttttattctccaataaagcttttcttcgtgttctaaagttttgtaaagaacttcttcttcttcttcacttttgttcttccatattgatcagtgctcctttcttgatctcgtacctttcttccatggcaattgataatcaagtcgtgatataaggaactgacaacaatggcatgcctgcagttgttagagaagttgtgaatttgattatgtagaacaatcaaatgcaacagagaaatccctttgaaaatccttcagatccctattaccttcagcatggagataatccaggtaacattcttatttctcagctcctcactgggcaggataattacatgtcttagagtaaagcgatgtaattagcaatctcagtcaagaataagttgagattcttggatggtactattcccaaacatcttccttctaattcaattatatacaattcttggtatagaaacaacaatattgtaatttcttggatcttgaattctatttctaaagagatttcttctagaattttgtatgataaattcgcagcaaccatttagactgatctcaaattcaagtttcaccagaaaaatagacctcacatagacaatatgaggaaaagtctaatgaaattgaagcaaaaaaatcaaacagttagcatgtattttataaagctcaaaacagtttgggaacaactctcaaattacaaacttaactgtgcaatgggtgcacttgtggtggtgtcaagaaactttaagaacaccatcacatgggccattcctcatggatctctcggattcttttgcataagtcagaagcaacatcctgatcatggatcctttacctgaagtcaacaggatttttcacttagtaacccaagaagaaaaccagaaaggaaacatgaaccttgctgcagatcccaattcaggtatggcttttgcattttagggagatagaaacactaacaatagacctaattcttaaggaaataaatcgcattctccaaaaaggaatagaccctttttcacacattgcaatatactagggcacaccattgaaaaatgctacaagattcatgattatcccccaggataccacaagaatgacaagggaaaagatgcatctgccaatcaggtacaagcaaacactgacatcaactcaactggtgaaaatcaagccttgctacctcaactcacagcaacacagtaccaacagttgctcaacctgttagctgttcaacaatttggtatgcctaacacagaaactaaaaataatacatgtaatacaggtattgttctctcaaacatgtttagccttccaataagtagttcttggatattagactcatgagctactagacatatatgctatgacataaaactttttcaatgcatatgcagtatcaatcccactaaactgttgttacctaacaatgaatatttaattgttaatcaaagtggcaccatttccatcatagataaactggtcctgagcaatgtactctatgttcctactttcaattacaacattatcttagtaagctgtctagttgatgatgacaattagtatgttaagttcttcactaatcgctttgtcatacatgaccaaatcaacaagaagaagattggtagaagtaaattcaagaatggtctgtacatactggatttgagaccttatgattcaccaatccttgatgttttagctcatgtctagcactcgaggcttcgacatccctcaaacaaatacttgaaacttttagacagtaaactcaattgtaacatttccaatttacataaaaattcgccctgctatatttgtcctatggcaaaataaaggaaactttcttttcaaaataataacagttttgctgattttttttaatttgattcattgtgatgtatggggtccctatcatgttcaatcacattctggttttattagattctttctcactattgttaatgatcactcaagattcacacggatatacctttcaaaacaaaaatttgatgtgcatactattattcatcaattgttgacttatgttggaactcaattcaattaaaaaatcaaaaagtttagatctgacaatgccccgagcttgttttcaagaattgttctcaaaacttggaataatgcacaattttacttgtattaaaacaccaaaataaaatgttgttactaaaagaaaacactaacatttattaaatgttaatcgagctctttgttttcaagctcatatcccactcaaattttggacagaatacattatgacaacaacctttctaataaattgcattcccactccaaatttgaacaataaaataccttatgagttactatttcacaaacaacttgattatacctacttgaaaacttttggttgtcttgcttttgcttccacacttattgctaacagaactaagtttgctcctcgagcaagagcttgtgtttttctaggatatccacaaggagtgagaggatacaaactatatgacatcaatacaaaacacgtttttctatccgaaaatgtcatttttcatgaacatatctttctttttcaaaaattaaatgaagatactattaatgttgatccttttaccaccttagtgttaccttctttaaatgttactaacactcatattagtgactatcctattggcacaacagatacatctagcttaaactcccttgttcagggtgcaaacacaactacactaaacaacagtggtaagttctgttgatgcaaatgtcactctaacaactctccctgaaaaaccagaagttattcctcgaagaacaactggaaccacaagaccacctgcttacctcaaagattttgagtgttactttgttttacaagaaaaatattctactcctcacactcgttacaaatacctctcttattgtagattacaaagcttttatacttgtggtgacctccctcaaagaacctcaaacataccaacaggctattcaaattaaataatggctcgatgttctgaacactgaacccatagccctatgcaacaacaagacttggactattgtgcctctgcctcagaacaaaagggtaattggatgtcattgggtttacaaaatcaaattcaacagtgatggctcagttgaaagattcaaggcacgacttgtggctcaagaatatacccaacaaaaaggccttgatttcttcgataccttctcaccagtggccaaaatggtcaccttcaaattattacttgccatttcaacgatcaaacaatggaaaattttataaatagacataaacaatgtctttcttaatggagacctcaatgaagaggtctacatgacattaccactaggattaacactacctaattctactcatacaggttctaatcttgtttgcaagctacacaagtcaatttatggcctacgataatcatcgagacagtggtacaaaaatcacatggatgcactcatacatgaaggtatctagtaatctcaagcagattacaccctcttcactcgaggccataatgacaatttcattgccttgctagtttacgtcgattatatagttatcagaagcccaaaccacactattttacaacaattacaagagtcattgcataaccagttcaaactcaaggcgcttgggaatttgagatacttcctaggatttgaaattgctcgtacaatggacagcttttttatctcacaaagaaaatacacattgctgctcctcgaagacactatttacattggtagcaaaccagcaaaagcacctatagatcctagacaaaactagaagaccaacaaggagagcttttcacaagcccctccatctatagataactaattggcaaactattatatctaactttatccagaccagatatcacctatgatataaatgttttaagtcaatttatggcttcccctcggactacacacatgcacgccctacatcatcttatacgatacttgaaaggcactctaggacaaggtcttctatacttggctacatcatctttgcatctcagaggattttcaaattcagattgggcaccatgtccaatcacaaggagatcaaccagaagcttttatgttttcctcagtgattgcctcatatcttagaaaactaaaaaataaccaataatatcaagaagcttagttgaagctgagtacaaagcccttgctgctacaataagtgaaataacttggcttcaatacctcctaaaagatattcacattcttcaatcaaccttagcattcatatattgtgacagccattcagcaatccaaattgttaataaccccaccttccatgagcgtaccaaacacattgaacttgattgccattttattttagacaaaataaattactccaccattcgactcataccagtctccagcaatttacactcttagagctttcaccaaacctttaccagctttctacactttctgcccacactagcaagatggatgtacacgatatttatagtccaccttgagaagggtaatacgatatcagtttaatcagcttagtgtgttaagcttgtttactaattactggtttaatttt

SEQ ID NO: 42752 - DNA, 2577 bp, Cannabis sativa
ccagccccacttggaccaacaagagcaactttggagcctgcttcaatttccaaactgaagttgttaaggacagtaacttcaggcctcaatggatagttgaacttaacatgttgaaactcgatttgccctttgatcaaatcgcgatttgaaggccctggtgtgtttggattgatttctgtttttcggtcaagtgtctgatatgcaggagttagtacacttatagcagagataacagtaggaataagtgtccataattctgtgattgaaggaactgtgagtgagaatatctgataagatcttataccatcttcgaatttcgcttgtcttctatcaatcaaaactgttgtgtaccaaagagcaacagcatgtgcaatgttccataagcaaagcgaaaatccttgaattaaaccatacttaatactttgttttctgctcttctttatgggattttccaatgacattttggctttgcttagtatattctcttcataacaaaaagaggcaacagttcttatgttggttgaagactcaacagcaagagcaacaagttcagaatacgaagaagctaagtcacccgaaaatcctttagcagacttggcttgaattagtccaccaatgaagtgacaaggcataactgcccaagctaccaaccccattctccaattaacatacatacttacaattgttgctatcaatattgaagagatgcattgtacaataacagacattcgatctgcaatgatagttttcaccatggttgtgtcactaataacccgagatgtgagtgaaccaacactgttctcaggcttctcaaaccatgccacttcattgttgagtactcctgtgaaatttgaaggtttgacatgttagattaagttgatggaaggtgaaatatgagcttgatatggcttcaagtttaggatatacccgaaaacaaagctcgtcttaaattcgccatggctttctctccaactattccaaagaagtaatgttgcaaagtatgagagaataaagaaagcaaccctataacaaaaaataacaatgaatacaagccaacttttctccttgcatcattatggtagtatgctactcctatagtgataatgtagtatccgaaaacaggctttgaaatgccagaaaaagcagctgcaacagaaccgagaccaatctttgtgagctctctttttctcaatccaaaccaaattcttaagaatattgttcttttccttcctctttcactctcttcttgcttggaattttccaagacaggatgtacagattctgttactgtcttattttcttcgatgtcattttgaaatgacatatggttttgacaactttcatcctcttcacaagaattttcacttctgtcaattaacaatagaacaagattagatacttcaattctactttatatagaaacttttaagcatggaatcattactttgattcgagaatcggattaaggttctgcatgttgaacaagttgttgtagaattcactcctatcaagaaggccgcgatgagttccaatctcggtaacatgtccattctcaacaactgcaatcatatcagcattaacaatggttgacaacctatgtgcaatcaagataactgtccttccttgcatagctttctcaacagcatcttgaactaacttctctgactctgtgtcaagcgcgcttgtggcctcgtcgagcaaaaggattggagggtttttaagaatggctcttgcaatggctactctttgcttttgaccccctgatagttgaactcccctttgtcctacctaatgtaaaaaataggtaaattttctcaaaaccaaaaaatgtaaaagaaaaaaagactgttagaagcaaacctgtgttgagtattgatttggtagttgtgaaatataagaatgtgcattagccatctctgctgcaatttgaatttgttggtcatttgcatccatatcaccaacttttatgttgtctttaatggtgcctgtaaatagtgatggttcttgggaaactattcctatgttactccttaggaactttaaatccaaatccttaatgttatggtcatcaatgagaatttttcctgtaaatttacataaaaaaaaagtaataaatatcattctttatgaaagcatttgtcaactacacaaactcattcacaccatttatttaagggaaatactcctatattaccttgtgttttttcgagaaagatattttaaataatacttatttggtactatatattttgaaattgtacatatttagtaccttaaaataaaacttaatcaatataattttatcaatttgaccaaactgttctcgattatatgtaatcaaataattaaatttgaattcagaatttataaaattgaagatagttttattgcattgatataattttatcaaataaatttcaatttagagtaccaaatatgtatgatattaaaatatagggtgtcaaataagtattactgaaaatacagaatacgaaactagtatttagataaaacacaggataccaactgtgtaaacactcttaatttaatcaaaatgagaataaagaaacatcccaa

SEQ ID NO: 42753 - DNA, 1959 bp, Cannabis sativa
tataaaaaaaggaaaaccccttagacagtagtaacctttaaatttattgatattatagtacaactattttcttagaacttatttttcaagcttgtttaagctgaataaattcatgaatttattacaaaatatcaaagaagataatgacaatccgtgaaaactgttggaaaaacatacttatacctccaaaagaaacaaatttccacctactgtaaattatggtaatgataggtgaagtacttgctgttgagttgagataagatacgtttgctggaaattcataaaagtccaataaattaaacttttaaacctgaatggatggcaaccactcctccaataagattttcatactcaaccttctgaaatcctgcatctgctatcattgatgaaaaggtctcctgcatttatcaattattgaagatttatggaaaggaaataaccagtcacagattcagtaataacaacttaaagagtttaggcagaaaagattcagaaattctttctctgtttctatgtttcactggtttatctaatgctgctgttttttttttattattattcttttatacaaagtagagtattaatactctggcgaaatctcatttaaaacacatgaggtcctcacggtcaatagtcgcaaagtgcacaagtttcctaatcaatttaaccaaatgtgatatgtgtcgtttggacacggattaaaattctttagagagccagaggtccaagtagatatccaggtttttactgcttaggaacacaagaagctgctctagcaagaattttatgtacaccaaaaaaagtaaaaataaagagagaacctggagactgaagaaagatattgtaatcttagtttcaatgtcagcagaatggtttaaaaagaacgagcaactactgtacccataactcgaatattacattgtgcttctatatgttggcttgtcaacaagtttgtcaattagtgtgagataggaaaacccaaagcctaattatcagggcatgaattgtatagtataatcccactctttatgcaataaatttttttcgcaaaattatattcagtgtttctaattgtttacaaataagaggaaagaagaagtaaaacctgaggaggaaaacggcggatgctctcaactaagtactgataggattctcggtcacctgcaattagctgacctaaggtgggaataactgagaacgaataataatcgtacctgcagaagatgattatagtcaatgatgtttgtgtcactcaagattaaattaagattatggaatgtctcatagtcttctaccagctaaagtgtcatggatacttacacttctttaaacacaggaacatccacatgactcagctcaaggcaaagaaacctcccacctggttttagcaccctgttaaaagagccataaaataaaggttaacatagtaagtacatgaatcaggcaaccatgttattagtagcaattccaaaaatacaaaagatttccctagaaccttaccagaatataaataaaatatcataaatggaaaactaaagaggtttccctaatatgagctgcaaaatgctcgagcaggccggccctgaattttagtaggcataggaaaaaaaaaaatggaccctctatttaaaaaaaaatgtgacattttcaaaatcagtaaaagaaaaatgtgtattttaataggagatttttttggggcctggggtgggccctaccgcctatgttcgcccggggggggcgggctgggcctatactcaagcatatagtatttcttcgaatcagcagcttggccttccctttcactttctttcgttagatagtttttcatttttcaaaccatttaattattttatattaaaataaagctttttcggatactatttaccttaccttaccttacccaaagaaacgaacaaagatattcttggacttgacacttcatctttttttttttttttt

SEQ ID NO: 42754 - DNA, 7708 bp, Cannabis sativa
agcttaacccaagtctttcattttaaactaggtgccaaggcattcctttacgcctgtcatcttcttaacattgttactaatgactaagatgtcatcaatataaaggaccataaatactaccacttgattatccttgaggaagagagagtgagaaagagaaagagacaaagagagaaggaaaatgaaagggagggtattttgggtagaaattgaaaacaatagcattaaattgtataaattaattaggaatctaagtctaaattttgttagagtttgttagaggatattttaggatattttttgtatttttttaagcattaaaaatgaaatttccctttttaaaaacatgtttttactatccaaacatgctttcagtttttgttttttaaaatattagccaaacaccatttagtttttaaatgacaaaaaattatttctgttctcacttttaaaaataattttttgaaaattaaaactaaaaacacaatcaaaattttcttagatactctttttggtggcgtttaataacactttcgttttaatcttttaatcacaaaataaaagtaaaatttttatttaatttttttttttaaaaaacaaaaatgtgttctataatcacttttgtttttcaattttaaaaacaaaaaacaaaagtgtattttgtaaatatcattttcatgttcattagtcgattttatttaagtcgagtcctaagagatcgagatcgatggtgggttcaagtctagaatcggatccgggttcaatttccaaaatttaagttagggtcgaaatctaaaatattaattaaaaaaaaaaaacaactgtttaaaaaaaatttaaaatgattttttttattttttaaaatttaaatttttaattaaaaaattaaaaacataattttagaaaatagtttgtttataagaattgtttttagttaaggataaggagccaaaaggctcttcatttcaccacatattttctacttcaaatccaaaaccatggattctttattagcttataatttagaattgggaaggtaaaggtagatgcctgctgctgctactacttatgaccaatttattaatcacaacacatagcttattacatcaagtagaaaaaattgttaaatcatttcactcaaaaagataaaaaaaataataataagaagaatgtataacatacaacattaatcaaaactaatcactcattagacaagcacagacaaaacaagagccaaaattgaactccattttgtgtttgcaggtgcaccatgaatttttttcacttgtttgtttcggaaaaggcatcggcatacttttacatggatagagcggcttcatcagattccacgaggttgggcaacttgaggggctcctgtagttcttcatttagaggaaataaattgcattgtgcatgttgtgccatcaactggtccacaagtaccaaagctaccatggcctctaccattggcacagctgccacacattaccaaccaagcacaaatcataccttatgttagatcaaggttttattgaattttagagaaatttattcatgaacaaaatctgaggagatatcatagcatccataatagcagcaggtgtgacttattatgtaaagacgaaagcatttaagttaaataattttaaaatctcctgctgctattatgtatgccacaaaaaatcagtaaaattcatttttgaaaaagaaatgtattgggacgatacatcaaagttgaagtacatacctcgaggaacaacacaaggatcatggcgaccacgggtgattaaatctgtctcaattttatctctagtcactgtatgctgcttcttctggaaaatatttaaggggaaaaaaaagcaccaaaaaaaacagatttaggcaacacaactcttttagattatcaaccaactccacactcaaactacttcgcgaaaaaagaaatatcaagcagaggattattttaaactttgccactaacaataaacatatttcttaatgcagcagaacagatgtttattttgtcacagaacagagagctagaagatatcaaatatcaaactaagcaataattagtgatcatacatgttccacgtaaaaaatcatatttagaggtcggaaaatagtaagaaagacaatagcaggagaaccgagcaggcacgtgactgcaagccctttggctcttccaaatttctagacagatagctatatttttttttttttgacagagagctatatttgtttgtattaatgacacatttgtgttaatgactaaaaggcaatgcaaaaatagaaccagggtctccattagcattgctagtgccgaagaaaaaaaaaatggacagatcagacttaccccaattgtagcagttggcttgaaagcaattctcatttgtataatttctccatttgacaatcctccctattcgacaacataaagtcagtacaggtacgaacagactcaatagtaacatttcataagactacactgcatctggaaacaactgaacttgatgaatgtacctgtatcccaccagagcgatttgtccttgtcctgattctattttcttcatcaagatagaactcatcattatgttcacttccagtcaaaagagtgcctgcaaggagttgacgagcaattcagattcattcaaaatttacgtaaattattcattatttacccagcatcaaaataaagaattttgaaggcagctacaatctgaagaaccaatttaaggttgctaaagtcttacctgcaaaaccacttccaatttcaaagccctttgttgcaggtaaggacatgagagctttagcaaactcggcttcaagtttatcaaaaactggtgaaccaagcccctaattacaaaatcatttatataacacattaagctcatacttgaacgtcataaacagctatgagtaagtaaactgcctacagttcccagattagaaaatatgtaaattcaatttgcaaattgataaggggaaatggaaaatggaagaaagaagccttacacgtggacaattcttcacaacacatgtaacaacgccgccaatggaatcccctctcacccggatagtatctatggcagcaatcatcttttctgcatattcaggattagggcaccgcacgatgttgctttctatctgataatgttttatgtttggagaagttagtccatagacatctcaaacgtattccaataatatatcacataataaaaaaaatcaagagaaaatgatatatttgatcatttccttctatcaatcttatttgatcacttcctcttaagagttctaaattactttctgaaaaacaaacacaaaacttcacgatcaacattcaaaatggtaccttcataagggttgggttttaaaatattgtaacaaaaaattgcaagcatattcatttttgacacatatagctcatctcatatcaaagattgtgcatgagcatgagaggagtgaactagataactaccatcaatcttatttggccatttcctcctatcaatcttatttgatcatttcatctaaaagttctaaattattttgcgataattaaatactaaacttcacgatcagcattcaaaatggtacctgatcaagtgtcaaggcctcatgatcaaccaaccccagcggaagctcaacattgtgtacttgtgaaacataagcaaaaacctaaatatgggaaaggaatgtgatgaatatcagattgcataaatatacaaataccaacaagcaaacagaaatgcaaagttctaaatatgacagcaaaatgtctattgatataaaggactagtttggtgtacacattcaaagaattaagaaagtaaatagtaaatactttctgatatactatttacgtaagttacttcaaaagagttcttttttttttatatagaatatataaatatgattttattttgtttcattcattgatttaaggcaatatggaaacaagaacagtaatttctaaaaataaacctttaaaatattactttgatttttttatattaaaaaatcatttgcaaaatacttctccaataacatataacacttgttgggtagatgtcagtcaaacaatgtgttaaataagaaatccaagaaggttactttgcaatgaaattcaactgtagatctaaaaagcaaaacacattgcgaaaagagactattttgcataaacatcccatgccaacttttataaaattttaactaaagcccaaaacttccagcccagatgagaaacagacctcagttcctgaaaattccttgagaattttcttggcaattgctccagcagcaactcttccaattgtttctcttgccgatgacctaccaccacccttcaatcacattttaagttagataccaatgacctgtagtaagaatctgcataaatatatcactataaaatagggtacctgcacagctctaataccatacttcatatcgtaggttgcatctgcatgggagggtctataagctattgacatctcagtgtaatcctaaaagcacaaagataacaattaagtactctttgcaacatgaaacagttgaaattcttcaagtttccattcaacagtataaacattaaatgcgataggatcttcaaattagggatgggcaagatctaagccaattcaatgatatcgaacctatccaatccaattacaaaaaaaaggatatataattacaattggattggatttgaaaatacaaattggatcatttattggatggcaataccaaaatccaagtaaaaacatatcaacccaatccctaaatatatatcatttactagttattttgaatatcctgagacattttaatcattgcttttatattagctacttcaagtttttggttttattaaacttgtaagaatgataattttatatagtattgaacttaaatgaatgatttaaatggtggtgtataatttttatgtgaccttttgtatgttttcaagttaatattaaaaataaggttctaatttgaaatctagttaacaaaaaaaaaattgtatcaaatttttggcttaatatgattaaattagatgatgattttcaaaatcaaattactaattggattagattagattaagataaaaattggattgaatcgcatgcccgcccctacttcgaataactgtatagaaatggtcacttctagcaatggccacttacatgtcctctttgatcagtattgggtacaaatatatgaattggggttccagttgtttttcctgcaataaacgtcatgagcatgagtcgttgtaggtaatctagtaaaagagtttcttagctggagaaaacacaacaaaagaaaatagcagaatgacatctacatagataataccttcatacaccccagaaagtattttgcatgtgtcagtctccttcctaggagtagtaattcgactctgacctggtctcctataccataactttgattatgagcttacaaacaacttttctagcaagcttcaaactactttttatcaaaggagactaaagtaataaaagcagaagtgatgtgcgctagtgggaaatgcaatgcactagtcatattatatgtgcaattatgaataccaataaatagaaactgtgaaagagaaattgaaaatattatgtaagtcacaagttcaaacaccttctatctaggtccccttgcaaatcagcttctgagagagggcgtctaggaggcactccatcaactacgcaaccaacacctccgccatgagattctccataagttgtaacacgaaaatgagttccaaaactattcccagctgcctttacttctgtatttcgacagcaaagatattgtaattataatttcatgccaattcagttcaagtcattcagcaaagccaatggtatttactttagatgtaatcatttactttcaagtttgcaaataaagcacacaagaacacttatttttaggaagtgggcagcagctagttctagcttatattgcatctaaatcctacaaaagttggtaccataaaaaactgttcctgcaccatagagagtacgtagatatgtataacttaactgagcccgttactcataccagatcatcatttaagacaatcaacaaaggatgtcaaaaggtttaatgttcaaatgtagactctccattatgttatttcatggttctgcagatttaaactccacatattatatcagtcataggtctatgtgagaagtgtctcagcgttcttaaatactcaattgctaattaactatcaagatggtatcatagaaaggtttagcaaattgtgtaccaatgcagaaaaattctaatttttggctactttcatgttcaagtctcatcttttgtgcgtggccataagctagcaagaaagcactcgttcaactttcatgctcaaggcggttacttggttaaacatattaatcctaattactattatcttaactcagttagtaacaaaaacccaggaagtctgtcttcaactctataggtaaaaatgctgcatattgtataatcgcaatatcaaaatgcaacagtgcaagtgagagaataagcaaaagctttaacaacaatgttaaattctttcattagtctaaacaaaatgacataattgaaaattcacatccaatcaaaatttcaaaaggaatctgcatataattaactcaaacaaaagaaacccattttaagctctgcaaactgttgacaataaaaagctaacatttagctaacaaattatactgattgaaaaataacaatcacataattaaaggaaaaaaaaaaagtcttcaaatataattggtcaactcaacataaacataagcaaaacaaaagaaatcagattggggactcacggagcttctttgaggtagatgaagcagtggggaactgaagagaaggagacaaagaaaggcttcgaagatcagaggaaagagatcccaaagcagagaatccttccatacgcgaagcgcccaaaaaggggttcgatgagagagacgacgccattattgaggttgggtgttacagcaaaatttgaagatgaaaatgagaaagaagaagttggtgggcgcagtggttggtcaagactctgactcaaagcgattagcatatatataaaggaggcaagcactcacctaccccaaacgcacccctcctctccttctcctccaacttgaactttttttttttttttgacccttttattttattattttcatttggtgtttggtgggtttggttttttttttttttttgtggttatgttttggcatttggtaggtaggtactaaggaaaaaaaaaaaaaaaaaaagggggggctgctgaatttggacttgatatttcttataaaattgactttgccgccatatcaataatggttggagtttgcagctaaatacaatattaatgtaaataaaatggtgaactgactgtattatttaatttacttgacaattaaaaattaaccaaagtcagtcttgtcttttgacatgttttgaaagtatactttgtttttttgcttctgtattttgggttgactatcatggcttcgagtagtcatcaaggtggcgattggatggatcaatatgctcatttggatatcgaaggcgaagaagagggtgttctgattgctgaggatcagtccgaaggggttcaagcttttgatgatcgttggtgtttggttggtaaattccttaccaatcggacatt

SEQ ID NO: 42755 - DNA, 2009 bp, Cannabis sativa
cacaaaaaattaattgtaattcggtgagcaaaaaaatactacttataatcaagccgtcaaaaattagtgaataaaaaaataattatatgttaaaaaatttcacgtacgtaattaccatacaatcccaaattatatcttcttcctatttccttggcaaatacatgaatcttgagattatatatattcttgtactattcattgtcgttctttcttttggtcaaaactatacattgtcgttttgattttgacagaacaaaataatgataatattttggaataatattgagatatattccccatttaataagtacatgtacatttatccacatttattctttttaaattacttaaacaccaagttaattatgataatttacccatgtgtatcttttttaagacatatttgatattcttcatcttaattaagcaatttgtgaacatgaggattcaaaacaaaataaataaataaataataaaaaagtaacaacattttgtttcaatacacatgttttctttaaatacccaattgatctttattttttttaataattataaacaaacccctttattttgtaaattagtaaagtacactaccggaggacaaaatgtagaattaattattgaattaaaaatttaagcatgaggttaaattaattataaagaaatgctaaaagatattaatagtgtctacgtaatattactattagtgtaattaagtatttaactccatattttagtataattacttagaaattttatagatctccttaaaggatcgttctgttagactccttatctgtttcggcatctaaaaaaattagtttgtttttttatgatcgtgtaagttgtaactatttaggattacatacatgtaaattttttgaaaaaaaaaaatgaataatttacagtgccaaaaattaagtttatacaattacttaccatgtgtataagaaaaaatatgtagttgttatgcaataaaatttgtatatattttttttgccattataactattcaattttttttaaaaaaaaattacaaataatcataaatgattattacgtatacgattataagaaaaaaattaagtaaaaaactcttctacatgctgaaacagatagaaaatctactgaaacacctatttagaaaatatatttaaccaatcaaaaagtatcatatttaagtaatgctagtgtctaattataatacttattaattattatatattatgcatggctatatatataaatatacataggttggagtgtgtagtagtatagtatagtagtaaattaatgttgtttattttattttattttaggtatgtcacatgcatgatgttctatacattattctgtaaattaattataataataataataagttggtttggttttacagcattgaataaattaaaattatttagtagtagacaaaaatagtaggccaattcttaattctcaccactcaatctctaccacttatctataactgtaataaatgatttttttgacttctttctcatcctttctctttctatgttttttttttctttcaaaatttttatacttggttaggtaaaaattaatgtttatcttaatgttttgttttattttatttttttcaatttttttagttaggcttagtcaatattgtgtatgtcatttgttgtacttgttgcactatatatgaattaaccaaattcaatttaggagtactagatgaatgaacaaatgtagtaacaaacatttatatatatatatatatatgtttttatatttgtagattttgaattatacaactgagattcgatttcatgactctaattcctcacacacgcactttctaataatctttatagccatttgagcggttacttttttagggtaaagtattcgaacacaaactatagaacgaattcggtacatatttttgtgtgtaatacaaggtcgtctcaagtttttatagaatatttgatacaaatttttaaaaataaagtttaattttaaaa

SEQ ID NO: 42756 - DNA, 2712 bp, Cannabis sativa
ctcttatcttcttcatctactagccaatacttaaatactcaactctgctttcagcaaaaaacagtatacgaacgaacagctttaataaaagttatagagtagaatatatatatctctgtcttagaatgaaaatcgtatatatggaatggaagcaattataaaaatgcgaatattatactaaagcaaaacatcacaactactacttaagagatcgaagtgaccatcgccaatctttttaatcaatatttttagctcagaaagaatcaatccagctggtggatcgatcatcatgaagctggacatgtatatcctgcaactttcatcagataatctttttatttttcttcttaattatatataattatattaatataaatggcagcatatatatatatatatatataataaaacgtcgaccatagagtacattttgttaggcataaaaatccccatatctagactttgcatgcgccgtgacgcatcaacataaagatctcaccagaatttattaaaattgtatgtatatatatatgcacatatttatgtttgagtaaattgatttgaaggaaaggttgtttctaatgaagctagctcattttgtggcaataatagctaggtcaaccacaaaaaaaatttacacatttctttttttttttttaatttccaattcgtgtcttcattgacactctaaaatgtgcttttctctcttttttttttttctcagcaactttctcaaaaattaacctttttttgtgagaggccgaccaaagtgattctaattccattctctccactctttcctgctaattcagatgccatctgcactactatattaattcttatctatggtcaaactctctttatgcatttgccaagagtaaagggtataatcgtcatttttctacaccgattctcatatacattacatatatatcaaccaaaatattcaaaataatacaaaacaatattcttgaaaggggtatctgattttttaacaaattataattatactcaagaaaattcggttttattatttcttggcatcaataatgtttcatttattacaaaatcaaatatatgtatatatattcttgtagtactatatatgcacattattttaacttttccttagctacaggcttctataatatagctagaatatcgtagcatatcatttcatgttaacctctcgtgcatatataaaatatatgtcagtagtcaactaacattattattcgatatatatatcgtatgatatatattattaatgcatatgattttctttcacttgttctgttatgtacttcttggccatgttgaattctttcttttggattatattcctcttatatatcgttcaaaaggagagatcaactatacttagaaaaagcttagcatgatagagaactttatgtattaagataagcatgaagaatatttatatatataagatgagcaatcatctacaaataatcaagttctcttggatgccaaagaaaacgaatctatcctaagtgaattagggaatttagtagaacaatccattttctctctacaaaaagttgtattttatatttttttccagttcatgtgattctctcattgacaaaccttacagcccgtaaatgtacccatcattggctttccgcaaagcatgagaatatgtcatataatgcaacatatataaaaaaagctaattaatttcacttctctttcttaatcacaaagaataaatattacttaatatatctctacaccaattaaaaataagttgaagggataactttgcattaaccatgcatttttcttttttgatatattcggtaagcataatcatcaaagcaaacgatatacaaagaagatgagaatcttacttttacaaccctcgtttaaaatgttaaagtacttcttgttagatgcacacacataataaatatatgtatagttgtaacatatatatatatatataaattaagtaggaacttttcaacaatatatatcttatatagtgatgagaccaccagagtatatatatgaagtatatttgtacatatatgcatccaagctgagaatggatccatgaaaaagtacttgatatttattttcaaaaatcactatttaggccaacttagatctagctatttttcattaatagcaataagaaaagaccaaaataatagcctgaaaattaatgtctgtttggatagatatatataccatgaacttaattatatatatgtactatgaactctgtggttaggttcccttttaaatgaattattatttattgtagtaaggacgtaatagaataaggttcttgtcactagccccaaagagggtatcttatcagcaatattggagtatagcattttcttattaaagaggctatatatagtacggacgtgaccgcatggtttaattgtgcctttagcataccactatatctatatataccatatttcataaaaaaaatacatatacatatacatagggccgaccctgaaaatatatgggctcaagacgaattaaattttggggccctcaaaaatacataaaaaaaatatatatttcataaaaaaatacatatacatatactgatatacatatgtgggagctaatacaataagtattgtaatttttacctattgataggtataatgatttataaccattaatttaatcaaatgacttaaattaactcttggaaactac

SEQ ID NO: 42757 - DNA, 3485 bp, Cannabis sativa
  modified_base (605)..(614): a, c, t, g, unknown or other
aaaaaaaaaaaaaaaaataggtagcatcgagccaccatcggacccccatcagaccaccatcactataaatgggaatatggagtatggatggtgaagttagaagaaaaaagaagagaaaaaagtataatgggtataaatataaagtgctaatttttttttaattttagtaagcttgtatttaaaaatttaatatacaccaaatatatacatataaagtcaaacaaatctacttatattattgatatatatatatatatatattatataatataattaatattaatatgtaaatggttttgttggatgtgattaaggaaaaacactaaaatataggagtatcacagttggttctttctatttttacgtaactgagggaggttcatgcagtgtctacctatctaatctaggcaaccatatttctcatttccaaaccactcttttttttcacaccaatacacacacaccaccctttaacatcctctaattttataactatatttcacataaaaacaaacaaaaaacatttatgaacatatatcattatgaatatgacaccccccattgcttttgttttccccagaaacttataataataataataatannnnnnnnnntaataataataataataatcttgtgggattcattaaatcaatgtttttgaaaaaggttttatttggaaacaccttatttgatatctgctgctaaaggcttcattaatgttttgaagctttttttcttcttcaaaataatgatgatgaatcaaattgaatagaaacaattcgttcaatttggctctgtttcttcatattgggattttttttttcagatattctaatatatattattacgaaatgggaaggttccccctctttgcactattcaaggaagcaaagtaagtaatataaatctatatattatacaactttgagattacattttgctattgtttttttgttgaacattgtaactaatatatgcagatttagataaatagtgtcatgccgcgtctctaattcatgttcaacgtttagtcagaaaaattacttgtgaattagttgtgtatatatttagggtggataataaatgcgtaatggatgatttttcatcttttcttataaatttattaaactccaattattataataaatatttaatgttaaaagaaaaaaaaaaggattaattagtctcagacgttgttcatgaatcaactgtgcatgcactagggtatatagtaaataaacttgatagatgatttgtcaattaaactctaattatttgattagttttagataactcaagattttgtaaccttcctctttaaaagtttaattagataattaatgagtactttcttaatagtttgtaatgattataaattttatgaattgggattgacaggaatgtttttacaaaggatgaactaaaccttgaaatagcacatattgctcttccctcagctctggccttaacagcagatcctattgcttccctaatagacacagctttcataggccatataggtttgtattaattaatctaactacttgcatttgtattaaccaagttgtaatgatcatatatatacatgacataatattaattatatatataggtcctgttgagctagctgcagtaggaatatcaatagctatattcaaccaagcatcaaaaatagccattttccctcttgttagtatcacaacatcttttgttgctgaagaagaagccgcagccgaaaaatcgctagatgacattgaaatgcagctaaaagaagaactcaaaaaggatttatctcttaaaaacaatggacatgaaatggaagaacttgtatctctagtaggtaacactttccctttatgaagcgttttaattaccaattggtgatcagtagagtaactcgtgttccttataatatttctcttttgttcataaaaactagactcagcttccacatcttcatctataacaagtgatgaatcagaaataatgatgcttcaacatgtcaaaaggcatatcccatcagcttcatcggctatggttatcggtagcattctcgggttaatccaagctttgttccttattttagcagctaaaagaatactgatttacatgggtgttgattctgtatgtgcttcaaacttttggtcagttaattttgtaatgaagatatgtaatgtttttcattttgcattaataattgcattagtgacttgtttattttaatggacagaattcaccaatgcaaaaaccagcaatacaatatttgagtttgagatcattgggtgccccagctgttcttctctctttagctatacaaggagtttttcgtggattgaaagatactaagacacctctttatgctacaagtaatctaacttttctttcttattcctttcattgaagtattaaacttcactttgaaattgctctcatttaaaatcccataaaaatgcttactttagtctcttataggcctgtttgactaggcttctgtttttagcttcttactaaaactgacttctgttaaaagaacttcttaaagcgaaaagctgaatagaagggccatagcactttttcttgtgacaaaaatggttttttttttcattgaatttgacattagttaatacttacttacataattttaatgtattttctttattgcagtgattggagatgcaacaaacatcattttagacccaatattcatcttcttattaaaatggggtattagtggtgcagctattgcccatgttatttcacagtaagcttaatcttttcttgtttatgataatgatcattttttctagtcattttctcctttaaacattactttgtattgatcatattttaggtatttaatctctctaatactcttgtggagattgatgaaaatagtcaatcttgtaccaccaaggatagaagacatacaatttagcagatttctcaagaatggtaaggccatatcattgcatattccttttaatcacaactttagtcctagaaagttttgtcatagctaccatattatcttccttttttggtgtacaattcaggatctttcttactagtgagagttattgctgcaacactatgtgtgaccctggcagcgtcgttggctgcgaggcatggctcgacgacaatggctgcattccaagtctgcttacaggtttggatggctacttctttggtagccgatggcttggccgtggccggacaagtaagtccttaaacatttctagtgtcctaaacaaactgaagaaaactcacaatccttaaagaaaaattacaccaacaagttcccattatttaaaattttcaggcaattcttgcaagtgcctttgctatggaggactacagcagagtcactgccactgtttctcgtgtacttcaggtaaaaattaaagtgacgtttagttaggagaaatgaaaacataggaataagaatgtgaatgagaatagaaataggaatagaataaaattta

SEQ ID NO: 42758 - DNA, 3354 bp, Cannabis sativa
aacaatattaacacgtaagaaagtactagatactactggttctctttaacatttctctttattttatgtgtataaaaaaaaaagaaatgcatatcactaggtgccgaatatttattagtataatttaatattaagttttatattttttgatttaataaagactaattatgatttttatctataaaaatttatgtatcaaattatgtcttatgaattttttagaatgttaaaatttttcttaaattattaagattgttaaatttaaagaattccgactaatattcaatcttattaatgtgtcaatgtccatatattaaattgtgtcttccgtttcagcaaaaaaagaaaattgtgtcttccgaacttgatatgtactaaataatgttttttgaactttaacttatattaaattgtgtcttctaaatttttatccacgtcaaaattagtaaataaaattaaacttaattttaaatttaataattttaatagttgaataaataaaaattttaattaatatttaataaataatataaaaaattactaaccaatacttgctacaacttggtaccaaaagaaaaaaggagaaggaatatgctcttatcttcttcaaagttaggatttttattaatttttccttttaaccgaaggtaccagaagtgtttccccaccaaagtcactttcatgattttgacataaatttgagaaaaaaaaaaaaacacttcaatggaaaagtcatcactttgattcactgagctcttgatatttttttctttggtgaaaaaaaaagtctgatttctacctcatcaaagagagagatgatctaataaggttgctaaaagataaatctttttacatgggtcttattttggttggtagttagcttaaatgggtgttttgttatcttctttgaatcatcagttttcattttcaacttcaattggctgatttgtctgattatattctctttcttttggtatttatctataatctaatttctgggtctttaaggataatgttctttaatgattttattgttctgggtttgactcagatccatggcacatagtcacatgagtgtttgatctatctgtattcttatttgggtgcagttgtggtggagctttctttctttgatggattaatggtggggtttaagttggtaaagctttaaattgaaaaaagtttagatcttgtatttccagtgtttgagaatatgatttagagaagatttcaaggtgttttaggaattgggtttattatgcaatatggatagtaatagtaacaagaacaagactatagtttggttcagaagggacctaaggattgaggataatcctgctttggctgctgctgctagggaaggtagtgtttttcctgtgtttatatggtgtcctaaagaggaaggacagttctatccaggtcgagtttcgaggtggtggctgaaacaatctcttgcccatttgaataagtctctgatctcacttggggctgagcttgttcttattaaaacatcaagtactttggatgctctcttggagtgtatcaatgccgttggagctactaaagtggtgtttaaccatctttatggtaagttattgactttgttaaattgaattatgtattgctagttcatatgttcaatgtcattttgaagcttttggctagttcatcaaattgagatcttttcagaattcttagatgggattattgctctatctaacccaataaacttattgctttcctttactcagatcccgtttctcttgttcgtgatcataacatcaaagaaaaactggtagagttaggcatttctgtgcagagctacaatggagatttgttgtttgagccatgggaagtgtatgatgatagtggaaatgcatttactacctttgaggcatattgggagaagtgtttacaaatgccacttgaacctgtttcgattcttcctccatggaaattgctaccagcttcaggtatatttcaaagcttataatacaacaaatactcattttttaatgcttaatttttcaagaaataaacagatgtgaagtaagaacagatgagacaatagtttgtgttatcattgacaggaacaatgacaaagttttcgatcaacgaattgggtctagaggacgattcagaaaaatctagcaatgcccttctaggaagagcttggtcaccagggtggagcaatgctgataaggctctaaatgaatttattgaggagaatcttcttgactattcaaacaataggttaagtgttggaggtaacaacacatcactgttgtctccataccttcatttcggggaattaagtgtgagaaaagttttccaatatgcaagaatgaagcagatactatggactaatgaagggaactcggttggcgaacagagtgtaacttcattcatcagggctatcggtttaagagaatactcacgttatctttgttttaattttccttttacacacgaaagatcacttctggataacttgaaatatttcccatggcaacctaacgctgctcattttaaggcatggagacaaggccgaactggctaccctttggttgatgctggaatgagagagctttgggcaactgggtggatgcacaacaggattagagtgattgtgtcgtgtttcgctgtgaaagttttgcttattccttggagatggggtatgaagtacttctgggacacacttttggatgcagacttggaaagtgatattcttggttggcagtatatatcagggagtataccggatggccatgaactcgaacgtttggattgtccagaggtttgcttttctgtttcccttatatatcactacatgaacatgagatttttacacataattgaaatatttgttttatggatgtgtcttctatttgttttgctcatcatgaaacaacttttgcatagctgtgtctaagattcatcatagtttggagggtcaatcttccatactactcatttcagtatgtgggattttctgtagagctgaatcatttcattgtggttcagattatgtcatatgttgtacttttgatagcatataagattattttgtttttaactctgaggttgaaatacagagtatgaatcttgatagaatattcgggtgttcggtaataaaaatttaaccctttatttattatatttttctaggcatcttgctcaatagctttgtttggatagttctttacaaaatgacattgcagacttactcaacaccatgttaattttttttggcataatcttgtcaaaaacatattctttgagggctattttgcatagtgacattaaaaaattatctagagttatatttggtatgcttcaaggaagcgaaattcg

SEQ ID NO: 42759 - DNA, 3291 bp, Cannabis sativa
ctttactaaacaaaagaatagaaattccattccattctattcctattcttattaccattcccattcctattccatttttattttgtaaccaaacgccacctaatgaattaagcaattaaaatcaaaataatttgtttatggattcggaatccagataagcagcattcccattaaacgacctctttacgttattttggaattttggaatgagaataaattattttaagttacaaaaatatttcttattgatattttatatggattttatttttttaattttaaaagaagcttaaaataaaatttcataattttaaaaagaatgggagtagagtggatcagcacatatttcattctctattcaaaaaaaaaacacatatttcattctcattagtacaggagataataaattctatttcgtattacttattcccaattcctaatctttgtctaactatttagacatgtaaagcaataagagacttaaaaaatttcccactaaaactatttcttataaatacaaaatacaaaccaccttgtaatgtacttgtgcagcaaattttttttttttaaaaaaaaagggttataatggtcagtaaaataaaaccaaaataaagggattggataattaggtagatactattttttaaaaaaataataataataaaatgtttataaaaaaaatgagaaagctaatagattgctttggtttccaatcaatatttttgaagcaaaaactaaaagactattccaaaatcactcatctctaagtgtaattaagtttgtgattgtccatattaatagtttcaacaaaaataaaataagtgatcaatggtgaatggtgatgaaaatttagacttattctctcacattaattcgtttcttctatctttggttgccctctaaatcatcatattgcattacctagaagaaaaaaaaaatcaattgagacaaaccattaaatagactaatctgacttacttttgtttctatgcaacaaaatcaagaacaataacaaataaattaaaattaataaaataaataagaagaagaagttaattatgaataataccctttgacaaactgggcaaagattgcttctttcctgccattcatatatacacgagagatgaaaatgatgacgacattttgtcataatttttggattatcaactgtgtattctgtcaaaacaaaaatcaaatgtttagtaaccgaaacaaatacacacactacaaatgtttaataagattttcaaaaatttgtgtttttttaactatattatacgctatcatataagaaaaaattataatgtaactcatcgataataattaaaaacactcgaagatataatatttttaccgtcaagacaagtaggacattcttctttttcttcttcttgtacattcgaaattcgggtttttacaattacttgagttttgggcttaatctcttctctagaagcttgttggccattagtattaacattagtagtacatctattggaaacctgtgattaattcattatcaatatctttaatcatcataaatataatataaaataaaatcatataattaaattcacatactttagggacaaaacttttttcattgttagtatttgatgaaccaaagcaacatagcgatgcacccatgataaatctctgcttttaatcacccacttaatctgcacatttaaactaattaattacgtgagtttgttaacatttaaatatatataattttgatgaattagaagaaaagtattaatattttgaaaactaacaaaaaaaaaaaagaataaaattattctctctaaacttacaattaattaagctgatgaagaaaaaaagaagaagaaagaattataattcatcattacatatatagcaattaattactcgagaatatatagattttaattaggattagtttccgtaaagataaattcaatttttaaaaaagatatacctttgaaaaaattaaaaaaagatttgacactctaaagtatacatatattttattatatttattattattaattaattaagtgaaatttttttaatttggaactaatatcatttgaattccaaatttcgtttttttttttccgaatttaaagaatttgtagagagattattaattgtaataataggaacaacaaagttttttgataaacaaattcaattcattatatatatatatttatacttactgaaagattaaatattattattattattattatttaatatacatgtggaatgaaaaatggactgttatatagatacaaaggaaagtgtgtaccttcaattattattaatgttgataatttgaatcttgctaagtttagatctgcaaaataaaacaggaatcttaatcaaagatagaaattgagtaacaatataatgagtaagagtaactaaataaaatcaatttagtaactaaaataatagttccattacttaaaatattgtgtaaatcaacaagtgttgactttatacaaaatcaattaaaattaagatttgacaaaatattgacgatataatatatgaaatatattttttagatagaaataaaaaataatattccccaaatttcacgctcaagtcgtttctatcttggtgaaaggttttaaatttaattttttctgttaggctgatatttttggagttttttttatttattttttttttaaaataaaatcacatataattaaaattacattgtataatttctctcaaaaaattacattatataatttgttaggaaaaaaattaaagagtttgatattatgttttttgttttagattgaggagtatgatggtaaagctcttttgttgaatggaatgtaattgttatgtatgcaatgtactaagaaaaaattcacagcaactatgaaatcaaattaaaaaacacaaaaaaaaattaagttaagagagtcatacattttttttttatatatatataattatatttatgtatataaacaaaaatcttagatatatatagagagaaagaaaaaagaaaaaagaaaaacctgtggtaatgttaatgtgatcgatcgacagtggaagtaagaggtgagtaagaccaaatgtgatgtgagacccagaagatagatttgagacacactggtttttaactatatatgtttaccaactcttatttgggctttgttcataaaaaaaaattacaaatatacaatttgtattttttaatatttttacgggtttttaaattttatttaggaatcttttaatatttttaggtttgttttcttttgtttttataga

SEQ ID NO: 42760 - DNA, 2342 bp, Cannabis sativa
cttcaaatttcttatattgattgctaatcagattgtaaagagttttatttacgccataaaacccaacagttggttcacagaaccatcatctcgcttaaaatattaaaaacaaaaggccgagttggttcaaagaactattatgtcccttaaaataaaatattaaaagcaaaaggtctagtggattcatacaaccatcatctccaacaaaataaaatgtgaaaagtaaaaggccaagtcgtttcatattaccatcatgtcccataaaataaaataaggaaaaggtcaagtcggttcaagaaccatcatctcccttaaaatatcaaaggcaaaaggttgagttggtttagaaaaccctcatctccattacaatattaaaagaaaagagtaaatggatacgactctgagagggacatctctctaaaaagagtacccattatctagcattcaaaatgtgctctaagtgtcatggatgcaatgtaagggatctagcgttgccaagaggccacaagctcccacaataaaattgttaaatcttaaaaaaggttgagcattgccaatgggcccacaagctcccttatatcttctaagtaaccgataagaggttgagactgttcaaagagtctatattccctatataataaggctaaaccataaaagtggttgagaaagcccatgtggcaaaaggctccctcaaaaaaataatgacaactcatagaagatgttgagaaagttcaatgagctatcaatccatcattgtgataagtacccacaaaaaaaagttgcaagggctcattaaatgaaccaagggaataagtgatggagacaaagctcaccaaacatagtctacaagaacccttggaataattctcgtagactatggggcaagtgttgacccaaaaaatttactaagcataaattttggagaccgtgtgatgaaatgaaggaaagatctcaaaatgtaattaagtaagacgtatgggcaagataatgggaggccaaataccaaggtgagatgctacataagaggaagagctggcaccaagaggggctaaggcacgagttgagctccccgctccccctctctctccctttgttccccgttcttccaagggagctccccgttccctctctcaccttttgtgccctagacttctaagggagctcctcgctccctctctctctctcacaattttctccccattcttctaagggagctcccttctcctttcactttttgctccctggacttccaagggagctctctgctctttctctcaccatttgctcccctttcttccaagggagctacaactctctctcattgtttgctccattttcttcaatggaagatccctgatccctctctcaccttttgctccttggacttccaaggcagcttctcacctctgctctcacctttttctccctactcgtccaagggagctccccacacccatcacaccgcacatgcaccaagcgagctccctactcccttggtctctcttcaagctcatttgctacttctttctccctatacttagccaaattattaagtgttgctccctcattataggtatatatggtgatcgaaagaataataaagagaagtatgtccaagggcgagtccgttaaagctagtacccctccgataaatcctcaaaagaagaggtggttgtacaatagatacgacaagtaaaagtagtggagacactttttgtctcactctaggtacaagctgacatccaactaacactcctccactacccatctgacacgctgaccctcatggtacaaaaagaagtttgtccctcaacttttgggaccacttatattttggatccattagagatccctataaatatatctctcttccattgaagaaggggttggaaaataatcatttataaaagagtttagagattcaatacaacaccatttgctagtaccttggcatggtctgagctttctgtaggggactggtatgcaaaagttcaatttttcaatcaagggataccttgattacacacctagtaatcttgtgctcacgcagtacacaggtagttggacccttgcttcttcttgcactaaggcagaacatatggcatgattagacactgccaaataaagttacagatcttccccttccactaacttcgataagataggagctttggtgaaatgctcctttagtttttggaaggcctctttatatttctcagtccattcaaacttctttattataaagctcattatttaaaataatgtatttttaattaatcatttattttaatctatatattttattaatgaaaaaataattaatttatgttgatccaaaatta

SEQ ID NO: 42761 - DNA, 5213 bp, Cannabis sativa
taccttatactttccattccttattatatcgaaacgacgtcgttatttgatgggctattgccttgacagagaaaggccacattggcaacgcaataattaatattaattaattaaataataataattaaaaaaaagaaataaaattataaaaaaggaaaaaggaatagatatggtgatgggttatgaaaccgtggcttcctggtcccctttgtccctttcgtcaacacctcctcaatcaggtttctcaattcttctctctcccccttctcaaacacctcaccaccgtgcttttctacagaaaaaccatgacaagctcctctgccacttctcgaaaggttgctccttttcttacttcatctatttacaaacgctgcaataaaaatctcatctttttctaattgatttttgtgatggtttctatgatgtttttgtttgatttacgatatgggtttttgttgaattaaggctttgagtaagattgcatgcagtcggctccagaaggagttgttggagtggcaggtcaatcctcccgctggtttcaaacacaaagtcaccgataatcttcaaaggtttattttttctttttctctttagggctttgtgcttttaccctttccctttggtaaaaagaagcaaaaaaatttaaatctttacactttaaggtgtgttttttgcctttctcttcaaatatttttatcaattcgattaaatggaaacttgttatgctagtggtgttatttgttcagtttcttttcactattttttgttcaaccaaattatcttttgtggggtttgagtttttgtttttgattgcttttctgatcatgtatttctattgggttggtgtgtcttctctttgatcaaaaggtgggtgattgaagtcaatggagctccaggaaccctttattcaaatgagacttaccagcttcaagttgattttcctgagcattatccaatggaagcccctcaggtttgtcactgtctttgatcttttggcaatttgtacctattgggtagaattagatcattcttttgtttctatctatgcatatgttgttggtgaatgttgtctttgttttatttctgttgttggggtgaacaggttatttttttgcatccggctccccttcatcctcatatatacagcaatggtcatatttgtttgggtaaatttatttcagcttctcttctagttactgaaattattcatttattgtcttttcttttagttaaattatctgtgtaccatttcactttatatgtagtcacatagttgaaagttgcttttcttctgcattgtttacattcattcatttgttcaaaagtacttgtcttgttctcagtttggttttcatattcatcatgaaatcacagttttccctatattttctagtggtttggtttttaatgtttgtattgtttgtacattgctgcaccaaatagaatgttttccgtgcttcttttgatcttagctgcactgacagatttattttgtgggtgaaatattttttgagtcttaggctgggaaccttgatttgtagttggcaattctggccacactgggtcttataattggctagctagatataaaaattgtatgaaatattttctctttcagttcaataaggaactttttgagttgggacctttcaacgaagttgaattgaaactcttctaacccaacttttctcctcgcttctgtcatatgttttacctgaattcagctattgattttatttatgtacattttggaaatttgtagatattctgtatgattcatggtcaccagccatgactgttagttccatctgtattagcattctttcaatgctatcaagctcaactgcaaaggtatgcatttcatttcaattaagtttcggtgtgtttttggcataagcgatgacataatttttggcctaacggtgggcatgtctctaatgtcttctttaacatgcgagtttctcatcgggtagagtgtaacagggtaatgtatgttctaatctttctgactatttcgacattatgcttgcagcaacgccctgaagataacgaccgctatgtaaagaactgtagaaatggacgatccccgaaagagacgaggtggtggtttcatgatgataaagtatgatagacttgacattgttcaacaagttatatagggtagtttgcttttctttttctgaaggaatgtgaacacaagcaaaagtaaaagaaaaaaaatatattattatcattctgaacagctgggcttaagtcccgaattcgcaatgacttgtgtaaattggcaatctctgcctggtaacatgtaaaggaagaggaacaagaatttgtgcttcaagctcttttgtttttttaaggatgaattctaggtgagagatacttgccatataagctcataaattacattccatgatccttgttttctattgtagtacttgtagatggttaaccatctctttggtaagtatgttgctatgttttgtggtcttaatgggtagcaaatggattcctcatttcatgtgttgtttctctttttattgtggttaccatttattttgttgctgttaaatttgtgtttaagaaaaaaacacaaaagcttttagtacttatatgcaggctgcttattttgaaaccctgctccattttctagttctacacaacttgaacttttgtaccatttgcaattgaaaaaatggagtgaaattataaaattcggatggcaaaatggagctctacgggtcgctatccgggtcttcgccccaggccggggcattgaataatgccggaattcactcactaccttaccttctttgccaatttaaaaatacatgtgttctttgaaagtataagagtaatatattggattcaaaagtttatttggtatttactattaatcaaaggaatgaaaacaactgagtatattgtgtttgtcagccaatataacatattacccggttaaagaagttggtgaatgggttaaaaatttaaaatatttatacaattgttgaatttaagtaaagagaaaacattgaacatgagtttattctatgagactgaaaattgccaagaaaagaaagcgagtcaaacactcaactatgatgtcaaagttctcaacatgactcttctagccctcttactcatctaatccaacaacctcttaattttttattatgcaacattcaattcaccattacagaatttaaaatagcagaccattaatcaatctctctctctctctctctctctctctctctctctaagttcaaggaggaacatgaatgaggtaaatcaccaaagaatcaagagcaatgggatatggatacatgtagcagagcaaggaacaggtccccttgttatccttcttcatggcttcccagaaaactggtacagttggcgccatcagatcaacttcttggctaaccatggttaccatgtagtggcaccagacatgagaggctatggagactctgactctcctctcaccccatcttcatacacaacttttcatttagctggtgacatcataggcctcatggaccattttcaccaagaaaaggttcttaaacaatacacaacacattataaaaatctgatctttttgatgtgtttcttcttatctgattataaagctttgatttttattttcttcttaaaggcatatttagttggaatagattggggagcttatgcagggtggcatgtgagtctttttaggcctgatagagtaatgggttttgtagctttaagtattccatatcgaccaagatcttcaacaatcaaagatactgaattacttagaaaatctattggagatggctgtcatattattcagtttcaggtaccctttttctttttcaaaaagttgactttcttggattggtagttaggtagttggttagttggttggactatgaaactctctgttactgaattttgatttttgagttactaggaaccagggagagcagaaagagcctttgcaaggtatgattacttgacagtgatgaagaaattctttacaataacagaagatgattttgtagctcctccagatactgagataattgattatttgaggacaccttggtctttgccgccatggataaccgaagaagatcttcaagtctttgctgagaagtttgaggagtctggttttactggtcctcttaactactaccgtgccatggatttgtaagtttgccttatctatatatcaaagttttgaacatttttaagaaattagactttttagtttataaaggttgaaactttatcattgaaaaagctaatcaattatccatcaaaaaaaaaaaaaaacaaaaaaaaagaagaaaaagctaatcaattattggaaaaactatagtacacttggtcgttttggtatctctttcagcattttggagaattttttagtcatttttctttgttgtaatttttcaagactgagttttcaaaaaatttagaatgttgaaataaattcaaataattactaatcgttcctacgagaaaatataagtatgtaataaaatatttaaattcaaataaattcaaaaaaatttatttttgaaacataaattattcggaattttctgaaatagtcaggagacctgttttaaatctagtacttacatatcaatattattggttaaagaagaaagagctaatcaattattgattgagtgaacatagtcaacaaagttattgattttgttaagtaaaaataataaaaaaaacaggaattgggagcttcttgcaccatggcaaggatcaataatcagagttccaacaaagttcatagctggtgacaaagatattggttttgagagttatcgtactaaggaatatgttctaggagaagcttttaagagttatgttccagatattgaagtggttattatagaagatgggcaccattttattcagcaagagaaacctcaacaagtcaacaatgagatactttctttccttcaaaaacattcagttggttaagttaagcaagaatttaattatgttgtatcattatcatattttgatgtactttgaaatatctctagtttgcaatgctaaaaactggtgttcatgaactttactttctaagggagtgacactcatattttcagctgttggataaattcccatactattgtcccataaataaagttacaaggaaaataaattagatctatttacaaagcctcaacagaccattataa

SEQ ID NO: 42762 - DNA, 1442 bp, Cannabis sativa
gtgttttagttttataacatggtatgactattttccatgattatttttagctgtttcaagtgaccatttaaaggtgaaaataatttttaagaaaaaataattgcaatttttaaaacaaaacagtgtggggagaccaatggtgtgtttcactttccaatccttgatgtaattttaccctactgatttctcttcagtaatgagttttgtattgttcatgctctctaattttaacaaattcatggttaatggtggtatgtcttgaatggtcattggaagttatgaagttatgctgtatcaggtgggatgcatcttgtctgaaggttcagatgttgatatggtgaacctgaaagctattgcgaggaatgcaattgggagaggagtccaggttgcttacttgtattccaccccgccccacttttatttccacttgttatttcattttatttatctaattgataaaactagagcccaacttatcagaaggggtggaataaaatcaaaatcacatactagctgcagaaatcctacagtaatttaaaaaattaaagttggttaatgtggtcttatagaaatgaagcaagtaatgagccacgataagataataattttgtcccagatttatttctcattcacattattttctggcttcctgcagtttattgtcatggggaatggtaatatgccagataccagcagggggcttgaatctcttgaagatgagcttaaggtacgaaatgctatcatttttctttcttttttggggggtagagggtataagaaattgagaaagaataaaagaaaaatgataattaaaacattagaaaacactgagtttttatttacttaattttgatgtcttggaatattttataaaacgtttatttaaaattctattgaatatacgttttatgaataacagataccattggcagtatcctttattgattgcaaatagactaatatctcagtcaccaattctttccattagaactgttaaagtctcttatattactaaaaattgctggttttctttcctttttggtactaaaagtattcatatattcttaatatctgcaggataaagatttaggcgttgttctcagatatgatgaagaattgtcacatttaatctttgcagggtctgatattatcctgtgccagtcttttcatgatcctatttttcaagctccggtttgcctctcttcccttgttattgtttttcatttttcattttctccagaagtgcctggaggctggaagtcaatgatattttgaaaccaaaattaactcagtgccactcaattcatttactaaatgaaattatacacttcctcggatcattatgcatttttaataggttttatacagcgctgagtgcattcttaaatgcattctcgtagaactcttcttgcactaatctgaggtttaaaatccaaattcat

SEQ ID NO: 42763 - DNA, 5748 bp, Cannabis sativa
tgtggaaataaattgtaatatataagatgaatgggctactcctcccattgccaattggttttgagatacaacctcattcatcttattcccacattttaacatatagtattcataattagcctatatgacgttattatattttcaatgaatttgtttattatttaaaaaaaaaaagaaaaaaaaaaacttatactggtactaaaaaagtgtcaatagtgttaagaagtttttcttttacatcaattattttaaatcactactaatgcttatatatgtcatatcatgaattgcaataagatagtgatagtacattaaaaagtaacaacaaagtctgatgaacccatgtccagtccacatggaaaaagacatagattcgccaaaatcaaaactattgcaataagatgaaaaacaaaatctacaggaataaaaagctacacatcatttttttttttagaaaaagatatacatgtattatgggatttggataattaatattagtggattaatatagttgtatttgtatgtattgttggttttgttagactttggaaattgagaaagacaaccacacatgacacagcagagacttaatttggactagttgactgctcataagaagatctctggttagttgaaaatatttatatatatatattttcatttcaataatatcttcaacatttatgaaatcaccaatgtaagttatgaaattctgtttttggttcaaattttgagttttggattgttgacttgagccttaaacttaataggattataaggtttaaagagttatagaattgttatatgaacttttttttatttatttttgaagttaagtcattcatagtttgagcattgaaaagtataatgaaaataatttatttttgtcaatcagaaaataatttagaagaagaagaaagatgatgaatagagaagatatgtggactaagttttgtgatgatcattctggtagttcatcaccatttgagtttctgagtcatacttcttcatgctccaaagatggtttgatgatctgtttagatgttattcttttactcctgcttttgatcaccatgattaaaagaccatcatcatcatcatcaataccggctcatgttacacctcgatttcaagtcttttcggttctgcagatgatctcagctgtattaagcagtggtattggattgtcctacttgtcttttggcatatggattttacaagagaagctaaggcaaataagtacagctatgcctttgaatcggtgccttgtagccttatttcaaggctttacttggttgtttgtgggattgacagtaagtctcaaggtgaaacagcttgtaagatcactggttcagctgttatctattcttgccactttgtctgctggatttgcttgtgcaatgtctttgttcgtggccatttcgatcaaaaaagtgacgattatgataactttagatgttttatctcttccaatagcagttcttttactcatatgtacttacaagaactgtcaagaagatggtgaggctaatgatgatcatgattcggttaccccatttgccaatgcaggttttttcagcaagttatcattttggtggctaagttcaatgatgaaaaagggtaggaagaaaactcttgagaatgaagatataccgaaactgagagaggcagaaagagctagaaattgttacttgatgttcttggagaaattgaacaagcaaaaagaccattcttctaaaccatcaatgtggaagataatcatgttttgccactggaaagagattttggtatctgggttctttgctttactaaagattttgactctttctgctggtcctttgcttcttaatgccttcattttggtttttgaagggaaagggagctttaaatatgaaggttatgtattggtcataattctcttcttttcaaaatgtcttgaatctgtttcacaaagacaatggtacttcagaagcagaataattggtgtaaaagtgagatctttgctcactgctcttatttacaagaagcagcttagattatctaatgctgctaggttgattcattctagtggtgagattatgaattatgttactgttgatgcctataggattggagaattcccattttggtttcatcaaacttggacaactagtctccaactctgtctggccttgctaattctttttcaagcggttggattggcctcgatagcagccttggtggcgataatcttgtccatgatttgcaatgccccacttgctaagttagaacacaagttccaaacaaagcttatgaaggctcaagataaaaggctgaatgctctctctaaggctattgtgaatatgaaagttttgaaactttatgcatgggaaactcacttcaagaatgtgatacaaagtttgaggaaggtggagcttaaatggttattggcattgcagtttcgaaaatgttataatactattattgtttggtcatcacctgtttttgtctcagttgtaacatttggagcatgctattttctcaaagttccaatgcatgccaacaatgttttcactttcatagcaactctacgccttcttcaggatcccgttaaagctatacctgaagttatcggtgtggtgattcaagcaaaggttgcttttgcacgaatactaaacttcctagaatctccagagttgcagaccgcgagagttaaacaaaggcttgacacgaggagtgtggagaaagccattgtgatcagttcagcagatttttcatgggagaagaatagatcaaagccaaatttaagaaacataaatttacaagttagtcctggcgaaaaggtggctatatgtggagaggttggctcggggaaatcaagccttttggcagctattcttggtgaagttccaactgttcaaggaaatgtaagcttacttactatacttttagtgttgagcactatgctttgattcacatagattttatttgaattttcagattcaagtttttgggaagattggctatgtttctcaaacagcatggatccaaacaggaacaatacaagacaatatcttatttggctccactttggagaatcaaaggtacatagaaacacttgagagatgttcactagtaaaggactttgagttgcttcctcatggagacaaaactgaaatcggtgagagaggagtaaatttgagtggcggtcagaagcaacggatccaacttgctcgtgctctttatcaaaatgcagatatatatctgttggatgatccattcagtgctgttgatgcacatacagccacaagcttgtttaatgtaatcaatcatacatttcctataataatttcagcattgtcactcttgttatttaatgccaaaaacttgtttgtaggaatatgttatggaagcacttgcagataaagtagtcctccttgtgacacatcaagttgatttcttgcctgcatttgattctgttatggttagtgttttaatgatcataaattttattttaattatctcaattttctttcaatctgatgagagtattgaatttgttctcagttgatgtctgatgggaaaatttttgaatcagctccttacaatgaattattgctaaaaagcaaagattttcaagaccttgtgaatgcacacaaagagactgctggttctgaaagtcttgcttatgtaaataccacagagaaacttggaacatctaacaaggttatgaagaagagttttagagagaatcaagatcaagtatcaacaggagatcagttgattaaggaagaagaaagagatatagggaacacaggatttaagacacttaaaaaatatctaaaccagaacaaaggatacttgttcttcttcttattcatcttcttccaccttacatttgtgattggacagatcttgcaaaactcatggatggctgccaatgttgacaattctcatgtcagcacattgaagttaatagtggtttacttgttgattggaattggctcaatagtagtattacttttcagatcctttgctatggtttacttaagtattgagtcatcaaaatctctattttcacaactacttacctccctctttcgatcaccaatttcctttttcgactccacgccttttggaaggatccttagtcgggtatgcatctacaacaacagacactctttagtctttagacataggtaactcttgttcatgaaaataaataatttgttttgtgtttttttttattttatgaaggtttcatctgatttgagcatagtggatttggatgtgtcatttagcttactcttcactgttggtgcctgcattacttttactgctaatcttttagtattagctgttatcacttggcaaatcttaattgtctcactaccaacaatttattttgctatcaaattacaggtaatataatgtcatgaatttctctccttattttgtgattcatatatttttctcatatgaaaattgtactcttcaatcaatagagatattacatttccactgctaaagaattaatgaggatcaatggtacaaccaagtccttggtagcaaaccatcttgccgagtctttggctggagtctcgacgattagatccttcgaagaggaagaacgcttctttgcaaagaatctagaacttgttgacatgaacactagcccatttcttcacatctttgcaacaaatgaatggctaatcgaacggttagaaatactcagtgcagtaattcttacttcagcagcattttgcatggtcattttcccccctaaaacttttagctcaggttactattgaaaaaacttacatccccttttaccatctttgaagttaaaaaagagaaagttacacaaacaaaaactgatatggatatgtgttgattgcaggatttattggaatggcactatcttatggcctctcattgaacaattcccttgtatattctattcaaagccattgtactctaacaaattacatgatttcagtagaaaggctaaaccaatacatgtgcataccaagtgaagcacctgaagtgatcgacgaaaatcgccccccatccaattggcctaatgttggtgccatagaaatacatgatttgcaggtaagtttttgttcattttgaaaatttaatgacaaaagaaaagggtgagtagtatgcaatgctgataaagatgttttgatttggaacaacagataagatatagagccaactccccatttgttgttgatgggattagttgcagatttaaaggagggcataagattgggatagttggtagaactggcagtggaaagtctactcttattggagctttatttcgtttagtagagccaagtggaggaaagattgttgttgatggcattgacatctcaactattggacttcatgatctaaggtctcgttttggagtgattccacaagatcctactctctttaatggtactgttagatacaatttggaccccttatctcaacattctgaccatgaaatattggaggtaagttaactatacactctatactttgttagtaccactaaaagtaaggcttatacaattttgaatcttgataatttgtcatgtttgtttaaccatgtgattatacttacaatttaaccgttggtaactaaggaatctcggttaaactctcgaattctcatgtctcatgataattactaatttactatagtgtaattgctaccataaaagattacgcaatctagtaattatacagttatattcaaacacaatctta

SEQ ID NO: 42764 - DNA, 5325 bp, Cannabis sativa
  modified_base (4584)..(4606): a, c, t, g, unknown or other
ctcagagaagctaaatcctcaagtaaacgatgccgtttggctcctgccatggccagctccatggagcttccactccttccctttggcttgtctgaggtcactttcaattttgagtttattatttttgtttcatatattcatggtgcttattgaggtcatggcaattggcaaggtctcaaattttggattagtagtttatttctggtgatataacccaagttccgtatagtttctttgatatgattatttatttatttattttaattttaaatttttattactattttttttttttttttaatttcaggttcttgttccctctgagagtaagacattgcatttatatgaagcaagatatcttgctctgctggaagaggtagtcattaattgttcatggcttttggctaccattgaatgttttctttattacttttctctgttgttatttgatgcttcttcttctttactttacttaataattcattatttacatatatctgtaagacaccatgcaggttttttgcggtgcttggccatgttattgcattttttttctcctcagaaatattgttttgcctttatggaaatgataacaaaagtaatgttctgtagctctaactctaaaagaacagatgatgtctggtgattgaaattcaaaacaattttcttagaacaaaacaagattaaacatggaccattccataggattataatttaagaatcataaatccccaaaatcactactgtttatgaaacaaggaaaattctaattataaaaagagcccacaactttgcctcaaccaaaaagtgatgaaacaaggaaattccattttccccctactattctatttccaccaaaaacaaagctactcatggagtccttgtgactcgaactagtataatgtactatgtgatattagtcatgaaacactagagcttcgtcagggacctggaccttctagatgaaccaaaaaggttactaggattgttcatgaccaaataaaatatgagttacagatgctgtacttcagtttggtaactgtattaattagttaagttccttccttatctttgaaaactcacaaggtctgcacgccccacataaaacctctcataacaggggataattgtcttgcgcatcatatgttccatttttcttttgtgtgtgtatgaatttagttacctttccattacaggggcagcctgccaatggttgtttaaaaggtgagtctgaaatgctttctgttggaacgtcagacaccatccttctccccttttagtatgatattgtccgttttgggcctaagctcttacggttttgtttttgggaaccttcccaaaagagctcataccaatggagatagtgtccattcttatatattcacaatcttttcaatttctagctaatgtaggactttcgttgcacacccaacaatcctcccctcaaatacaagaacacattgcctcccctcaaacgatcttccatccgtccactctctacccactagtgtactttcctccaatgcgttgaggcgcacaccttacatagagccccattactacctcgagagtttcttcctcattactaggccaactccggcgtgagcacactgcctaactgagcacatccgcagaatccatagtaaaagtataccgaggctcatcacctttgtttgacattctgaggatttattcacatggctaactttgggactcggctctgataccactttgttgtgaatcaatcaacgacttacaataaaagaacaccagaccaacactttcaattttcttgttttaattttttttataaacttccttgaaatgtgtgaatgtttttcataaattccttaccttcatatgtttagtagaacgtgatagaaacctagattagttctagtgttctcaactcaagctaagatctatttcaaagttctaaagtataattttatttgctgcagtcattgataaattataaatgactaagtacattttttatttgctgcagtcattgatgaaaaagtccaagctttttgtgcattttatattggatcccatcatggttgatgaggcgtcggctgaaccatcatttgcagccagatatggttgtctggttctaattgaaaatgtaagctgctaggatttagattaaataaacgtgtcatattttagtaactcaatttgcatccatgttcatcaggtcgaaaaattagatgttggagcactagtctctataagaggagttggtcgcatcaaaattgtgaaatttgcacaggcaagtaaaaggaaaatattttcagattctggtaattttaagttagatatttctttttctttcttagtcattgctgtattgttcaggcagctccattcttgaaaggtgtagtcataccagagaaggatgatgatcctgagagtttaagcagattgagctcaaaagtttcagagatgaaggaggctcttcatagtttgaacagcttagagatcaaattgaaggtctatttctctttctaatggagcctgttaattttctgatctgatgcaaattttttatcagccctttcttccctcttctgatcattccctttaagatgatgttgttagagagtctcacattaataatgtgtggaaattaaataccatacataagatgcatggactactcctctcattcccaattagttttgagatgcaaccctatgcaccttagtatacactcacctatttctacttcttcaaccatacactttcacattttgcttaagaaaataatgcagacagtagaaaaatttacttagtaaaaaaaggatacaataatattttcctccattaatgattaacttagtgatatttaaaggtttgtataatctgtacattctttacgatacatttctataacttttaattgatctttttttttttgaaatgacttttaattgatctttagaagcgattgctcattaggttgaacaaagaattatgacaactacaaggaccacatgaacaagttcaacaagtgcattactcttttcttgaaattgtggtgctgagattatttgtctttttcttttcctgtcctgtatgattaggggtttcattacttgcttcatttatgtatagctatcatttattgcatccaaagtaccacatacatgaataattttcttattgatgtggtgttattaggcaccaaaggaggcaccgttgcagactcgcacagcaaactcactggcctgggctgagaagaccccatctatagattgtgatgaagctttcattccatcattgtctgagcgtttgtcttttgctggttttcaacctgtaacaggcaattttctatcctttatctctggttctaaattatgatacataaatctgaatctgattactttgtcacgattttgttatcacttctcacaagtgatagtcttattgatggtctaatagttgcactgaaattttggatagtttatattattttagttacaaaaatatgaaatcaattgatgttataagtttatggtttgtttggggttttccaagaggtacaataaaattttgtttctgaaatatcctgaacaattccatccatttttataatgttcatattgtcaacagtttgataatcataggcaaccgggaatgatatctttgattcaggttttctaagttggtcactagtaaaagtacaatgtcacaatcgcatctcattactgtcgagctaaaatactagtgtaagtgattcctgctctagcttcgtaagttattaagtatggctttgtgaagattagttagttgagagtttgttaagtgagccttcattgagtgagttagtaaggaattcggttatgacaggttgtcataacagttattgtgtaactagctttatataagcttgatcatgcttattgtacagtgtaatcttttcgaatcaatgatattcatttgtctctctttaattacactaatgattatcagcattttgcaaaaaatacaaaattggaactgatcggggctttgacaggatcaactgaatccgaacttctaaagttgcagagtaagaagctacaagcaatggaggttaaagacacaattaacaggctagatgaatctctagagttaagtaaagaaaatgtttctagggttgctgccagactagctatacaatcattggaaatacagtgagttatgacaggcctacctgattcctccctcaggtataggataaaatagatcaattttccccttaaattttggcagacagaatgaaatatttatttgtaattggtgttctaaatatgatatttaggacatacaaacacatttactgtgaaatgtacaaattaagtaatgtctcttatttaccttttgtactatatatatgaagttgaaattcattttcaagtttgtaggagagagaaaggtaattataacatatgtatttattgtatatcctttttttctttgggataatttttaaaaaaattaacaagaagtatgaaatttttaatatttttatgattttttaaactttatttacataaaatatgattttttttggtgtatttttatgttgtattcttnnnnnnnnnnnnnnnnnnnnnnnttatttgtatattattttttatattgttctgatgttgttttcttgttacttttatgtagttttattgttatttttttgtgtttttatagaatatcttaaacatataaaaaaattatacgtaaaaatgtaaattttttatacaaattaataatttatgtaattattcttttcttattttccatatatgaaacttcacagagtacatacatcgacgacttgttttcgtattgcatatcattagtatatgagcttaggtggaaaatagtctcaaatctatatatttatgtaaatagttttttttatatataaatatgagaaaatgtaataaaatttgcgacttcctgctgcacaccgcttgcaggaaattttagagctcttggagcacaaatatgatgtggaaaacgtctccactattctagcgaatttgtaagctaatgggcgctctagcccattttacaaggactcccttactttttataatgacctgaagacataaataaataatgcaaaaagatacgagaattaaagtttaaaatataagaaaaaaaaagaataaataaatttgataagatttataataataagtttcgccgaaaaaattattgaaaaagttattatttctaaaatagtcactgaaaaagtcatcgtcgccggaaaaaatcatcggaaaattcattgtcgtcgaaaaaatcactggaaaagtcactagaagtaggtat

SEQ ID NO: 42765 - DNA, 5146 bp, Cannabis sativa
tttttttttttatatttttattgtttagtcttattactttctctatagaatacttttcaattagtattattctaaataattactaaataaatttaactataaatataattttaaaaatattaaatcatcaaattttgatctaataacgaataataaaagagaaatttgaatttatacttagtttaactacttaattaaaaaaatatcaaaacacatctctttttatactagatcaaaaatatcaaaaacatctcttttattcaaaaaaacatttctttttacacatatcaaaaattaaattaaatatttttatatgaatttaaaagatttttttttcagctaaaccatctcaattattatttcacttacatttaattttttaaattcaaattttagtttaaattattaaaattactgaattgttacaaatttaatgtattatctattttttaaagttgacagacaatataaattgcttatatgtatactcttgtacacgtgacacatttatattggtacttaaaattataaaaaaattattttaaaatttataatatttattttttatttttataatttgatttagttttaaaataaattttaaaataataaaattatgtgtatcaatataaatatctagcatatatacgagtgtacacataaataatctattgtgatagttaattagttaaataataccctaaatttactattattttaataaattaaaagattttatggctaaaatttaaacttaaaaagttaaatataaataaaatgatttagaaaaaaaaattcaaaataaataaaattcttcaaaaatattaaataaaacaaattcttaatcggataggaacatcaaagttttggtttttagctattatgattagaaacgaaaaacacaaaaaagtcagtgcccactgtccactagatttgtgatcaatatcataatgaggtggcagagaacattacacagaaaacgacaataaacggcaataaacttccataagtttgataaacggtagctacaggtagtcaaccaaatcactaaccaatcacgcataaacacgtgcagcataacggctcttttaacagacgtctgctagttactaagtacaatgaatacgtgcgtggcgtctcgtgattgggtaggcccacatcggatagaggtatctttgaagttggagtattttatttaataatttttaattatggtggaaaacgtggttagacggaggaaaattccaatgttaaatctatgggcgagagactcgagcgttatataaaccagagaaggaaaccacatatacagcaagagagattgaaaacaaagaacaatattcaaagtgagaattcacctaaaattgagtgttaaacagaaaagctctccaatttttcattcaagttaattatttttcctttaaatttctccctctcccctttacttcccgcttctttgtatccctttctgtctttcaaagttgtgatttagtggtttttttgtttttggggttcaaaagtgtctgcaaactgaagaaaatcaaacccagaagggttgttttggaagccaggtgattcagaatagagatattttttttttttttggatcaatcaaaaggttattttttatacctgtggttggtctctaatcttaggagtacaactttttagttcttattgtgcaaaaaacttttgtttttaatctgaatttttcttggttttgtgtacaaacaaaaaaaacaaaaaaaaaaaagaaacttcctgttctttaattttggtaagaaacaggtttctgtcttataatttcttctgtgatttatacttatctttttattattggagccatggcagcagctatagatttttacagtagtagcagcagcagcagcagccaagcaccagttttctcagatccttttagagaagagctcatgatagcacttgtgccttttatgaaaagtgcttcaccagcagcttctccctctacttcttatacttcttcttcttctcctccttcatcttctttttcttcttacccttcttgctcttattctccactctcctcaacccaatcaaactatttccctgaaacccaagacttctccaaccaggtgtgctttcagccacagaccggatcattaggccttaaccagctcactcaatctcagattctccaaatccaagcccaaatttatttccaacaacaacaacaacaaaaacaacaaatggcagccatggctaaggcctcaatcaatagccagtggcagagccaaaacccccaaacccttagctatctcagcccaaaagccatccccatgaaacacgttggtactcccccaaaagctaacaagctctacaggggagttagacagaggcattgggggaaatgggttgccgagataagactccctaagaaccgaactcgcctctggcttggtacctttgacacagccgaggaagctgctttggcttatgataaagcagcttataagctcaggggagagtttgctcgtctcaatttccctcatctccgccatgaaggagcccatgttaccggcgcttttggcgagtacaagcctctgcattcttccgttgatgcgaagcttcaagccatttgccaaagcttggctaataataataataacaattcgcagaaacaagtgagttctggcgagtcctgttcggaggcagaggagaaaccgacaataatagtaccagtagctccaatggagtcgaatttggtctctgataattcatcgacaggtgaaccgaaagccgagttagaaggctcttcgtcatcgttgtcttcgcctttgtctgatgagtcttcagcagggtcatcttcaccggagtctgatataacattcttggatttcacctccgattctcaatgggatgacacacagaattttgatctgggcaagtacccttctgtggagattgattgggattctatttaatcaagtccttttaattattgtctccaagtttatgtagtgtcagtctaatttagtatttgcaagttaactaggctgagtttgatgtaagtagtagtaatagtaccagcagcagcagcttctgccatggaatttttaacattgcagaggtgtagctcagtctgtttagttaagtttattattatgttgtaaaatgtgtacagatgatttctccatcaaggtcagctggtcatttttttttccttgctgatccatggaatggagtttatctctggttgtgagtgtttgtttttatttaaccttaatgtaattaagcaatatttcacttttttatcttatacatataagctttttgtgtatttcacataactacaaccagagacataaaagagaataatataaagctgaaatttattaaattttatggatccactcatcaccgtatgggtaaaaaatctgatcaaaatatctagaacatgcccctttagtttttctctgtagaatctgtaactaaattatgttccagttgtgtctgggttgtataggtgttatgtctggtatttatactgattatactgattataattgtccaacttaggaaatgatttattagttggttgaccaagttggttacaattatcttttctggattagttttgagttgattatatatagaattttcttattctattacaactattatctcagattgtagagcttggattcattttctttgagatcgaatgttttcttttctttttctgttcgttttctcttggtgtgtatcttctttcaggaactccattgatggtgatttgacgttctaaagcaagatcaaatttaggtgtgaatcgttgaagggagtttagcttagtcttagctacacagattcgaatggagttgaatcttgagtttgttgaatttcaacaagaacataatagaatcttgtgtatgaccaatggttttggttttgggtatttctttttaaatgaatgtatttttgtagttatagtagtaattgaaaaatacatttttaattcagtgaaagttatttcttaggggaccaaagattagtcatttggaatgtgtttccaataagtgaaccttgtaaatcttagtttttatataactattaaaccgtagcaatatgtaactatatgtgattatgtagctataggtaaaccgattaaaaaggattgcacatctaaattaatttatcttacttgatgttacaaaaaagaaaaaaagaaattatgctatggaaacagtctatgtggtaacaaaagaaaaaaaaaaacaataatgttagcctcatatacgtgtattttgtattgtttggtttatttgatgattagaaattgagtattattagtaaaagaaatagatttcttttttgttttgatatttaaaagagttgctcacacaatttttcttattataatggtgtactttataactattcttatagttattcaagtttgtttgtaaattttcaaaaaatctgattaatttataatattaaaaataaagtttaaatattttattgtaggtgtatctaatttacaaataatcttatataattacagtatacagactattgttttttttacgtagaaacaaatatcattttactaaaacacccctttaataatgtaatattggagtgtactactgaaaattagatcaattcttttctacttcaatgagtgggttaagatattgggttcgttcacatgcaagttaattcggatctaaaattgaatattaatcattcatgaaatagttgtttaagcagattgagtggaggagaatgaataggaaacgtggtctagtgccacttagaagacgaccaaaatgaatggcgttgattgagggaattgccatgttactcataaaccaaaacattatacaatatcctcatattaaataataaaaaaaaaaattatcaaaaaataaaataaaataaaaaaattaaaaattaaatgcatctgtagattgttctgatctgagttatcaacatgaagcgtgctaagttcgttgacattaatttcaaaaaataatatagatttgctttggaattgtatattaaagttcttttgactagtactttatatatattaatgggaaattctataatgcacccccttaaaaggggtatatcgatacatctctatctgttttagtatccg

SEQ ID NO: 42766 - DNA, 2104 bp, Cannabis sativa
tatatatatatttatttaaatatttacttttcaaattatgcatgcaattttaaatcatgtccattaaataaatgtatttaaacaactgcacgcagatgaaattccagtcggctagaaaattatgaaaattttcatgtttttctgaataatgtagacattttagagcaacagagaaggatttatttaaaggaacattaatagtttgtacagaaaattctcatagcgtgtaacctgtttttgttcactttgctatgtccatgctactgcttcataaactataattaagttactattctattatcctaaatcttaatatagcattttttggtttcttattcaggtcagcaaggcactctttgcagaatatctagctgtacagaaaaaaaataaaccatttaaaggtttaggattagaacacatgaacaaggcctgccctgtaattccatctcagctcacaagctctactctgaggagtagccaattccaggtactaaatagtttatgtaaccattgtatttagatgtcagattcctaatggaggcttgtaatacatatttttcgactattgtctacaccagatggatgtcttctgcttaagagagcgaggtctactgaatcgttttgctttagaggtgtcgcagcatctgaaacaggggcaaagcaaagagtattcgtttattctggtaagacatttctattcaccaaaattaccctacatcttgatctgcctctctttctgatcttaccctttcctggaacagagttatcagcttgcagaggatcttggtagaggcttctcagatcgtgcaatattgcaaacttttcttgatgctgaggctactttaccagttggttccttgaaggtaactctgtcgtttagcttattttcctccaatagagtcggaagctactctattggagatcatatgggcttcttgagatattgttgattaaaagaaagagatattatgattttaacatgtcaacttcaatttatccaatgcaggaagtcttggggctgttaaggtctatgtatgcattgatttgcctggaagaagatgcagctttcctccgatatggatacttatcaactgagaatgctgccgcggtgaggaaggaagtgacaaaattatgcagtgaattgcgaccccatgcactcaacttggtgagttccttcggtatccctgatgcatttttgagccccattgcttttgattggattgattcaaattcatggccgtctactcagcaataaagctcagggagattaattctccattgtatttgaagaacatatgttctaatcgtgcataactttaatctagcttcataagaaagctagaatgtctttacttgtattgtaataatgcttgtcagcccttcaaaacaaataataatgataataatgataataatgtttaccagcaggaaaattaagctaatgtataatggatgtaattcatttaattataagaatataaattctgtattttcttttttctccatcagcaaaataaaatagttacaagttattacatacatttgggtcatatggatagggctttatattaaagaagttttactaaattattcagaatgtgtatgggatatgttttgaactaccactttttattacacatttaattaatatctttgtcctttcggcactacttaattttgcttcttaaaatatatggcttgttaagaattccttttaaaatataacagttacataattatgtcctttctgttaagttttattcttttaccatcaaaaattagtatttttatcttttgaacattgaccaatacaaaactttgcttccttttataaaaataaataaattttaaaatttacagtattttattaattatgaagagaataattagcaattctgtttaaatattgacgtatctttgtaaattagtaattttgtcccttaaactttaataattatcaaattgtacactctcaaaataaaaataagaaagattcaacatttttctagtaaattttaaaaaattaatttaggtaaaatgattaagaaaattaaaaaaagaaattaaaattttaaaataattaagcgatttaaaaaatatttat

SEQ ID NO: 42767 - DNA, 3379 bp, Cannabis sativa
  modified_base (65)..(66): a, c, t, g, unknown or other
  modified_base (3343)..(3352): a, c, t, g, unknown or other
tgttttattggtgttttataaaaacacagtatttttgaaaaaatttccatgtgacagtatttttnnaaaagttaacccaaatttcagtatttttgtaagttttcctaaatttatttagtaaccatttaggggtaatacccattaagaagtgttacatatatgaatatacatatatacatacatgttgtttaattttatatttttattcactcactatgtatgttggtaggaagatactataagggagagaatgagataaagttaatcacttacccttatatatataatctctaattggcttgatcataaagaaagatctttattcactatatataatttcaaattacctttatcataacatacgtacatataaatatgtatgatatatattgtttatcaataattttaattgaagttttgtccaaaattgagtttttattattatacgtgtttattatggatcttatatttacttatgatactcttgcattttacttcatttaaattgataaatataatcattagttgtgtggctaccgcatggttgagaaaattagctattcatgaattttgaaaaatctattttatttgtttttatctctcgctatcataatttacagaaatcgttcttacatcaaagatactttcaagtcttatatatacattcttatttacctttgctctttcatttcatattatatgcttgttattaatttctatacacatgatatataatctaaaaaatataaattcgtacatttatgctattattatcacataatttcactagttctactgctaccacaaaatgagttgcctccataacggagtaagacgacataccgaaagaccttcatagaggcataatgcaatgagtcgcctccatagtagagtaagacgacattcttagaggcataaaaaaacgagtcgcctccatagcgaagtaagacaacatactcaaagacaacttattaagggtacaaagaaatgagtcacctccacagcaaattaagctgacataccgaaatgccttcttaaaggtacaatgagtcgcatttctaatggactatgctgacataacaaaagtcctttatatatgtacaataagtctcattcatagtgggttaagccgacatatcaaaagaccttcttaaaaagcacagtgagttactccataatagattaagacaacataacaaaagaccttcttcaagacacaacgagtcgccttcaaagaaaattaaatcgacataccaaaagaccttaaaagacatatgaattgcttaaatgaaagattaaaatgacatatcagacccttcttaaagacacatcagtcacatccaaagcgaattaaaacaaatatacagattcttcatcaaaaatgcctaaagttgcatacataaaaaaaaaaaaaaaaagtatgttggaatctgtaataaatagctaaaggtcctacctgagaaacagtttactggtcaaatcgagatattaagtatcttgggtcaatcaagccgagatagttcacatattggtatggccaactaaaacccaaaggatcaaaccagattagggtacttgtgaaattctaaaatacatgtataagacaaagcaaactctatgaatcaaacgaattcatcaatcaaactcagacattatacaacctacattggttaaaccctttgaatcaggtcaggtaaggcataacaacatccttaccacttgagtacattatctagtgttcagacaaacaaatactcttaatagtttcttataaatacttttataggaaattgggagagtagtgtttaggagaaaaatcattgggtcaatgaaaggcccatagtgttaaaaacataggaaaggcccaataaacgaatacagataaagtcatgaaagactaggaagatcaagatcaagagctgagatgcaagaatataactaacagggtaaccctactggacaagttaaaattatatttaattcggatcgatttgagataattcccatctcagatcgtgccaatgagaatattctctcggtcgagatgaaatctgcaagcccaattattataaaaaagcccaaaaagcacaaaaggtcaattctaaaagaaaaactatacattcgattaaagatgaactctagatgaaataagcatataaatggaagagttacatcctagatagatgacatatctcggatgggatgagatagctcggaaggaatgacatatctcgatgggatgacatatctcaaatgggataagatagctcagacgggatgactaatcttgaaagatatatatcttggatgagatgatgacgtatcttgaatgggatgatgtatctcagtgggtcggttggatgacccgtatctcggtcagtcggttggatgactcgtatctcgatcggtcggtcacggtgactcctatctccataggtcggttgggatgactcgtatcttggtcgatcagttgaatgactcgcatctttgtcagtcggtcggtcagggtgacttgtatctcaattgttcaatcgggatgactcgtatctcggtcggtcagtcggatgacttgtatctcggttagtcggtcagggtcactctcatatctcagtcggacgatcatatgactcgtatctcagtcggtcgattagggtgactcgtatctcaatgtcggtcaggattagtcgtatcttagtcggtcggtcggtcagacgacttgtatctcggttggtatgtcggggtgactctcatatctcagtcagttagtcggatgactcgtatctcagtcaatcagttggggtgactcgtatctcgattggtcgggatgactcgtatctcggttggacgatcggatcactcgtatctcggtcagttagtcaatcggatgactcatatctcagtcagtcggtcggatgactcgtatcttggtcagtcaatcagtcagatgactcatatctcagtcagtcggttggggtgacactcatatttcagccgatcggtcaagatgacatactttatatgggatgacatacctcagatagaatgacataaacataaacaaaaatgatgacttacatccaagatggaaggtatatccaaaatgaatcacttacattgaagatagagaacatatacaaaaataatgacttaaatatcctagttaaaaaaattacacattatgaataagagaaatataaaatatagacacctataataaaataaaggataccaatcaaaatatgtaaagacactttataggaagtaatgggcatatgtcaaaataaaatcttgttaatttgatacttaagggctcgtttggaatgccgtattaggtcgtattgtnnnnnnnnnnattatattgaattgtattttatgcaat

SEQ ID NO: 42768 - DNA, 5578 bp, Cannabis sativa
cggttgtttttcaatacccatctcaggaactgttttccttcttctgaagcttcaatctttttatcatttttgagctcttttctcatctgggtactggtcaaatatggaattggagcttgtttggttgcttagagcggcttggattgcgggtactttgcctatactggttgcttcaatacctagttcaaggctttcttcggttcatggacttctattggattttgctaagagagggaagataatgagttcttcttcaaaagtaagtgaatgaaacgtttttatagtgattgtgctttatatttattttgcttatgtttgtatttggtttgagaaaatgggaaaatggctcaactgatttttttggatgtgatctttgatgatgaaaaatttgagttttttttcagagataaagtacaaacttaggatcagagtcagccaatacagcataatcaaatacaattggatacccaagcaacaaaactttggtactttactttctaagggtagaggacctagagttgtataatgtatacaactaataacatttgcatcattacaagctattattgatcattttaaaaacattgaggcaatccaattctaccaaacaatcatatcccaaatgtaaccaagcatgatccctttaagaatgacaataaccaaaaaaatctttgatagtgaatctcagtagcagcattaacattgattatttttctcatgcccttcactttgtgcttatattatttgtctaggttatatacaaaccataaatcatctatgttttagtttgttttgggtacttgagttgtcaaagtaatgttctttctttcatatatttttgaatctctgtagtcaagcttcactaattttactctcttcttcatatgaagagattcacacttcctcaaaaatacttcggccatttctatgcggtagcttcggtgtggacaacatttctgctcgttgcaacttggatgtatgcatacaaaacagtgccaatagtttccaagccttttcattattctacgtttgccagccaaatagcagggggttctcaaatcttttcatggctccaaagtcatacagctccggtggagtataaatatagcgtttggagatccgtgtttctgcttttgttgatggatgttcaagtcttgagacgcctttatgagacaatatatgtgttcaattatagttcctcagctcggatgcacattttgggttatttgactggcttcttgtaagttctctgaaaatacaacacatttaatattaattttcctgtcatatatatatatatatattttttgtttcttttgcgttagctgttaattatctcgggggtgtggttttttatacacacgcacacgcgcacacacatttaaatatgcacctgttcatgcttatcatctctatgtagtctcttctggtgaacctgtaaaattagtgaattggacagtgatgagagatattaggtaccacgcgttgaaaatatagttacccattatgcttttctttcctttccaaaatatagttaactattatgctttcttttctttctttcttgagcattcttttaagtgtattctgttctataacttttgttattttcttagctagtttctacacagcaggaccactgtcactttgttgcaactgcattccggaggtgtacaaatttgtgttgaatggagttgctgaattcattgttataggcaagaaccgcatgccagccttcgaattggactggtgggaatttgtgattccccttgtaaagcttggctggctacagtggattggtgcagcaatatttttctggggttggattcatcagcttcgttgccatgctattcttgtatgccccacaactcaatatatcctatattttcgctttagtttcagcatttgtttcatgcttacttactgtccactaaacttcaatttgctatccaatcaaattatctggctcatatgagataaaatttgcatcagggctcgcttcgagaaaacaaagcacaagcagatgaatatgtaattccgcacggtgactggttcaaaattgtgtcatctcctcactatctggctgagattgtaattgctcatcctctttctttcatgtttcttattgtagtgaattcttcaaatttacatgcatttgttactgtcttgctctcatttgctttctctgacgaaaatgaaggttttatacttcggtgttttgattgctagtggaggaagggaccttacaatctggttactctttatatttgtggtaagcatagttatatcctgaaatacatatttcactactcataatgacacccttatcaccaaagtcacaaaattttgctgcatgatactttcttgtaatttttcgatacttattggaagttacttttgttttatgtcatttgcaggtggcgaatttagtgtttgcagcagcggaaacccatagatggtaccttcgaaaatttgagaactaccccagaaatcggtttgcgattattccatttgtttactaagagtagaggtggacatggattctttaagttagtaactttatgggatgttcttaactaaatctttgaacataatctgttttaccttaaacaagtaacaaggatcatcactaaagagtcatattaattgttttgagtctttgtaaaggaaagatgttttgctccctcatattgggaggagcaacttttttaataaagtgaagaaggtttgttcaaatttaactataccatattaattttggctgtttagttaccaaagtttaagcattttaaacttaagaaaaatgtcatgattggaagatgtaattgtaagctaaaccaaggcaatacaagtattttgtccttttttttttctatctttaagatgacaaatgaatggattttagaatgtgtgaagatatggataaacaaaagaaataagtacgagaaaaatcatacttaagactaagtactctattttactctcttaaggtcatctctaaccgaattttaaaacaccaaatatagtgtagtttcacactatatttattctaatgggacattaaagctatattcataaatagctttgtctataaatttagtgggacactgtagactacgctatttttttaataattaaataatacaagaagaaaaattaaataattatatatatttaaaattaaaatatttttattatattaataaaataataaaatattaaagaatataaaatttggtgtaatttttagtgttgttgaaattgaaaaaaaaaataatgttgaaatagtagttttttggtgttgatttaacaccaaatttagattttcccattggagatgccctaatacatgggaatgaatccaattgtaagcatgcttatgcatacacatctatgccccaaaacttggcaggttgattggttcgaagttccttgtccagagttttgataagatccatgtcctctttggtaagctcaaagtcaaaaacttggaaattatctttcaatctcttgactttagatgtctttggaataacagccgtattgcgttgaattccccatcgaagaacgatttgcgccacacttttgttgtatttccttgcaagatcctaacaagaaccaacattgtaacttaaaattggaagaaaaacaaatacaattttggtttttgacaaattagcttacttggagaattggatcatctagacatgaaattgaaccaaacaattcagtgttggctgtagcacctcccaaaggagtgtgagcagtgacaacaaccccatgcttttgacagaatttcacaagagaatcgcgttggaagtaagggtgagtttcgatctgattcacagcaggcttgattttggagtaagctaagcagtctctagttagaacgacaccatagttgctgagaagttgtttgaatagttggataacaattatgtacaccatagttacttaattctaagcatttaactcacaacatagattatgtaaagccagaataacatttgtttacccattctttagtgagtgagagagtcactaactatatcaaacaataattcaaatagttgacataattcacaaaactttcataatgtcgttggctcacctgattccaatgctgcggactagacccatggaaactagttcttccatagcatgccaagtagtttccaaagatatggttgtatctatctctagcaccccatcatcatctaaagtactcttagttgtaccaactcctgcataaatttaaaggaaattccaagtgaggaagttgagaaaaaaagcattataaaaggtgaacatgtttttgatacaaccacttagtgaaactcactcctaaaaatttagcttagagaggaaacgatgcccaagtaattatatactactaatcaattcattggtgaatgtgagattctaacaatacactcgctttggaggttcatagcaatccagtctatggtgactctgcggaggcctactctcggcctaatccacaggtcacccttctcacgacatcaatcttacttgagggtgcatggctttgatatcacttgatgcaaccactttagtagaacctactcccaaaagttagcctaaaagaagaaggtgcctaaatagttatatactactaattaattccatacttcatgaatgtgagatcctaacaagacaccccttttggaggttcacagcgacccactctatggtgactctgcggtggcctactctcggtctaatccacaagtcaccctttccaggacatcagtctcacttgagggtgcacgactttgataccacttgatacaactattttggtagaactcactcccaaaagctagcttaaaagaagagggtgcccaaatagttatatacaactaaccaatttcatacttggtaaatgtttgtgggatcctagcagcattaaagattttgtgaaccaaccacacataaagctaacatattccatgtttacattttcagtgtccataatagtgctgctggccaatttttctaactaaatgatgttgtattttccatgtaataccaaaactcatgtgacttaacaacaaagttgatgcaacagttgtatggaatgaatattcattggttagaggcagtaccagtatgctttgtggccacagggaagtgaacaaggtataaatccagataatctaactgaagcttcttcaaactatccttacaggcctcaaggacatgtccatggtcagaattccaaagctgcaatcaagacaaataaagaaaatgattcatagtctggacatgacatacaaaatacacattatattatactcagccaaaagccaaagtaaataaactggccttagtggtaataaaaagatcctctctcttaacaagccctgtctcaaatgcctcagaaattgcttccccaacttctatttcattcttgtaatgagctgcaaacaaaaccaaacataaaaggtatatttggtaacacttttttaattagttttttatttttaaaataaaaaaaatgaaaatattttccaaaatcatgttctataaatacttttcaattttttaattaaga

SEQ ID NO: 42769 - DNA, 4872 bp, Cannabis sativa
ttttaaggaccttttttagattgttatggagtatggactttataagaattgttgtgaaatttttatggactattattatgccttgttatggagtttatcaagattgatatgaaatttttaaagacttttatgcattgttattaacaggtacaaatttttggttgaatattttttttccttgtgacaatatactttggaagttttaattttaaacaacccaaactgctcaaaaaacggcataaaaccgtcccctaaaaaaccgcccaacccaaacttttactgggcaggtatgggttgtgattttaagaaactgtcaaataaaaaaacgcccaacccaacccacgtgtaacctatggtgaatagcaaagcatatagtatctatgatctgaatgcacatgttatagtggaatctaatgatgttgatttttatgaacacaaattttgctttaaattaagaaatagtgggggcgcatgtactagcaatgttcctacagttaggaataatgagtagatagagagtattgaaatggaacctagaagaaacaagagagctagagtagcaaaagactttggttcagaattttgtccttacaccttagaggaggatcttgttaacttccaagaagtcttgtcttccctagatgctgactagtggcaagaggtcattgatgatgaaatagactcactttttacgaacaaaacctagcattatacaaacttatcacctgactgccaaactataggttgtaagtggattttgaaaaagaaaatgaaactcgatgaaactgttgacaaatacaaagctcgtctagtagtaaaaagttttagacaaagagaaaatgtagatttctttgacaccttttcatctgtcactagaataacatctattagagttttaatttcactagttgctatacacaatttagttgtacaccaaatgaatgttaggacaacttgtttaatattgaattagaagaaagtactcgacgaggatcaacttgaagggttcgtgatccctggccaagaacataaggtttgcaagttagataaatatatgtatggtcttaagcaggcacttatgcaatgacatgagaaattcgacaattcaattaatgaaagtaacaaatgcatttactataaatctgagaatgacatttgcactattatatgtctatatgtggatgaattgcttatatttggttcaaagttcaaatattcatgttgtgaaatcattgttatgtgataactttgacatgaaggaccttggagaagctgatgcaatccttggtattaagattactaggtttgaaaaaggaaattctttggatcaatctcattacattgagaagattctgaagaaatataattactttaactataaacctgcttgcacaccatatgatccaagtgtaaagctatttaagaatactggtgacggtgtgaggcaaattgaatatgcgagcatcattgacagtctttgatatgcactgattgtacgagaccttacattgcttatgtcgcgggatttatgtcgctatttaccctcttttaataaaaaaagaaccaatatattcttagctatttttttaaaagaaaaaaaaaattaaaaataaagctaattaaaatttttgctcccaaattttgacaagtacccaattatgctttgaactttccatgaactttttttattgttaaaaattctctttgaaaaattaaaattattagattcaagatttctatctaaatccgttcaattttaataacgtggtgattgtctaatattaaactgtgtcccctaaatgttgatatgtatcaaaatgtattcttcaaatttgaatatgtactagagaaaattttagtgacttaaaagtttagaggattgatacgggtcaaaattcgagaaaaaaatcctaatttacctaaaatatgtgactgaaattaaagggtatatatcattttagattttttaaaagttataaattggactttctgttttgttaaatgacaaaatagactttgtattttctaaaaaaatatgaaaatagaaccatgagcttaatttttgacaatttatttttttaatataaccaacttaaagacaattcctaacacgaacagatacataaaatattaatagttttgtcataacacatttagattggattattattaaattttattttgacaaaaaattaattcagggttctatttataccattaaaaaatacatgatcaattttattatttaacaaaacagatggtctaattagtaacttttacaaaacacatagtctaaaatggtatttatccaaaattaaatctcattttttattttaaatttcaggactgaagcggtgcttttcccttctttccttttgagttgtgaagtttccgatgtttatttccttatctctcctttcgtcattatataattttgggcttgattgagttttgatgcagtatattatatatatatatatatatgtatgatttgcagaacgataatacatattatccttctgaaatttgggattcggatatagagaatgaaggtgtttgatgctcactgtcacttgcaagaccccagaatattgagcaagcttcctcagttaatagccaaagcccatgaagttggagttgatgcttttgctgttaatggggtctctgagaatgattggcctttggttaaacaactttctcaatcttacccttctattattccttcctttggtgtccatccctggtgtgttttctttctttctttctttgtattttggttcaatttattattgttcttcatatatttatgtatatatcatttgtgttgttgatttggtggtatattaggtttgttaaagaaaggactcccaattggtttgacacattgaaacaaatgtttgattccactcctgatgctgctgttggggagattggattggacaaaggttcaaaaggaaagctaattgattttgtcgatcaggttcgggtttggattcatgtttgcttgaaaaggaagaacatttttcttattttaagaatttgattttccaatttagaatttgtattcaggttcaagtatttgagcagcagcttcaacttgccaaagacttgaataggcctgcttcagtccattgtgtcagggcttttggtgaccttcttccgataatgcagtatgtatgcttcttaatggcttcttattcctttccactttggaaatgatctgatgactaatgtaataataatgctctgagctgatgatttttgttgttgttgaattcttaggcgtatgggccctttccctgctggtgttattcttcattcctacttaggttcagctgagatggtcccggaattcgccaagctcggtgcttatttttcattctctggatttcttatgtctttgcaagagaaaaaggcaaagaagatgctcaagaaggtgatcactcagcttttcaatcattgtaattgattactcctttttgggttgcttttcttttttttccatctttagttttacctattccacaggtgccttatgagaggattttgctggagactgatgcacccgatgcacttccgaaacctatccctgcctcagaaccattgtatcttgttgaaggagaatcttcttccatttccagtgctactgctgaaacagatgtatcaacacttaatcaccctgcaaacatactccatgtaagttagtgttttcttctttatctacaccttttgtttcccgttattgtgcatattgtcccacatagaataaatatagtaaggaattgagtcatatataagaacatgggctactccactcattgtcaattggttttgagatagaacccatgattctcaacatggtatcagatccatatcctttgcggacaactgatcctatccgatccgcacctatgatacggttcaatgatagagaattaaggtagttttgagatggaaccctatgattttcaacacccctaatatttatttaagatagaaaaagagaacaaactctaatcttttaaaacttttcattattgatttagtttaagattgttcctgtactttttatttttagttgaaagtaaatacaattgcaaacaccaaatattttgaagtagactttgttattgatgcgtatggttttttgtataacattttttttttcaggtgcttacttacgttgcatctttgatagagatgagcagagaggaagttgctgaagtaagctatcaaaatgcgatacgtttattctcctacagagaccattttactactgcctctccttctccccataatcaataattatgatcatgtccctttttaacttaattccatttcaccattttcttaattattactaatttcatgccaaaattgggttgggcattgctatgttactataaagatatgtgtattatttactataaagatatgccccgtaaaaatgaataaaataaagccccttagttatgtgtggggtatttttctacaaattcatattcaaatgcttcaatccaatttgaaaagaggggtgtcttattagatcactcaaaataaataatgcattactatgaacccaacaaaaaggaagaaacatatgttggattcccaatattggacgtggaggctggctccttgtaaatgtcaactagagggtgtaaaatttatgcttattttgtattaattttgacacattttgcattagaatctattcataattttatcgaaagaataatgctaaaagatactaatagggtctaaaatctttctaagtgttatatcactattaatataattatatattagatctatataaattaattaaataatttttaaaaaatattgctaattaattataaagtgtcattt

SEQ ID NO: 42770 - DNA, 2365 bp, Cannabis sativa
ttttttcaaaatgaaaatattaacccaaaaaatgttatattacttattccctggctaaaatataagattaacattttttctttcgttctaaaatcacgttatacctcatgataagtccttccagagtcaaccaccattctttcaacctagaataagaaaaaacagaaacaaccaatgagtaaataagtctattgtgggctataaaccagcagacatttaatacaagtactttaattacaaactagaaagaagaaaatgaacggaaatgagtgacataaacactgaccttctcattaaaataatcctggacaaccgagagagtttgacccattgctctatgcagaattactggaacagccccttcaacaccttcatctgcagcaagagaagcagattttgcatgttccacaatgttcttccaagttgaaagcagaccttccaagtccttctgcaattcctctaaagtatgaccagcagcaactgtcctgacagtcagaccaaaaccccgaggctgcaaagtttttgcaatgactttcaagcgtgtacgctccataccagagattttctttgacactccaattctatcacagcgagtactcaaaacctgcaaggaagtggactcagctcagaccttatataaaataactttgaagagcttaaacaattccaagataggaaagcaacaacaaagagccagtatgaggtggaagtagaacatacccagaatctgctacgaagttttgggtaagcagttagtgtaggaccttttgtgcccaaaccctctttgacaacttgtactattacttttgtgcctttttgtacttcagcccatttgtttttgttagtagttgcttgcctagaatcctttttagtttttttcttagaatcattaatatcttgcaggtcaggcatttgagaattgccagaaacatttatgccagcgtaaaaggaactagtattggcttctcctcctatgttgagttctcttccatttgtatcatcaccctcgtaattagattctgcttcgccatggtcaacaaaactaccattaatactaccattcatattgtgtgcaagagcttcagaaacatcaagctcatcctcagtctcatgatcctcatcatcatcatgcatagatgattcagagtcttcctgggagacatttgttatctcatccattacttcaatatcaagtattgtgttcttgtttccgtgagcgtctatatgctcttcaatagcttcaatcacagaaccattaacttctagcatagttgttctttgacgaaatggagggaatatgaatggctctctattttgtttaatgtccatcagagaaggtctagaactcccaatgttcaaaaaagctccacccatatggggaacaagttttgtgatcaccccaagatacacgctatcacactgaacattggttttaactggttcaagtaacaactcaaccaattgcccgtcttctaatacagcaattctttgcatggtacatattgaagaattgatcaaaataattgtagaagcagactccttcaaaatcaaattattttcttccttatgcaacaactttcctgggtcctccaacttttccatgtcatccgtcacaatctcatagctctcagagacagtagataatagaggtgattggagcaaccaaggttcctctacaggctgatatctttcagtgaaagaccttttagaaactgagccttcataagaggtagtgactgtgacactctcagtaaatagttcatcctttattctcaggtgatttgacgatggcaactccatatcacttttaaggtgtttcactgtctcatcttcatctgtcaaagcactgtacacatttgagtgttcagaaacattttaatgaaggattttgcatatgaaaaggaagtagaatggagatattacctctgtctcgttccaagattacaggttgtattgtaagatatgaatcctcaatccatgacattaatgagtgcccagaagacaacttggtacttgatctcacccacgagtccctcaccacaatatccttaccttgttttacaagtagcggtactgatagagaaaattcaggtccaggtctccaagtgatgccattatgtgatgcatctctctttattaaataattgtacttgaaatttatgccgcaggcgatctaacaagcacaaatataaataaggggagggcacctcatagcaacaaaaaaatagaagaatgaactaaaaatatacatctagttagatcaatacaaaaaagacagcattcataaaacccttcatactaggcaacgaaataggatattcatatccgtgagagcagatagtattatgatatactcatttatgca

SEQ ID NO: 42771 - DNA, 4474 bp, Cannabis sativa
  modified_base (3789)..(3790): a, c, t, g, unknown or other
attgtcacattatgaattataagagattcactcttaatctgcaatatatacattgtcatatatagatttgctgacatgattagtttaattaagcatcatttggtatcaaattatgttaaaacttttgaattagtaaggtataagattttgtaacaattttcttacatgtatgctcaagaagtttagaattatagcatagtgtatagtacacggttttcgtatgatttattcgatgaaaagctgttattgattttgtttgtttgagttcgaggcattgggagttttaatgtgtgtgtcgttgttttgttcgtgttgttttttgttttctcgcttttgtgtttattttcaattttcctttgtacttttcaacagttggaaagagatattaagtgtataagaaagaaaccagtatggtagcgaaagaccgatcaaatgctactgactctcccaataaggctgaggtgggcgagatagacactagggcgcctttccaatctgtgaaagatgcagtcacattattcggtgaaggtgcgttctctggcgagaaacctgccattaagaagacaaagccttactctgctgaggtactttcgattcttttaagctgtgacagttttgttttgtttgtttcttgaaataagctaattcccgagaaagatgattctattgccgtcgagaaaatatgtttagatcatagttggggtgtctattgttccttaattttcaagttattttgttgtcttttttcctttagttagaagaaatctttgattttactcttactttgattatttatagattttaggtgctgaaaaaatatttgctttcctaaatacttcttatatatttacttttggaatgtgagtttctatattgtgtgtctgattgaaatttttatcgatttcgatgcagagggtattggccaaggagacaaggcttcacctgacccagaaagaattgaacaagttgaaggaacagctaaagagtgccgaaactactaaatcacaggcacttgctgagctcgaaaaggctaaggtaacagttgatgatctgactcagaagctgaaattgctgattgaatctaaggaatctgcaattaaggcaactgaagctgccaagaatcaggcgaaacaacttggagaagcaaacagtgagagtgtttcgggaaaagatggtgtctggaaagaagacttagaagcaacaagaactcagtacatgacagtaattactgaactcgatgctgcaaaacaagagttaaggaaacttcgtcaggattgtgatgtgtcgttggatactaaagttgctgcctttaaacaagaatcggaggccaaagatgctgccaaagcaaatgttgaacgagttggtgagcttgcgaaggaaatttcggttgtgcaagagtcaattgggcaagttaagcttgcttccttgcaagctcagcaggagcatgctaagatattttcggaaaaggatgaacgaaggcagttgcataaagcgacactagaggagtcggctaagaaattaagtgccttgaaaaaagagttcgatcctgaactttctagaagtcttgaagcacagcttgctgaaacgttgaatgaaattggatcggttgaaaagcaaatggagaatgccaaagcttctgatttggattctgtgagaactgtcactttagagttggacggtgcaaaagggtctctacagaaagttgcagaagaggaaagctcgcttcgaagcttagttgagtctttgaaggcggaactagagaatgttaagaaagagcactctgaactgaaggagaaagaggccgaaacagaatccatagctggtaatttacatgttaaacttcggaaatataagaccgagcttgaagcttgccttgctgaagagtccaaagcaagaggctcttgtgatgatttgatatcgacgttggatcagttaacaatggaaactcaaaatgcacaacgggaagcagaagaaatgaagaataaagccgaggaattgaggaaggaagctgaagccaccaaagttattgtaaaagaagccgaagaaaatcttagaattgctttggaagaagctgaagaagcaaaagctgctgaagaaagagcacttgatcagattaaagctttatccgatcaaactaatgctgcacgagcctcgacctctgagtctggtgccaatatcacaatctcaagggaagagttcgagtctttgagccggaaagttgaggagtcggataaattagctgacatgaaagtggctgctgcattggctcaggtggaagcagtgagagctagtgaaaacgaggcactgaaaaagttagaaacaacccagaaagagattgagaatatgaaggctgcaactgaggatgccttgaagaaggcacagatggccgaagcagccaagaaagcagtcgagggagaattaagaaggtggagagaacgcgagcaaaagaaggcagccgaagctgcttctcgcatattagctgaaacagagatgttgtcaacagaatcatcatcatccccacaccactacagagtccaaaaaccgaacattccaaccaaagtcatcgagacaaaaaaaatggagaaagcgaaaacatctgtttcaaagaaagccctcttgcctaatctcagcggcattttcaaccgaaaaaagaatcagattgaaggtgggtcgccttcttttctcccaggcgaacaacaacaacaaaccctgtgagatgttttgttcttgcaaagcaaaacaagaaccttttttttatgagattgtgaattattaatggtggttgagacaggaaaaaagatgtttgtttgtgtctgcatcttttgtagaagatggataatatcaaaatgtgagttttgggatatggaaatgatcaaaaaggggagtagtgtgatttttttgttgtatatgattatgatgagacaaagacattttgtagattattattgattgaagttttcttgtgatagtgttctttctttccccttattgatcataatcattgtgtgttatttgtgaatacaaatgagaaattggctatgacaacaacctcttttaaaaccattagatgagattcaatcttaagaggaaagcataactagaataattattaagaaaatgatttgctttaatctaatctatttctgttgatagcatatttcagataataaagggaatttttgtaaggtttgtttggtatgttgtataatgattgtattgtatttaatttggacatgatcttggactctagatttggacccccacttagaatcagactcgaacttggattcgaattcggccactagccctagatctcagagatgggatccaagtttagggctggggttgaggtgtaaggtagggctccaaatatagtattgtattaaataatactaattcaatataatatataacacaagtattgtttggtatgtcgtagaagggtcgtattgtattaaataacaaaaaatattatgtttggataaaactttggacgcgaccttagactaggggtgttcatcaaaccgctcaaaccactcgcaccgcaaaaataattaggtttgaaattctttgcggtgcggtcgcgatttgaatttttcctaacccatgcagtgcggttgtgatttgatttttttctaaaccgcgcggtgcggtgcgatttgcggttcaaacctcatcgcacattataaaaataccaattttatatttatttaggtccaatatgtgaatgtccaactcaaagtctactaattattgtattattgaaacttaatttttttttcatatttnntttcaagtcttatggtatttttgataagtgttgctcaagctttgttgtatttgtgatagtttagttattagtgatagtccaaattgtaaaaattgcacctcactgcaccgcactattttttacggtgcgatttttgcaattttttagtttcacggtgcgggtacggtttgggaaattagaaaatcgcaccactcgcaccgcgaacacccctacatcagaccccaaatttggacctgcatctagaatcagattcagagtcgaacccgaccactgacatctgaccccgaaaatgggatccaggtctagagtcggggttgaggtctagagtctcaaacatagtattatattaaaaaatactaataaaatttaacacaatatacaacacagtgtaccaaatgaactcttaatttccaactacactttattacttcatatgaaattaagacctcaatttaatattttaggtatagtttaaataaaattacttatattaaacaagacattgaataacactagttaggcaagcaagatgatattaagagaaatacttagattaagatagacattgaagaatactaggttggcaagcaagttaacattaaaggaaagttgcattaataataagataagatctcacattcatatgagttgtcataaaattgtttattctaatataatttttta

SEQ ID NO: 42772 - DNA, 14257 bp, Cannabis sativa
  modified_base (3152)..(3161): a, c, t, g, unknown or other
aaaaattaatatatgggataattcttcttatttttttaaaaaaaaaaattaataacaacaagaaaaagaaataataataaaattaaaattgtgattagtatattgatattattataataatgaaaattaaaatagtataaaaaaaatcttgagtatgtatagttaagaagattatttttccactgcttaaaaatatgtaagtatatatctatttataaaaataaagacatatttatgtttatatataagtttatatttatcaaaatattatattttacattatatcacttaatttgtaaaataaattttacaaaactaggatcgcttcgcgcggctttattctctagttatttaataatatggaatatttagttgactaggccaacctcaaaatagcttataataaacctttgagatcttgagctggcagtgtaattagtatgtaaagtctctcattatatatattcatatgatcctaaccaacttttcaatgtcatgagagtaaaccaacctccaaaaatataatttatttgagatttttagcacagctactcgtataaatagggttaataaaagtagtagatataacagatggagactcactatactacagtgaggtcaataatagaatgtagagaaccattatttaatacgtgcaagtaaatattctatggattatggaattgtgattaagaaaggcactgaaaaaaagagagttgatgaagaagaatctcatcactatatgccaaatatttcttttctaactaatgcataagtatccaattatatgccccccacccccaggccccatctttctcttaccattaaaaaaaaatcctcttaccaatactgggataatattactattaattatatatattaattggtttgatcaaatgaagaactttcagtaacaaattacaaggtttcagttttgtactagaccatattttgttttgagaaattaataaaaattcattatatcataaatggtactttgccagttatagtagcaaccatatacctaaacaaaaaaagggtttgctttgggttttttccattatttgtacgagtagtgatattaacactttttttttttttttatcacttgctgaaattaaagaaaggaaaaaatcacttttttttatagggcaaatactattttagactttatgttttacaaaaattattaattagaccacctgttttgttaaatgataaaataaaccttgtattttctaaaatgatacaaatatgaccttgaattgatttttttatcataataaaatttaattataatccgatttaaaagtgtcatgacaaaattatgtgtattttttgtatctgttcgtagtaagaattgtcttcaagttggttatattaaaagaaaagttatcgaaaattaagctcatggttctactttattattttagaaagtacaatatttattttgtcatttaacaaaataaatggtataatcagtaacttttgcgaaatagtctaaaatagtatttacctaattttatatcactatattaattttttccttccctattattattgctgttgcttgacacgtgggttttaatgaattattttacatctcagtcatagtatacactatcaatcaaaagtttattatcacagggtgtattttcttttgagtattgtattataaaatttcatcaaatatatgttattgtacagtacttttgatgtgattataatatagtaatacatgtatatacacagtgaaataaataataaacataattagcatgtgaactcactatgctagatacggcaatagaattttataagaaaataaaaaatatagaacaaatagaaactaatttatccatctttattgattgggagggaaattttttgtttatgctacaaacaaaagcaaattcccaacttttgtgagtgtctttttatttttttcttcttgtgttctatactactacgctaacagttactatagtcatacatattataatttatagtgataatggagagttgttcttttaagtgtgccaaagtaaaagttggtatctttttctaacgcagatatgtttaatatggttgtatagtataacaccataaatatatatttttgacagaaaaaaaatacaaatatgttaccatgcataataaaactcggtgcatagttatgttaatgtgaaaaggattgatcatttttttgtaatatataaataacaataataaaccaaatcaaaatctattctctcaattatcaaattagggaatccaaaattagatctttagacccgagatgttttctcatctactaaaaaaaaatcaaagggaaaatatatagtagccacaataaaacaaaatacattacattttatttttcaatgtatatatatacaaattattttgattgaatatatacaacaaaataagaaataataataaatggaaataaaataaaatccagctcaaataaggttggcctaatttagacagaaatagcagacactgactggagccccccatagcccatatctcaaccaccatactcaattcactcatgcaaagtaagaactttgatagatacataattaataattaaaaagaagaggcctttttatttatattttttcctaaattaaagaagatactattgtgtcggtgaatggaaatgcaataataaagaacagaagagtatagtgatcaactccaacggtccaatctgcgaaactcatacgacccattattgagaaagtactgtagaagtagattgatatagagatataggggtgtagactccaatggcctgtttctgtcgttttgttttatttttactatgttgttaaactttcacatgaacccaaagccatagagcaattgcatttttgtaagtgttaacggacaaaaaatcttaaagaaaatacttttatccatgaggccccttctgaaaaggacacgctcttctataatttttatgtggtggaaagtgaccaggtgtcactctatatgagctttgctctttctttcttgtactctctatctctctctctctcctcctttctatctctttctcactctatctctctaccattaatgatggctgcctgtctttacttcttttgctagctgtgttttctttctttctttctttnnnnnnnnnncttcttcttcttcttcttcatattgggtctaaaggtcttcgctttctgaccaaaacccacctctcagtttagatcttgaggctaaggctgagattgagtgtctgagccacccaatcctttttgtgggatgacgaggtttcatcaccacattcatcatagtcatagagctggagccatggctggacttttagtgcttctttttcccatttggtttcccagtttgttctccccattgagccatgcgtccccttccgccttcgcggtatgcccttttttgctttgttgatttttgtagtttctattttcatattgcgaaaaaagggtttctttttttccctcttaattgtttgtttttcctataaagtggacatttttgtctctgtttctataatgtgagtgttcttttgccatggttttggatgaagggtttttgctttattaattttagttccttcattaatggttggaaacaaagcaaaactgtaattatgggagatgattgcaaaggcttttttttgttttgttttgtttgtatttgattgtgttcttcattcctctttccccaatcaaaactgactaaaggctgcggaactattcattggatgacaagtaactaccctgccactgttatgatttttccttttcgttggagggcagttagagaagaattcaaaggtggtcattcataggagttatcctgcagtatccaagtagctctagtaaaaattcaattaatagatttggtaatatagttctcaaaacttgtgtaactttgtgtgtgaaaaggaagaaaaaaaagtgagcaatggattgaggatcattaggttattgtgttcacatgtgaaaatacttcatggattataggtcgtatttggtctttatcatgtatatctaactcttttaatctgtgacacacatggaaagtggtcacggatggatagcatacactgaagtttcatgcaaaaagaaggggaagtgattatgtgatatggtatcacggaggatcaccctttgttctagaaactttatagcaccattctatgattttcttggtaacatcacattgattgaaacgtttatcattttttacaccatttccatgtattaattttaacagtactatgaattgaggggtatcttagtctgctactaaaagttctagtttatcaaaaatcaaattgttatgtacttatacaaatgctaatgaatgagttttcaggaatggaatgctcctaaaccgaggcacgcaaagctactgaagagtgctttgcaaactgaaaccgtaaggatttgactgctagatagtttgatcctgttatgagtaagtacataagtttctaaatttggttttttattattgcagtcgatcgtacagcgatcagacctgtggactccactagccaatcaagggtggaaaccatgtgtcgaatcttcaattgttccttgtgagtgattagaaaaattggattctacaatatacatcttttgaattattctttgacatgagatataagatcgttgaactattatcttttttattattattgatattggtgtgttttggcaatttgtagcattaccagagacatccacaggatttattcaggtctttcttgacggaggattgaaccaacaaagaatgggggtaggtatttaaggttacagatgttcttcaatatgattttcgttgacatatataatcaagtgctaatactctgtttgtagatatgtgacgcggtagctgttgccaaaatactgaatgcaactctcgtaattccatatctagaagtgaatccagtttggcgggatgcaaggtacttgcagaacccaaaaattgtttcatttttgttatgagttcttcattttttatgattttgcgtggaagaccaatctgaattaaataccttttttttttcctaccagctacttcagtgacatatttgatgtggaccactttattgatgtgttaaaagatgatatttccatagttaaagagttgccttctgactttgcctggagcacaagggaatactatgcaacagccatccgagcaacgagaatcaaaacagcaccagttcatgcttcggcgaactggtatctggagaatgtgtcacccatactagagatgtcagtagctataaacctgttggttaatgttgtatatgaattgagtttttgcacatatgtaactttttcaactcaatgctgattgacggctaaaagttccagtttgttgaatcttttaggtatgggatagctgcaatttctccattctcccaccgtctggcatttgacaatttgcctatggacattcaacggttacgctgtaaagtcaactttcaagcattagcttttgttcctcatgttagagcactcggagatgctcttgtaaacagacttcgatatccttctgacacaagatctgcactgggaaccaataaccttcgagagaccactgatgctaatgataaacgccaggcagggaaatttgttgtgttgcaccttcggtttgataaggtacacccctgttttggaatggatatactagcttgtttcatggttctagcatttatttacaaacatatttcagtcattcagttagtactaggtattaatcatatattcaagtttaaagaatgtccgaagcatatatgctgctgatggtctctttccctatctctatgtccctgaatattgttattctacaggacatggcagctcattcagcctgtgattttggtggagggaaagctgaaaaacttgctcttgcgaaataccgacaaactatatggcaaggaagagtccttaattcccaattcactgatgaggagttgaggaatcagggtcgttgccctttgactccagaagagattggattgcttctagctgctttgggattcgacaacaatactcgtctatatcttgcttcccacaaggttggaattaagttctatttagtccttatggctttttggttggcaactaatcattttatggacacaaattcatgctccagtttcccagggttcttaatttgtgaaattggcttgtttaggtatacggtggggaagctagaatttcaactttacgagcattgttcccactaatggaagacaagaagagccttgcttcttgggaagaacgggcacagattcaaggaaaggcatctctgctagctgctgtggactactatgttagcatgcacagtgacatatttatttctgcttctcctggaaatatgcacaatgccatggtgagtacttgtaatgtgctcccacacagaaatttcttattaatcttttgacttcctattttcggattgtatagtctagtgttagtaataaaccgaatctattaatcaaaaacagatggacaagaaagtcattatgaaattctgccatgtaagtgagttaacatgatgctttatgaatcaatggtacttagttttaattttgtcaacaggtgggacatcgtactttcaacaacctaaagaccattaggccaaacatggcattaatgggtcagctattccagaacaaaagcattagttggtctgaatttcagcaatcagtgatagaagggcaccaaaacagacaaggggagatcagatttaggaagcccaaacaatccatttacacatatcctgctcctgattgcatgtgccaagcctaagaagattaatagatatataatataatgtgatattgaagttggcttaggagaagaggaggcttccctgtgtctcaaatttgtttatcacaactactgtttgttgtttgtactgtttgataaataagaagagaatagtccctgtttttctgagtcatagaactagacaggtacttctagattcttatgggatggatgtattattattagactactactaatcaatgtgttatttgtttgaaactacacttatttgtctgtaattgttatactgaaacaccaacacggttgtgatgatgatatacataaagcagtggttctcacaagatgtgtttgttgtttttttttttgttcccatctgtgtggatgttatttgagatataccatactctattgtcaaattcggcaattggatttacatggttaactagccaagttagtccacaccacatccaaccatgaatgcaagctgtagttgattggctgttttttgtaacttccaccaatgtgttcataccaaataagtaaaacaaaaagaatgtgaaacagtagcaactggccaactgattacttgtgtcacttttctccacacagccagctgttgaggaatccttttccttttcaccctttttatgcattttgccagaagacttaataagttacctatgattaataaagggtttcctcttactatttcagccctaaagtcaagaaagaaggtataccatctggtgagtggtgaggaatcaggacccatgtctaaaatataattttaccttactttaaccataatgtgcggtaaagttatttagtttagccaacaagatatacagccttataaattgccaaagtttgttcagcctttagtcattaaagtattaccaataatgttccatcataggaaaaactgagttttaatgggattcttttcttttacactaagcacccaattttgtagttgtgatgtgaccttagttggctttaggatctatctaatgacatgtggggtgtcgttgaggaagtcatttcagcttgacgcgtgccccctttcataaactccaatcaccacacttccaatatttcttccaacccggtcgattatttaatacttatatttcgttttattttatttttgggaagtgacattaacatttatgacaataacatttggtaaatacaaatgatcttctattttatttttcaaagcaccaaaaaagaacagattgggtcaaaggttttgatttgagaagtgaaatgtatgaagccataccagatcacatttcttaaagtcacgtgatagtttttgttactgtcgttcagtgacaactgacaagacaaaatatacgttacattcccacttgaaacttttagtccaccacacacagcagtcaaaactacgttacgctgtctgtctgtctgtctgactctgaagtttgtatgaagcaatcttaattttcttcatttcgatgtattcttttatgactaaagttgataaaaatgcacatattcatagttataaaactgataaagctgcattgtcttcagtaagatattataatcactttaactaaattagattatggcataagtttacatttctattttgtggctgcatgttgctcaatgatgaggaccatcaagggtacagtacacagacagtgataacaataaaagtatagtatgttgggaacatgtacattgtatgatagcctaaaatcaaaacctccatgaatgagtagttttaagtatttgcagtgaaagcaaacaagagaacttggaacccatctttctaacttaactcacttgtcaagagatggtgaactcggagcggatggagtctggccatctttcttatccttatcagtacttaaagccccttgtccattgcggtgagcagccatttctgcaacctcagtatgagatggaggagaaatcatatcttcctcaataggaagtgttctttttgatccctcgagggcgacgccaagtactatattttcttccagaacaggcttcgatatgggttgctttggagttggtgtcctttcactttcttgtttcacttgtgaagatgctgttgaaaaactagctttgtcagtgcccaaaacttccgacgaagaagaagtggaattattagtactcttttgacgtcccaaactagcatccttgggctgtttattgctgcttgaagactttggagttatagtaccagataacgaacccattgatccattgtctgattttgaatcaacctctgttaacttagaatctattttcgagtcaggtctacccggtacattggtaccagtttttaaatcagcagtgggcgctacaccaaccttgatatcctctttggcatcaacatttgttggtcctccagtcttggcatctgtgtcgttgtcggatgtttctttggtcttagagtcagaggcaggtgctgctacaactttagcatctaccttggtatcagttgctggtcgcggtgtattctttccatctcgttctccatttgtgcgtgttgtgcgggtttttggtttatcttccccattaattttgtatggaggctcaatcagtaagtatgggcgattagaagcaaccccaccacggttaaatactgaatctgtgaatggaatattttccaagtctgcatcactatatattttttgcactgtacggattggtgtggcaagtctggcccggtgatggctgataactctaagaagatccaagagtatagcttcctgatgaagaagtaatcataatgagtttgatcttcaccagtgttgatacaataaaagcagttcatatcgaagcataacagattgacaatatattctgataactgagttagcaatgatcaataagaaattttctggaaggaagcgacttaccttgacacatagatactcttcaaaatgtgaggtctttacaaagcacgagataaggatctgtaatgtgtaggtgtcaggtatcccaaaatgcacatgtacacaaatattcttgatcaaacagactggcgtgcaggtgggtgtgaacgtgcaaaaagtttacaagattatctatgaacgatactaaagcattagaattaagtcttaaaatgctagaactaaccaaaagcgcttgattttctgcattaacattttccagaaatactcttctatgcaatctctgttgctcaacttgaggattctttgctaagactttgcgcatatcagccacaatattctgcatagagaaaaaggcaatcagcatggatattccataaactatgataatccggaacaactaagtgcaaacatagaagcactaaaatcaaatcctcacatttatcttatggacatctaagtgactaatcgcaaggtgggttttgatacgccaatgagttttttgactgagatttctaacaacattcactgtaaatttatggtttggaatgtgaactgcttcacgatcttcacctctaataattgttggtgaccaccatcccacgtgctgaattcaaccaaatacagacagtaaagttaaattattacttcatacatacattaggccaatgcattttactgggatggcaatggttgtgtaaaactcaaatacaaacctcaacagtaccagaaacttcatagccttctatttttgtttgaatccattcattcataacaaaaggtcgagttgcatgaatcattgcacttgaaaggaaatttgtaaatatctagttagcatgagaaaaaaaacaaacgtgtcagactcttaacaagaaattcaattaggagaaaaaaacatgaaaagataaataaataaaaaatgttcaaagaacaaagcacctctcgaccagccaatgtcaacaatactgtcccaagacctccagcagtaacccacttctgggtagagaaacccaacaactccataaataatgaaaaagcagcaatccagactgcggaataaacagctttgccagcaaaatggaaacccatctgcccagcataaaaccagatgtagatgagcacatgaatattgaataggtattgaaaaccgagactttaatatcctattaatctcactaacaaaatagtaaatttatccttagcaaaattaatatacatatcagatgttgtgggatactaacacaagggtgaaatgtattagcttaagaccatgtttggaaagaaaataaattgcctggataacatgaatgttagtatagaaactgcatggaacttgtatggtactacttgacttgaaacttgtagtttgtacattaaatgcataagtaatgcatcaaatcaatgaatgcaaaaaattataccatgacacaagataacatttttacagcaaagtaaattaatgatattaaacatgagtataggattacacagtagcaccagacatacatttcttgtatcactggactcattagtctccataaagaacttctgtgcttgttgaataacactgcatgaaaagggtaatatttgtcaccacgaataagaactcagaaaatgtcacaactggtttgaagggtggaagtagtatgatttatgaagatagacattagcataacaaaatgcattagacatgactgataggtccaacagaattcctcaaaaaaaaaaaaagaaaatagaagaaagaaagaaagaaaaaaagaagaagaagagagaatgagacaatatccagaaatcagagacgacgcaaaagggcatttataaagaccaagaccaatgcaagaaaacactgaccttgataaacaataggcaaaagccagcacagttgataacgatcttacaaaattcagaagcctttgtttaacaaccaggccagcttctgaaggtaagaccactggatccaatgccctgcaagagtacaagattttcactacaataagaaaaatcaacaaataaaacagcttgtgcccccaccccttcactctctctccctctttctctctctctctcaagggtaaacttgccaatgctcaaaacattctaagattgttaaagtgccacaaagctaattacatttgtgtcacatggaccactgagattgaagataatagccaactcttttttgacaaacttcaggaagtactactcattattcaactctcttctttccccatagaactgaaatgaagagtgggtaagttcttttttgttttcctatatgtataagatatgagtggatgacttgtaacttcattccttcaaaattaaaaatagacaatcaaaacagaataatgagaaggatacctgcaaatgagtatcgctgctgtccataaaagcaaaggttgaatatatgatgttgttatatgatatgtattactctttttccagttgttatcattcttctgcccaattttatgcaatattagacagaagaagaggctataaacaaattagaaatacagagatgagataaattcacaaaatggaaagaacaaaagacccatacgttacgaaacaggtttctggtcagacgaataagtggcacaagaccccagacagaaaatatagagagaccaacagctatagtcaacttgggaagaagtgagcaatcctgtatagcattaagggacctggtatatgataggtgtttaaagtcaggaacatttagaataaaaattgcacaaaataacgcactgacactgataccaattgaatttatatgaaacttaagagccaatattgacattattcaacaattgaggaaaacaaagtgatataaattgccaagggcattttctaatgagcatatcacactgctatatttgaaaatcattcttacaggtatagcatctatgatcttccaataagtaggatgaacatatcaacataaaaaaagaatacaatatgaagaagaatacgaagaggttaatatatttgagaattattattataggtatatctggtcttaaaggtacctagtcttgtatcaatatttgagaattatattagaggtctggtcttgaaggtacatatcaatatttgaaaattattattagagatatctggtcttaaggtacaaaggatggatcaatttcagcaaaaaagaaagcagtgagaaggctcaatcaatacatcaaaacagattgtacagaataagcaagaattaaaagacatgaccaagctcaatctgcttacatcgaaaacatatgttacaaaataggccatatatcaaaacaggagaaataaattataacaatgcaagggactcgccaaaattagcattgcataataaccccatgtttcaactctagaataagcctaagaactgcaacataatgaaatccatttgccaaaattacttaagaaaacggaaataagaagttaccagacctagaaatataaaaacgtataagatacaaccatgcatgtaaaactgtggaaagcagctggaaaaaaaaaaaaaaaaaaaactcaagtttttagtagtgtacgtaaataagagaaaaagtaccttgtgaatgctgtggcagctgtttttagcctggtgagttcaaatggctgtcttggtgccagaaaagaatgacacttgaaggcattgtatctgtaaggtaaagtatgtataggcctgtatacattgtctgctaatgatatgctccaagaattttgtcgatgaaactgaaagcacaagggaaaaaaaattataacagaacaggaagactatgcatcatgcggaaaagaaagaccaaccaaagaaatataccgaaacacgtgatgaaagggtagatccaaatgaatgtaacatggtagttcttattccattctgtaaaataaacaaattcattaaaccttttggatataaagggaggagtttggtggaactaaatttgattggaggaaaagtgtaccttaaattttttattgctctgctggttcttgcagagtcccagtccatgagacaattgcaaagaaccagcaagaaccattcctagatgcaactggtacgtgagaaggctcaactgcctgcataaggatcagaacagcaagctaatatacttattagcccttagaagctaccactgacttatatctcagaagccaaacaacagcgaataggcaagctttgatactcacgattccggaatcaaactttaactgagttaatgattataaactgcacagagaaaataaaaacgagatcagcctggctgtctgcctgaaaaacacactataaaatcctacttcttgattaaatacactgctctattcttggtcactcctcctcacctctccactatttcaagggacggaaaaagaagactattaatgaataagcaatgctgaaattacaacattttcacataaagattttgtgacatttatatacatatttcggaactggaattacatctctttttcatttccattcaagagttcttatgtgtttccacgccccttcaagatatatatacatataatatatat

SEQ ID NO: 42773 - DNA, 973 bp, Cannabis sativa
ttagcgctattacaacacgttcaaagggatgaacaccgatttgtgaatgcaatttttcgtgttgtgtgtgtttgtaggaagaaaataggtggcaacaggcgaacaaggatgcagctgaagcggtagcaaagaggaaagagatgttgaagaatgaaaaggaaagcattgagaagacgcctttcttggatatgaaaaccgaaaccaaaaggttcaggcaagatgttttcaagagaaggcacaaagacagagttctcaagaatcaacaggcattatcaatctctccaaattagattcatttaatctttctttttttttttttggatataaatatataaaaagatctttaataatcaaacacttaacagttgttattactataactagaagctacaacaatgtctatctgatataatataagtacagacatgtatacagttgtagcactttgactttgacttttggaagctcatttttgtgtcttgttgacttgaacaataaggcattgttgttggttttaattcaaaggtttgagaaacaaactaaatccgaggtacgtttactatgattccttcattcattctaatgttgttatctcattggtttgggtggctttatgatgttctttttggcttttcctaatagaaaaggggaaaaaaagtcaaaaagggtaattgaagcagttgaaaatgtgttatgaaattgttgacctttgttaaaagtctagtcaacttcacatattatgaaaagtctaccaacttgtgctcactataccaaagttcaaaaggggtgtttgatgaatcgataaagccataggtcccgattgaactcactaatccgaactacgtagctgcacgaggttggtcgagcacctcaattgagaactaagcatatgaagtgttttgacttagaacacacttgtcttactatgttgatagcaagcaagaagagaagggatgcttccttccttcttttt

SEQ ID NO: 42774 - DNA, 4583 bp, Cannabis sativa
atgttatctattgaaaaagatataattggaaaacttgattatacaagtttaattagtacatttgcatcacaaaaagcaagacgaatcatgtttacataatacttttgaacaagtaaattattttgctcatttttgttctactttattttgtgattaaaaggtcccataattttctttcgctttaaaccccaaattgtctaggaccggccctgattgtatgattcaaattaacgacacatcattgtgttatgaagtgtgcaatttgagtgtgttataattattttcctattaatattatcatcgtcacgttctattcaggaaacaaaacacgcgagcttcacgtgactctttcattagtatttacaaccccatgcctttccatgcctaccacatttattattattattattattgttattaattattattaaagggtcttggttattcgagaggttacagtcttaaatcaactcgtgtgaaagtcgctatctgtaaattattcaactatattaacggtttaaatcttaagaagagggagggaatgccttggccctcccttacctaaacttctttatcaaatgtgaatgaatcggttgttccatttatatagacctcgtctatatatgaacgtaattatttttaatgttgcgaaatttctgacttttgactctggataggactgaagaagatgattggtcagtgtgagttgattaattttttattattttaaataaatggtgagaacgattcaacgtggaattcacatgcagcctatattggtggatcttaccaggtctatatgactccacgtatatacatattacatatatatatgtaaattacccaaaaaaaaatataatgataacagcccattcaagtgaaatacggcagtagtgtattctaatgttctaaatattattagtttattaacaatattacataatgctgacagtggatagacatcctgatacttggtaaatctaataaagaaaatactgaaaatatatcaattaacataatagtttttatcattggacatatatttcttagagatataagaaagttgagactagttcccaaaaattatactcagctaaataaacactcatccccactactcagtattacatggatgcccaatagttacaccaaatatgaagcactttacactatataatctcatactttaaaaagagcaaaagcataaaataacactgctactcaatttaaattttgacccaacatagctcttcaaaagtatatagaaaagataattatacctgttattttttcatgccgcagaggatactatgtaagacatccatattataataaatacaggaaaataacctattatttctgttctcttcactttctgtttactctattggcgggggttgtcatttctacagctctttcctagcgcccaaacaaggaaaaataaatactaagaaaaagaataaccttcaatgcttgtgaaggtagtagtagtagtagctcatgaaagtagctgagtgggaaaatccaccatttgagcaattttcacaatttacaaatgaagagatttcttccatggccgaacatgcaaaaaaatcattctggaacctggatcataaccttcgtccgattttagcaaatcttcgagcaaccccaaaaataactgcttttgttaatagtccctgatcaagactgcaggcgacgagaactgccccaccaatgactagaagtttaggtatgctttttccttcttgtttctccaatgtgttgttgtgttcttccaccactgatgaatcttgacaagcattttctattgttttcaggtagtcggcactgactttcgtgttaatatgagccaaatgcgcgcatcttgaaaatggttctccagatgctctagccttctgatatttgcgcaggccaggttcaattttcttaacagctccccacataccttgccgaactccaagtttcgcaagttcccagggtattcccatatcctcgtggtgaaacagtaagacctcacaggaagtcatcaggccatctcctctccttgattcaactgattcataataaaaagaaatcagcatccttcatacactaaaagaaggttcatacattttaacaaagcagatacatgggcaaaagattatccttaaatgaatagactaagacagttacctggacggatgcaccaacttgaatagtataagtctacgcgtctaggtttgctgcgccttggaacagatgggtatggtattccctaaagacaattgaacacaagaaaataagtttacttaactaggaactttaattgatcaacataaacatgccagaaaactatctctgaatgtactccacattattaaaggactgacagtactcaattatttcctctactcaaagttaaagtacttacctaccgagctagaaacttttatgatcaaattctaaaatgccaaaatgatgcaaaaatggtaacaagtttctcctcctcataccttagtgacacagtagtaagcctgtcctgattgccaaatgcgacgacctatcaagtactctctatcgctgcaaaagaaggggaactgttccaaaaaacaaagagcattgcaaaaagtattagctatgaatgaaaacacagaaatcatgagatgaatcagtctaggataaataaaagctctagctcaccttgcgaacccattgaacaaccatggctccagtagttgggcattcctccaaaatagatgcatgtataagcatgtcatcccacttcattcgaaactcatcatcccaaaagaaatccctcaccaactcaggtgaggcatcttcaaacacagttctgctacggtattgtggaggtccggtctgaaaagacaccaaaccaaagaacaattcaatttaacaatttagccatacaaagagttcttgcacccaaaaatagatgacaagtgaacaggttctcttccaaatccaattcatgcttttctgaagctaaagttgcaaagcatagaacactaagattgaaaagaaataaaagttaaacctacctcgggatccctacgccatgcttgatagcccatagtttgggtggaacgatccatcatcttaatccaagcaggccctccatctttctcctcaacaatccgacaaaggtgctccaaatcatttccattcacaatagaagcaatttcgttagcaggccgtgaagaactacacaatggaaaagagggggaaatcatatacaaattatcagtattaagcagaattggaaagtgggcatttcaacatagtagataatgaaattaagtatagcagagaacaagtttggattttttaacgaacccagaatcagaattgaccatagctggttcggcgagagcattctcttgaatcccatcctcaaaaccccaagaaacgcaactaggcagctgaaattttaacgaattcaagcttggcatcgaagcaaagtagagagacgacgatgttggtggcgaagacgaagaagcttcttgttttgaagccgaacaatcagacaaatccctacccaccaaactggcccatttaggtctccatgcccaaccaaccacaaccccaacaaaaaccgcaatccaaagaggagcaatgaacaagacgagctcacccaacacctccacaatcgtgggtctccggaaaatctccaaaaataccgaaaccaaagccatatccaaactcaaatgacgaaaaaattaaaaccctcgattggaatcaaaaaggtgcggtctttaagtacagaagagattactcgagggttttaaagaagaagaacaagaagaaaaccctaagacccaacaacccttcctcttccttcttctcctcctcctcctcctcctcctccaacctccctacctcccaatctgcctccctcaacagataacgcacgaatataaacaaaagaagataataataaaatataaagaagaagaagaagaggggtcgagaaaagaatgaatgtgaagattaattaagatattgattgcagaagaaagagagagagaaagaagtggataagatttgtggaataagcggtagataaaggtattggtgagattaccgtagggccttaattgggtttgttcttttctccaaatccttatacaaatggccttcagctcttgtaaaaatcaatctcacactcttattcgaaccaagcaattttagtcttgtcgatacttgccttcccttttaataaaaattcaatatcaaccaacaatttatgagactcaaccatacattatattcaaatcaaaatactctctctctatttttttcttttttttcttgttaagaaataaataaagtttgtgcctttatggagctgactcactttacttagctgtattctaccattatatgtgtgtctatatatactatgttggtcgtgttgtggtcgccgcgttctcgttttacacgtttcatttttttttttactttgatttttcatgttttcatgtaataaagctaaaatctcccctaaaagaaaagctcaaattcatcagtcgcgctagtgcaatgtgtaattaagtattcacttttatataacttactctaat

SEQ ID NO: 42775 - DNA, 4168 bp, Cannabis sativa
ttttaattaatttttttttttgtaaaaatataaaaatttaataacttggaccaattaagaattaccacgtaaagattgagtagtttaattggttttgaaggatgttttgtggtggatgttcatggaaggagtgggggagtagcgatgttgtggaaggagaaagatgatgtttccattaatagtttctcaagaaatcatattgatgccgaggtgttgtgggaaggaaatcatcgatttcggttaacaggaatttatcccgagcctaaccgaaaccttagagccaatacttggagattacttcgtgagttgaaggaggagagtactttgccgtggtgtttaataggtgacttcaacaatgtcatggatcaaagtgagaagaaagggggtaatcgctatccaaattggttagttgagggctttcgggcaacggtgggagattgtgctcttcaagacttaaggttgtatggtcatccatttacttgggagaaaggaagaagcacgcctaattggattgaagcaaggttggacagggtcttggttagtgaagagtggctgagaatttttcactttgcaagactattcaattatgatgtttctccatcggatcacacgcctttgatcttggacacaaatttccgaaatagaacccaaggaaaccgaaggttcaggtttgaaaattggtggctaagtgaccctgggtgtgaggaggtggttcggagttgttgggagaataatttggggggttcccttcagttcaaaatcaataagtgtggagaagctttgacagagtggggtagtgagagggagggtagcttttctcggcagctcaaatggtgtaataaaaatttgaagcgtctcaaaggcagaagtgatgaggaggggttacaacaatacaatgagaccaagaaaaagctatttgaggtacttcaccaaaaggaggtttattggaagcagaggtctaagcaaatgtggctccgtgatggcgatcaaaatagtaagttttttcatgctcgagctagtgctagacgtagaaataatcagattgttcgattgaaagatgaaaatggtgtgtttgtggattgggaaaatggtttggatagagtcattttggattactttcaagggttatttacagcttcagttgtagattggagagaagttctatcttgtgtgccttctattgttacggataggcataatagtatggtgctccaaccggttttggatgaggaaatgaaggcggcagtatttcaaatgcatccagataaatctccaggtccagatggtatgaacccggcattttatcaaaaatattggcatatagtaggcggagatgttattcatacggttcggaatttttttagagatgaagccatgcaaccggggttgaataaaacaaatgtggtcttaattcctaagaagaaatgcccagataagatgacggaactcaaacccatctctttatgcaatgtgcttgctaaggtcattactaaagtcttggccaatcgtatgaaaggacttctcaatgatgttatctctgttaaccaaagtgcctttattccgggaagattaatcacagacaacatcatggtatcatttgagatcttacattatttgaagagaaaacaaagagggaaggatggctttatggcgctgaaattggacatgagtaaggcttatgacagggtggaatggtcttatatatgtgctatgctttctaagatgggtttcgatgagaaatgggtgcgaataatatctagttgcctttcctcagttgagtatacggtggttagtggcagccatgaagttgggcctatcgttccatctcgtggacttcggcaaggggattctatttcgccctacttatttctggtttgtgcggaaggtttttcggcattaattcggaaatatgaagaaagaagatggatccatgggtgtaaagttgcaaaccgagctccggtggtatcgcatatgccttttgcggatgatagctatctatattgcaaagccaatgatagtgatgtccaaaaggtgcaacaattgcttcagatttttgaagaggcatcaggacagaaggtcaactttactaagtcatcagctttctttagtaccaacacgtcgcaccaggataaaactcacatttgccaagtgttgggtattgtggaagcaggagaagatagcaagtatcttggattgccaagcactttatcaagaaacaaatcagccgtgtttggttaccttaaggatagagtgagaaggaagattcaaaactgggacggcaagcttttgtcacgagcaggcaaggagatattaatcaaagcggtcgttcaagcgttaccatcttatgccatgaacgtgttccaacttccacaggatacatgcaaggatattgagaagagcatgtgtgatttctggtggcattcgaagtcatctcagaagaatggaattcattggttaagttggaaaaatctgagtaaacacaagggaatgggaggtatgggctttcgagatctttgggattttaatcttgctctacttggaaaacaagggtggcgattaataactaatgaagacagcctagttgccagaatttttcgtgcaagatactatcctaatggtcacttcctcactgctgaagtaggagctaatcctagctttatttggcgtagtgtattagcttctaaggatctgatcaagatggggattcgaaagaggataggatcgggtgttaatgttgacattttaggcgaaccgtggctcattcaagatgaagatcctttcatttcttctactcacccggcattgtttaacaataaggttagttctcttatgaaagtgggtgtgagagagtgggatacagagatattggaggatgttttatccatccgagatcaacaacttgtactgagtgttcctttaagttcagatgttgatagtgatgggtggtattggagcaaagaaaagcatgggttctatacagtcaaaagtggttataattgtttgcaagagtttaaagggacatggaccaccgaaaacaattctggtttttggagggcaatgtggcaactgaaattacctccgaaagtaaagaattttctgtggagaacttgctcgaaatgtctcccaactaaatctcagctgagaattagacatgtgcaacttcagactaactgcccatggtgtaatgcagatgcagaaacatccttccacttgtttgttcaatgcccggtagcacaagcttgctggtgcaacatcggactggcagtgtttaatacacaagctgtcacgtttgctgcttggtttcaagcgggtttggaaagctgggatgcagccactaagatagaggtttcaatgctttgttgggcgttatggaagtatagaaatgacaaagtttggaatgctaaatctcctacggttgatcaaattgtcacttcagcaaaacttactttagctaattggttagatgctcaaaaccggttccagatttcatcactcaatcatgagagtgaggaaaagaatgagcattggtctccccctgtttttccacagctaaagattaacgttgatggtgctctttttcaacatgaacacaagttcggagtaggaatggtggctcgaacagcagctagtgccgtgatagaagctcggcagatcctacattctggtgtggtttctcctttgttggctgaagcagtgggaataaaagaggcgttgagctggataaaaaataaaaggtggagtgacttagtgcttgaaaccgattgcctcaatgtggttcatgattttaattctaataaaccaatgatctctccttatggttttgttattaaagattgtaaggcaattttagaacatcttgttaatgtttcaatagtttttgttaagcgatccgcgaacaaagttgcgcatgcattggcacgtaactctgttcttatggctgattgtactttcagtatggctaccctgccaactgatatttcatccttggttttggatgacttattttaatgaagttttatcttcttttcaaaaaaaaaaaaaaaagaattaccacgtcgcaatttacttaacaataacagtcaggtacctacataagtttcagaattataacttaggtattattactgccaaaaattaaacttgggtatttatttacaactgcgagtta

SEQ ID NO: 42776 - DNA, 5427 bp, Cannabis sativa
agagagagagagagtgagtgagtgctgatggtaatggaaaaaaatgttatttatattatatatatttattattatatatacatataaccttttgactcagtcaaaaccgagtcttcataatatataaatatatattagagtatcatttatgaaatgagaaataaatattcatattaattaaataatcttaaatattataattacctgagatttttcagtgatttaaacaagataagatgtggatcaaatcgcttattccaaaatcaaacataattattcatgtgatctaataaatttattaattattataattaattgaattaattaggtgtgactaatagaaagttctagattagtcaatttcaaaatatcagattttgaataaaataaatatttaatattttagaatattaaacgattaatcaagaagatgaacctaaaggaaataaaagaataaataagtaaaatatatgggaatcaaattctgtatatttagttaatgatgatgttgtggtctccaggatctggaactacactatgtggagagtctcgttcgtaggacttagcctgaatagttgaatgagaaatagcaactataaacgttatagactatcttgcacatactttagtgcaagtgagagattattgagatttgtgctctaaatgtaagtatttaatgaataatatattatagaatatatgaaatgcaattataagataaatgaatacattaattatagaagtataattaataaatatctaaaaatttcttattcatatggagatggtataatcttataaggtcgtacaagagaattaagattatacaatgtgaataaaataagttggtggtgtattaaagtaagaaatctttaatatggaattaccaagtatggtttactatacactatactctagtgtatgtgattttaattcggatcacatatgtgtatagacgtgtagtaaaggtgttgtgtataatttgattatacatgattggatcgatatgtaattacatctttcattaacatgtcgtttaccatgaaagaattattcgtatcacaacaatgattattggtagatcagtctaaattctgagtgtatatgaactcatatttgttttcattgagttctttgattcactcgttaaagtttctcagataagatgattcttacaacttttgttttggtaacttaatagtatgagtgactgggaccatgttatacaatattagaatctaagcttttctaacagatctaatattagttcccttatagtgttaattttgagagtgctaatagttggatccaagtctataatttgatatagattatctgttcacattgaattaatattaaataaggaatcaagagataattagaagggtaaaagagtaattttaaccaactctaattatgaactaaataattggagggtgaactacttatattgattatatcaatgaacaacaaataagaattttataaatataattctatattgctaaagagtgcaattccttatttatcgtcaagtaataatagaattaataaatcaaattattttactgaagagttcaataataatgaagagtttattgaagcttcgaaatataagcccatggtccccgaatcacctttatacaacattgtacgtgggaaggtttaatttgataaataaatttgagaaaaaaattaatttttataagaaataatttttaagggcaaaataataattttgtagaaattattattttgaataattatatcaattataaattgtataattaaagtagtatttaactatttagttttatttgatgaaactatattaattagttgaatagaacattattcttaaataatattaaagagagagaaatatattatttttgttgaaaataatatttattttaatcctagtaaaataaaagattaatgagaattaaccaattattattcattggtaaaataaataatgaatcttatttgtggtaaaattaaaatactaattttaaactttaaaatatggcccacacgtgtaggcattgtcccacacgtgtagggtgacatgtaagagcccatgtagatttagtttgattattttatttataaaataaattaaattaaaatggatatttatcttttaattattatatcaaatatattataagataatgtatttaaagttaaaatgtaatataaaataaaagaatataactgaaatttgtttttcagttatatgatatttatttttgaattagaattgaaataaatgttatccttttattttataagattaaaatagattttaaatatatatttttaaaatattatatatatatgatatatagcatgagatatatgagaccatacggtacaataaaacaacaaagtgagtacaaaacttaaaaacacatttttaatctctctctctctctcctactcgtatactctctctccctctctctctctacacgacacacatacacacactagtgtgttatgtgttctctcaatttcaatcacattgtctcatgagttgagaatacattgtgatcataaaattattttcacttcgttaaattgaaaaggtcactattttcttgagtgttgaagctgatttggcaaacagtggtgtgaagtcttagacgagttcttatactggattggatgtttgttttatttatataaaaagtagcgaggaaatcctgttaggaaacaaggggtaaatctctatactaattagatagatttatattttgtattattattttgagatatggggttttttgttcacatcaaattcacaaatatttttttaaaccaaattaatttttactcttccactgcaacattgatatgaactctaaaaaccaacaatatctaacccacgatctaactctctcactctgactcgcactcttgattttatttttaagtttctttttctctcttgtgtgaattttctagggtttcaagtttcgccaaggttcatcaatggtggaacctaagaaggttggggtttctctcaagtctactccaggatcgtcctttgttgctccttctgttgagttttctactgctgttgttgcttttttatctttggcttatttgatagtcaaataggagtgttttatgtgctttgtggtcaatttcgaccctattcccagggggagtagttttgttgaacaaaagagagttgtttgttattcgtggttttgttaatctttttcactttaaaagttaacatgttatgttttatgtgttaacaaactttcatgtagggaaaggttgtttcttttttttttttctcaaatctaaagaatttctcttactttatatataggtcatccacttatcattcgataaaaaagataaaaaagggagagagtattcttatactcttacttttgtttccaacacttattgtgcaagtttcttccttgttggttttattataaaatattttgtgaatcgaagtgtcaaagtggaaaattgttaattttatttttgacatatttaattgataaaaatatttatactctttatgcttattcggttgtacttatatacatattatttatatatatagaatattttttaatggatattacccattgatggttactaaacaatttaactataaatattaattttaaaaatattaaaatattagattttgatctaacaacgaataataaaaagaaaaatttgaatttctatgtttaatttaactacttaattaaaaaaaatatcaaaaaatattactttttacactatatcaaaaatatgtttatatacaaaatacttaagttaaattcaacttttttttgccgaaattttttttttctgctgatggaacaatctcgactcatataatgtaaaaaagagagatttttttaattagatagaaaaactaagtataaaaactcacattttcataatactacctatgaatgggtaatacccactaaaatacactgatatatatatatatatgtgctatatttgatttatataataaaggaataactgttgacataattgatgtgttgtattatgtgatcttttaaggtatcctttctagtcgtgtatcatcatgaatatgatcatatatattactttttaattgatttatatatcaaagtaatatgatatgtcaatctattctgtttatgaaaagtttgacaatattttgaatctttgatgttctaaaattaaattcattatgcttttcattgtctattcaattagctgaatttattttgatcatataatgatattttaattgattggatcaagttttaattggaaaaaactaaaatggaagcttcaaataagaaaacttgccataatagtgcacgattttgtaggtgtataaaatgaaattttgggccgattgaagaatttatttattccttaaaaaaaaaatatttaggaaacttttcctatgtgttgagaacaattgagacggtgtatgaggtgtctaatatgagtatattgtctataagtattcacattggcaactaggttttttatctttttcatctcttttgtattttcattcatattttgtagaaatagtgtatttgttatatagaggagaatgtgttcaattctacttctgcacttagtgtcctagtgattattttgagtcatcaaacaagtcagcaatggagaagaacaaagtgcaaaacccttagaaaaaggttcttcaagcttttaggagaaggtggttcaagtcttaccttaagaggaagcaaatacttttcaagcagatcaaagagagttcgaacacttgaaattaatttcagcaaggttcatttgtcaaggtggatgtaaagagcgcctaagattaatattttgggttattaaataattagagtttatgcatgagatttaattaatatttataaatgcatattgtggaaatatatttaagttcatatatatttattatgctattttatgtcaattactcaatttctgtgtttgtgttcggaagctgtgggaagcgacgttggacctttagagagtcgtatttatatgttttcttttagaatattattatcggggtatcattgttgagtactggtggtgttggaattttcggggtttgttaatgactatgttacccttggatatttataacttttatgtgtgtgaggaagtacaaaagagtctttgggcaagactttatttgtcttatttgggtttatttttagtgctgagataagttagtgattaaaaaaaaaaagagaaaaaaatctttatttacttaagttagaagaaacaaagaaaacttagaaaaaaagtgttcaaccctctctcttcaaccctctctctctctcgattcccttgggcagcagctagggattggtattttgagattgaattaaggaattttagtgattttagagagct

SEQ ID NO: 42777 - DNA, 2098 bp, Cannabis sativa
ttatgacttaactaaaaatacaattctcctaatactctcgaggctgcgaaacatttcttccatcatactttgaacatgctaattagtgagtgtcatgaacgatatcttagtcttccttcatattttaaatgaaacaagatggagttgtttagtcacatcaaggagcgtatttggaagttaatgcatgcttagaatgaaaaattattctctattgggggcaaagaggtttacttaaagcggttgtccagtcaatttcaacttatgctatgagttgttttcgcttaacaaaaaacttttttggtcaacaattggaaagtatgatagtaatttttggtggggatctaataaggacaacacaaaaatttattggaaaaagataaaagttactttgtaaagccaaatttgagggtggtatgggattctgttctttcgtgtattataattaaactctcttaggtaaacaagatggagaatttttgaaatgctaaattccttgttgagatgattattgaagtgtatgtatttttcaaataactcctttttgaaagcaaggttgggacacttaccataaagtattcactagggtagagagttgttaacacaagggcttcggtatgaaataggaaatggcttcaatatttagagtggtttggacaaatgggttcctagactaacataatttaaacagatgatatatagaggacctgcctcactcccagttgcacatttcatcacaaaggaaagggaatggaacatagagctacttcaggagtttcttagacggatggatattgaaaaaatagttatgattcccctgagttttttttcatccaatggtagaatgatttggtatcacacaacatgaatttatattgtaaaaaattaggattccatttggctgtaagtttagaggaacagcaacaatctttctcttcggacaaccataggaattggtgggaaactttttggagtctaatactaccaccaaaaattaaaattttttgcttgaaaagcactgcataatgcctttccaacagcaacagcccttcatcaaaggaaagtcatcgactcgacagtgtgttcgatatgtacaaacgcatgggattcaattgggcatgctcttttctgctactcacaagcaaagtcatattggaaaaattcaaccttcattattgattatcaaaaagctcaacaaatatataatggtgattacataatccatctttcaacattacattccaaaattaaatttgaacttatcatctgtgtcatgtgggcgatttggacggaaagaaacaaggtctttcatggtggaaatagaactgatggagcccgtattttatattcatgctatgaattacatagcaaagtttcattctgtttctaacatgaaccaaaaaggaaagtctgtgattaattttgctcctgtgcatacaacaacaacaacctccagtagtaggacagaggaatcgccatggaaacctccaaataacatatgccttaaactaaatatagatgatgccttaaactctgcataaaaagtactaggtattgggacgattattagatctcataatgaccatgtcatcgctgctctttcaaagccagtacaagattaatttcgtcttgatgaaatggaagctaaagtcctttttcatagcattaattgagtggtgttgtagtgacaattacaatgacagttacatttatagttatatttgtggcgaaagaggaaatgtgcaattacagattacacatattgaaactgatgcattatgcgtccttgatgttttgaactctacatcaaaagatttatcttgtttctctaatttaatcctcgatattcgttgtcttttattttttttctctgaagttgttgtttctcatattagggggaacgctaaccaagttgttcatggtttagcaaaacgctaaatgactattgatttataatattagtaaatacctttcaaaaaaaaaatatttcatcactttggtgacgaaaaatataaaccatgatggcataaatataagtgtgtatatagaaatatacacttgacaattctaaccttatcataaataacatgagaactcttta

SEQ ID NO: 42778 - DNA, 8385 bp, Cannabis sativa
ccacctgtttacccacatctcctccctgccactgatcgcttgcatctggatgttggtcgtaattggcatcaccactttcatcaatcctttgtacctgcattacatcagaggaatattgaagggggctgtaacccagttttgtctcgaagattgcccatgagtgtagattggcatccaatggttcgtggtgcttgtgggttggctccatcgctggctcgtaattatgactctgggttcatctcaagatggcattatcctcaggcttttactattaatggaacaaccattgatgatgaaaggaagcattctggagaccaaactgacccacctgatttaacaagtaagcaagaactattagatgactgggacagccagatgtcagaagatgaagttgatgttcatgcagtctcagggatagattataaccaatactttggtggtggtgtgatgtactggaattcttctgataatcctgcaggaggattctctcgccctccttcactgagttcggatgatagctcatgggcttggcgtgaagctgacatgaatagggctgttgatgatatggttgccttttcttctccatatagtacaaatggtttgacttcaccaactgcttctttttgttcgccctttgatactttgggtccagctcaggccttaggctatgttatgactggaaatgaggtgccaggcaaggtgcttcattcgccatctgcagcgactgattcaacagttgaggaggatgcgtctagatcattagcagagctatctgttgatgttgaagggaagacaggagatttgcttccttaccacattttacctccaatcattattccaaatatgaggagggataggtcaaggtctgaattcaagtgtagtcatgatgttaaaagtccatgtgtccctctcactaggcgtgagcaacctcggatgaaacgaccaccatcaccagtcgtgcgttgtgttacacgtgctccacgaccccctcctccaccctctcctgtgagtgaatcaaggaaacacagggggtttccaactgttagatctggtagctctagcccaaggcattggggtatgagaggttggttccctgatggagctaatttggaggaagcttgtttatacagggatggagctgaagttgtttggccatcttggagaaacactacattttcaggccactcaatgattcaacctcttcctgcagctttgcttcaggatcggctgattgctatgtcgcatcttgcccgtgatcaggaacacgtaattatagtctttataacacttttaaatcatacttaacaaaacaatctattctaatggatggttttaacatcatgcagccagatgttgctttgcccatgcagccagctgaattgcaaagctgtccttcacgaaaagcctctctatctatgatgcacaacctcctccatgatgagattgactctttctgcaagcaggtatgaagctttatgctcattatcatctccattatattctttcccaatgctaaaagtatatagttcccatctatccatgtgattttacttttttcatcggtttttgtttaatcacaaggttgctgcacaaaatctgggtagaaaaccatacataacatgggcagtcaagcgggttacgcggtctcttcaagtgctgtggccaaggtccaggactaacatatttggttctaatgcaactggtttgtctcttcctaccagtgatgtagaccttgtggtttgtcttcctcctgtgaggaacctggtaaagttcacttgatcaaattgcttattaagctcccttatttcttttattatgatgaaagaaataattgctgaattaatattaatgtaggaaccaattaaagaagctggaatattggagggtcgcaatggtatcaaagaaacatgccttcaggtattttggcacgttggcagagtgtaaatggctattgtgaatttgtaaaagaactaatgttgatgctgtggtagtgataactgatagcagtttgagactgatacttgtgctataattgttggttcttatttcttagtaggatgaattttaaggttttaggcttgccttgaacaatataattatgcatgctctaactagttggaggatattttgaactaaattgtttttttgtttgacagtacatatatttgttcgagtggtggtcttttttataagctggattcatgtttttatcaaataaatcaagtggtctctatatatgtaggcctgtttgtgtttctctgttgtttttaatatttataaaaactgtaatattttcatgcttgtgtttccccagcatgcagccaggtatctagcaaatcaggactgggtgaaaaatgattctctcaagactgtggaaaatacagctgtaattcctaattcctatttttattatgattattattattttaggctttagtttttgcttcatcttctaaccacttttccttgttactcttagatacctattattatgcttgtggtagaagttccctgtgatctcattgcctcgtcttcatctaatgtacaatcaccaaaagaagaaccttctcacttgtctttggaacaaggttctaatgtgcatgctgatgtggttgttttagaagaatctgctttgccaaaatgctcacagatgaacaatgatactaagaaggattcaatatcagttcgtcttgacataagtttcaaatctccatcacatacaggactccagacgactgaactggtacattttaattcttctctgtttgtgaatatattacctttaacttcattatttgaaccagataaatctatatgaaatttgaccatgtggttttatcatttttatccacatgggaataaattcacctgaataagatgtatggcaaaggtgctacattgagtttgcaattattctttgggtttgatttggcatttttgctctaagttaaagagtgaatcttttatgtcgaatttgaaaattgcaggttaaggagctgactgagcattttcctgcggccatgcctctcgctttggtacttaaacagtttttggcagatcggagcttggatcaatcctattctggtggtttgagctcctactgtttggtgagctatgctgaactgcttatttctttggatcaatgtatcttattagaaaaaaatgtaaagtaaataaattcacaatctagcatagctaatgcaattaaggatgggtgataagcttaatgcaagatgctagaactgcaatttttgtgatcagattagggattcgtatatgataactccttgtagaagtcattttcaatgttcttttggttaaaatagtttgcaccttgaactttaagaactgcttcgactgattgatcagaaaaccagttaatgtaatcctacttattttttcgctattgaaagtagctttttccttcatctatttaatagttttcttttatacagagtttgctaattacgcgttttcttcaacacgagtatcatcttggccgacctataaatcaagtaagctatttaaacgaagaaaaaaagattgttatcttttgctttttgtggaagctatttttctcctgctagccttctgatgacggtcttattattggtcataagtggacagcaaataaacatggacatgaatcacagaattgttgcctatgtagattatatataaaccgaatcacactatatactgaaataatatttttgactggacccattcaaaactaaaattagtcatctatcttttctttttggaatattaaccatctatattttgagttaatattggatgtaactgcttgatttggtctttctgcgtaatctatgtttttcatgcttctctaactgttacactatttatctctcagaaatttggaagccttctaatggattttctatatttctttgggtaagttgttgatttccttttatatgttacttaatcaattggtactgttacttaaaaagctgtttatttatatttatatttatggtataaattttattgtccagtaatgtatttgatcctagacaaatgcgaatctcagtaaggggaagtggaatttatatcaaaagggaaagaggttgtaggtaatgctattatctttcactttctttaatcagtagacattgttatgaattccctctcttagtatcttgatgatgtactttgtgttgtagcattgatccgatacacattgacgaccccctttttccaactaataatgtgggaaggaattgctttaggattcaccagtgtattaaggtaatcatcaggtccttgtcagttttattatcttgctgttgttatttagagcaaagacagtaaaagctctgttgtttgacattggaaataactttgatttgacatttacaagaaatgtttttcagtgtcagtgtgttgtgtgtacactctaaatgttctctgtcatatgatttaatttaaatttttactgcatttcaaattactcacattataaaagtctcatgtatcttatcttactattataaaggtctcaaaatggtgtgatatttaatggacaattctaccccttgatattgtacataattcacattgctagagaacaaagtttaatattttgtcttttactaactcatctactttttagaactctgttaattctaccccttgacattgtgtggttttattactggaattcaactccaactccataagaaacacaagaatgcaaactatgtgctttattaatatataaactaatattcttgtaacaatttaaaaatgatggttttttttaagatttatttatttattagtaattaatcagactctttaataagttaagcacgtgcaagctcataatatatatatttatgtgtgtataaatgtttaagtatttgacattaagggtaatgtgtgatgtaggcattttcagatgcctatactattttggagaaggagcttgctaccctatccagtgatgatgatgagtcgtgttcgaaactgtcctgtagactgcttccaaaaattataccaagcattgtattatcataaggttctttcctatgaagcaatcttcttcgtattgtaaggtattatatcaactgtttccttctgaagaattgaaacagttgattagaagaatgttgaaaaattcactggaaggccatattccttttcatactggactcctgttttttatgagcagagcggaaccaaagtaagggttgcttaatgttctgtgtcgaacttaggtagagtttgatatctgtgttctttattattacaacctgcatattatagtctcactttttcctttttgacattttcacttgagacatgaactcggtttgttgtcaactgaagtacagatttgacttcctttgtaagctacatgagttgaagcaaaatgcatacttgtcaaggaatagatggccaaagctaatttgctgtaagcttgtaactcttgttgcataatatttttaaaccagaaattttacattctaatatgtcaattgagacattgatggtatacttttttgaaggaataaattatgaaaattaaaaatgctgattttgatctagtgtatctttatttgaatgtgaatgcacatgatgtgaattgtctgttgttgttgctttaactgattcagtgaatatcattcatgggtggatgtcctgtatcatttttatttgaaaattacattggaaaattcatatttttcttgttcttatttattaactttttagtaatttgacagattcatctgcaggaatatgtccggaaaagaaagttctatacaaattaatatctggtcttcatacttcaataacaatccacatagcttttgattaccttttggatgaataccagtcaggttctcctgctgcctcataataattaaccatggtgttttatcgatgctgacatcagctttagttgttgtgattaagtttgggagatataaagattgttgcaaaaataatgtcatcaattcatactcctgcattcaacaatttaatacgaggccttcttgttcaaacaaaaaatggatgctggttaggaagttaagcctaactttttcacacactaatttttttggttactattttgcattttaaacatgatcttctgtcactactttgcataacagaaaacatgatcaaattgtaatttttttccttcaatttcatgattgcacatataatattttaggtgcaactataaattctgttttttcattgtaggacatttacagaaacagtagaataaatccgtattatctaatgggatgaggatttgattattttttaatatggtttcagtggggtgaaaatgtggaaatattatatcaccgttttcttaagtacccagatcgtgtccagaacttgtacttcacattcctttttgttctccgagccatgaccaaagtgagcacttgttggccctttttttatgctccaaattatagtttcttgattctcttagtcagttttttcttgataacatgttgcaggcagcagattatctggaacaggctgagtctgacactggtaacaattcagaagacttgaaaacacagtctttaatgaagcagctactgtacagtcgtaaacttcaagctgcatgtcctcttcccatttgatgaagcaaagttgtggcagggccacagtggacaacaactaaagcaataaattcaaaagcaattcagaaatattaggtttgtctttgaacaattttatcttattactaccttgtgcttgtttttatgcttaatactacaatataagaacaatgttttaatgaaatccaaatcttacaaacggcatttaattcgccaaatgtatttcttacatgaatttcaataatctctaagttttcaaggttaacagttcgcttccttaactatggtaagtcagttcatgcactcacctagttctaagcactttgatgcagtttacagaattctaaggtatctaaagggaacacttggaaaaggcctcttattcaaatcacaagggcacttaatcggagtttataccgatgctgactgggccggaagtatagttgacagaagatctaccttgttcgttcattggtggtaatctagttgcttggcgaagtaagaaacaaaatgtggtggctagaagcagcacagatgctcacggcatgtgtgatattatatggataaaaagacttcttgaagagctgaagtcatcatattcatctcttgtaaaattgtattgtgacaataagttagtgattgcaattgtttatgattcaggggtttcatgatcgcactgagcacatgttgaagttaacaagcactttatcaaggaaaagatgagaatggccaagtgagcttgccctatattcttactgagtggcagacatctttacaaaaggattatgtaaaagatcaaccagcttgaggggagtgggaaaatcttttctgtttgggaattattcttgtatagctgtatatttgattgttattctgagatattaggatagttaatagaattttttctcttatatattgtaattatttattttcctgtacttaatatatacacggtttgtgtatacagaaaaataagatagcaattacccaatattgtcttaacttgaatttcaataatctccaagttttcaaggttaacagtttgctttttttttttttttttttactacagttcccttatctatggttggtctttttgtaagtgaagaaactgtaggttttcaagttgggatagatttctcaacgtgggtgactcgagtagacattgggtttaattctttctgggtaggaattcagcttcatttccgatgataatgttgctgcatttctgaattctgtgtattgctaatagaaatcatgaccaagtattgatttatttccatgcgtataaaggacaaaattcagatattcatcttacaagtggaagtcagtatgaatgcacatccttcaaataaaattccttggtaattttatgcacaaaacatatatatggtggtgccatttactttaaagaacatttacgcacatgacattgtcgagctcgttgtccattctaagtttttttactcggctgtgtgccgtattttggggcaacatggttctggtgttacttttcagaattgagttacctcaggttaggccataatacctgcacaatatttattaactagccaattttaactctgtaatcatgtttttgccatactaaatcattttatacgtggttttgtggtacttagaagaatgggataaatcatctgacgatgaaggagctgggtatcttgaacattgcacattcaaataagcttggggaagcctgcagctacggtttctggaggatgaaggagaaaagagagcattggggatg

SEQ ID NO: 42779 - DNA, 8545 bp, Cannabis sativa
aaaagaggtatgtttcaaataaatataaaattaaaggtaaatttgatcaatagattaataaaaggggtatttttcaacttaccccattaaatattgacaacattttaaacctttaccttaacaagactgattttatttgagaaatgatcacataataattagtgtataaaataatgtcaattgttctctaatcaccttttagcaaaggacagctcattattatttagcaggttaaagaaaaacaatggcaaaagagaaacaaaactaatttctaactctaagtaagaaataattttgataattcttaatcaagaaggaagtaaaaaaaaaaaaaaattaataataataataataaatgtaagaaaagaaaagaaaaagaacttaacaacgcgctttttggtttgtaagaaacgcgccttgtttcgtttcattcttcttctccttccctcgtcatcttcccctatttctgcatctgagcacaatctcagtctctctctctctcttctctctccctctgaaactgattggattgtttggggtttcaaatccctaatcttgtttttcttcaacaaaaaaagataatataccttcgagtattcggaggttttgagctgcaactttttcatgagccaccgccaccgtccaacggtgtccgactcgccccaccggcctggacctccggcccagaccgacctggagtcggaaccgtataacataattccggtgaacaatcttcttgctgaccacccgtccctccgtttccccgaggtacgcgctgctgcggccgctctacgggctgttgggaatcttcgtaagccgcctttcgcccaatggcttccccagatggacctgctcgattggctggcactcttctttgggttccagaaggacaacgttcggaaccagagggagcacctggttcttcacctggccaatgctcagatgcgcctcacgccgcctccggacaacatcgataccctggacgctgccgttttgagacgctttcgcaggaagcttctcaagaattacaccgaatggtgctattatcttgggaagaagtccaacatttggatctcggaccggcgagaagctgctgcggatcaacggcgggagcttctttacgtttcgctgtatcttctcatatggggtgagtctgctaacctcagatttgttcctgagtgtttgtgttacatatttcataatatggccatggagttgaataagattttggaggattatattgatgagaatacgggccagcccgtgatgccttcgatttcgggtgagaacgctttcttgaactttgttgtgacaccaatatatgagacgattaaggctgaagttgagagtagtaggaatgggactgccgcgcatagtgtttggaggaattatgatgatataaatgagtacttctggagtaagaggtgttttgagaagttgaaatggcctattgatgtggggagcaacttcttcgtgacctcaactaggaaaaggcatgtgggtaagactgggtttgtggagcaaaggtcgttttggaacttgtacaggagctttgacaggctttggattatgctcattttgtttcttcaggctgccattattgttgcttgggaaggaactgattacccttggcaggctctgaaacatcgcgaagtacaggtccgtatcttgaccgtgttctttacttggagtggtttgaggttctttcagtcgttgcttgatgcagcaatgcaatacactttggtgtcaagagagactttggggcttggggtgaggttggtgttgaaaagtattgttgctgctggatggattgtagtgtttggggtgttctatggtaggatatggacgcagagaaatcaagatagacgttggtcacctgaggcaaatcggagggtggtcacttttcttgaggtggttctggtttttattcttcccgagcttctagcacttgctcttttcattattccatggattcgaaattttgttgagcagactaactggaggatttttcgcatgttatcatggtggtttcagagtagaatctttgttggtcgggggctgagggaaggtcttgtggacaatataaagtacactttgttttgggttgtggtgctggctacaaaattttgcttcagttattttatgcagataaaacccatggttgctccatcaaaaacactcttggaccttaagaacttgaagtatgaatggcatcagttctttggtagcagtaacagatttgcagttgggttactctggattcctgttgttttgatttacctcatggatttgcagatatggtattccatttactcctcttttgttggggcaggagtgggtttgtttgcacacttgggtgagattaggaacatccagcaattgagactcaggttccaattctttgcaagtgcaattcaattcaatctcatgccagaggaacaactcttaaatgctagggggacattaaggaataagttcaatgatgctattaaccggttgaagctgaggtatggatttggccagccgtacaggaaactcgaatccaatcaggttgaggcaaataagtttgctctgatatggaatgagataattatgattttcagagaagaagatattatttctgaccgagagcttgagttattggagctgccccagaattcttggaatgtcagggttattcgatggccttgttttcttctctgcaatgagctactgcttgcccttagtcaagccaaagagttggtagatgcttcagataagtggctctggtataagatatgcaagaatgaatacaggcgttgtgctgtcatagaagcttatgattgtcttaagcacttggttcgggccattcttaagcgtaacagtgaagagcatgcaatagtgacagttttatttcaagagattgatcagtctgttcaaagtgagaggttcaccaaaacatttaaaacaactgcacttcccctgctccattcgaagttaattaaacttgttgaattgttgaacaagccaaagaaagatcctaaccagatggtaaatactctacaggcactctatgagattgttgttagagattttttcaaggagaagaggagcactgatcagttgagggaggagggtttggcccctcaaaatcctgattcaatggcagggttactttttgaaaatgctgttcaattaccagaccatgatgatgaaaccttttacagacaggttaggcgcttgcacactattctcatttctcgagactcaatgcagaatatcccagttaatcttgaggcaaggcgcagaattgctttctttagcaactctctctttatgaatatgccccatgccccccaagttgagaaaatgatggcttttagtgttctgaccccgtactatactgaagaagtggtatacagcaaagagcaactaaggactgagaatgaagatgggatttctatcctttattatttgcagacaatttatcatgatgactggaaaaattttgttgagaggatgcgtcgagaaggaatggtggatgacaaagaattgtggacaactaagttgagagagcttaggctctgggcatcaaacagaggccagacactttcgcgaactgttaggggaatgatgtattactatcgagctcttaagatgctggcttttctggactctgcatcagagatggacattcgggaaggagcacgagaacttggttcaatgaggcgagagagtttcaactcagaaaggtcaccttcagctaggagtttaagtagaacaaacagctctgtgagtttgttatttaaaggccatgagtatgggactgctttgatgaaatttacgtatgtggttgcttgccagatatacggaacacagaaagcaagaaaagatcctaatgctgaggagattttgtatctaatgaaaaccaatgaagctcttcgagttgcctatgttgatgaggtctcaactggaagagatggtaaagaatattattctgttctggtgaagtttgatcagcagttaaataaggaggtggaaatcttccgtgtaaagttgccagggcccttgaagctcggagagggtaaaccagagaatcaaaatcatgccatgattttcactcgtggtgatgcagttcaaactattgatatgaaccaagataattattttgaggaggctctaaaaataaggaatctattggaagaattcaggcgatactatggtgcccgtaaacccacgatcttgggagtcagggaacatgtttttactggttctgtttcttcacttgcttggtttatgtcagctcaagaaacaagttttgtcaccttgggacagcgtgttttagccaatcctttaaaagttcgaatgcattatggccatcctgatgtgtttgacaggttttggttcttgactcgaggtggtattagtaaggcttccagagtgatcaacataagtgaagacatctttgctggttttaattgtacactgcgtggagggaatgtcacacaccatgaatacattcaagttggaaaaggaagggatgtagggttaaaccaaatttccatgtttgaagctaaggtagctagtggaaatggagagcaagtactgagcagagatgtctacaggctgggtcataggcttgacttcttccgaatgctgtctttcttttacactactgtgggtttctttttcaatacaatgttggttattctgactgtatatgcatttttatggagccgactttatcttgctctcagtggtgttgagggttctgctttggcacaagacagcaataaagctcttgggacgatcttgaatcaacagttcatcatccaacttggtattttcactgcccttccaatgatagtggagaactctctcgagcaagggttcctgcaggctatttgggatttcttgacaatgcagctccagctttcctctgttttctatacattctctatgggaactcgtacccacttttttggccgaactatccttcatggtggtgcaaagtatcgtgcaactggacgaggttttgttgttcagcataagagctttgcagagaattacagactatatgctcgcagccattttgtgaaagctgttgaacttggactgatacttatagtttatgcaacacatagtgctgtagctaaggacacgttggtgtacatagccttaaccatcactagttggtttcttgtcatgtcatggattctggctccctttgtttttaacccttctggttttgactggctgaagactgtagatgattttgatgattttatgaactggatttggtttcgtggtagtgtgtttgcaaaagctgaacagagctgggaaagatggtggtatgaggagcaggaacatttgagaaccactggtatatggggaaagataatggagatcattttagacctacggtttttctttttccaatatggtattgtataccagcttgatattacagctggaagtaccagtattgctgtgtatggcttgtcttggatctacgtcttagtggcttttgggatatacgtggtggtagcatatgctcgggataaatatgcagcaaaagaacacatatactatcgacttgtgcagtttcttgtcattattctcgccatacttgtgataattgccctgttgaagttcacaaatttcaattttatagatatttttaccagtatgttggccttcgtccccactgggtggggcctgttattgattgcccaagtattccgtcctcttctgcagaaaactatattctggaatgtagttgtttctgtggctcgaatgtatgatatattatttggagtgactatcatgattcctatggctgtactatcatggcttcctgggtttcagtctatgcagactaggatcctctttaatgaagcattcagcaggggccttaggatattccagattgtcacagggaagaaatcaaaaactgatgtatgatttcaggtatttttcagtctctctctttcaaacttctggttcaattctttcatttcaagtgtttgctgaaaattgtgccttttcatcatggtctcttcctttgcactacacccacatgatttcacataattttcactttggtatttattattttatgctaatagcagaagatgattattaatctgcattattgccaggacccatttgtatgaatttctttcatcatgtctttggataattcatcattcgttgccacactattaagctatattgacttatcaggtatcttttttttacgtagctagtaatttccaatgtcattgtctttctagcaatttcatggatcaaaaccaaatgaaattagttgaactactggaatacacacacacacacactatcccaatatgatttgatttttgaacagggaaaagtaaaaattaatctagattggttttcaataaataaatacaagtattgaatggttaaataacctattgaccagagcaatttttattgttatgtttttattttggtctctttatcatgctgactgtaagcaagatattgtgcttaggttatcagccacatcaatctgtaatataaaattatagctattcaagttgaagcaaacagatttcgattctttaattcagttgaagctaaatgcatcactactatttttgcaagtttaaaaatctaggatcagttaggggaatttttaatgtataaaaaatgaatttatttccactataaagttaaaaccatctctaaagttgaactgtatattagcgtgtaccaaaagaactgagacaatttttattttgttttgcaggtttaatgtaacttgttggcgcagagaaagtatagaagttgataaacaaggttattttgatacgttagaagttgttgtatgccatgttaaagcaatttgtttgttgtttcaagttaattttgagggcaattcatgtgttgttcattgctactactacccgttctttctccccttgtttgtgtaattagtagcttagagaaatttcttttggatctcgattagctttgggttgaccacctttccaccttcagaaaggttcaactctttagcagtgtctatattgagcatagctagctagtttcattcatatcactcagattttgtttacccactacattttttattctttcctcagattggcagctgtttctttgtgtctactactaatatactagtaaatactatttttaattctgtgttttacaaaaattactaattagattctattttgttaaatgacaaaatgaactttatattttttaaaatggtaaaaataggattccgagctcaatttttagcaatattatcttttaatataaccaattttaaaacaatatttaatacaaacatatactaaaaatataactagttttatcataacatctctagattagattattattaagttttattttgataaaaaattagttcataattttatttgtacaattttaaaaaatacaaaatttattttgttatttaactaaataaagagttcaattgataacttttgtaaaactgaacattttcctttttgccttgtggggttagattaagaataataaatatagttacacgtagtactaactgatgtaacacttcttgttttttctgttaattggcattaagatttatgggataagattataaaatagcgttgtgttaatttaaaacggagaaacctaataataatataatattgttgtgtgttcattgtcaaaaaaaaaaatataatattgttgtgttagtttcaccggtatttctttaatatttagggaattatattggcacccctagttttttgtgtattttttttaaagaattttatttgcatcttataaatttataagtgcactaatttttaataattttattttatataaaatttatctttaattatattaattttttttccaactcacattcttaaaaaatatatacatttaaaataaataaaaaattatataaaattttatttttaaaaaatgtatataatttaaaaataattataaaattaaaattaaaataagtattgagatcaatataaaataatttgaaaaaaaataaaaaaataataagagtgattttaaaaaattattttaaatttatttttgttaaatattggacttatcatttttgtgagatgcaaataatttttttaaaaaataaataaataaattataattacataattatatttgtcgatcatttaaatatcattcccggaagagaataaatagacataaaattctattttagagaatatagattttacatatattagttatgttagaagcaaattaatatatacttattttgctacttaatctaattttaaactattatcggtataagatatgtatctatacatttactacttaatccagttttgtatattaccaatattatagtaaaatttgtgagtgatccaatataattaatatagttacattcctcaaagtgataaagaattacaaaataattatttgaaaagtttcttgaagaagttttaaatatatttgtatgtacctagatgtatagtttttatta

SEQ ID NO: 42780 - DNA, 1778 bp, Cannabis sativa
attagattagtttggtgtaattggactggtagggatgttactccatcagttcctgcacaagattctacagagttcagttcatcacagcctattcaagttcacttgattatatgtaatgattgatactgttatcacatatatactaggaaattgttgggggtaaaaagttaaattgcatcattcttagtatcttacattataaaagtgaagtaaaggctattaagaaatccgatctctaccataaaagaattgtaaataaacaaggctttcctctgtatactaaaacttgtaagcttttataaggtaaagcaagatagcaaactcgattactctcaacggcacaagctgatgcccctgataaagttggtccctcttaaagatctcctttccaacactccaggagaagctcgcaaaatatgaatattgaaaccaaagtcagaaaattcaataaaggctgtacccaaagaactggctgataatgatggcgaatccaagagcaatggctacaatggaagacgcccatgtcagcttctcagtaattctgggaatcctatcctttaatgcctgactacatgatcctatgaatactgtgtaacttcccattgccacaacagtcccaaccaaaaacattatcagaaaggcagcacctgccaagcgagaaggtaaagcaagagcaggtaagaccatcatcagcgcatctggctgcaacccgtggacaattccagtggcaaaagtagcaaaaccaatcctcttcttaccaagtgaaggactttgaattgcttcataaaccccgacatcacactcaccattttctaatgcaacacatggagcagcaatttctgaagcttccctgatgcccatagcaccaatgacaagaagtgtaaggcctactactcttgttccccaagttcggataatttcaatatgaagcttatccttgagcaacagaaatattaatccaaaaataacctgaccagcatcatgcccacagccccatagggctccaactgctgcactttcaatcctggaacacccaattgaaagaggagccaaagcagcaagatggtccggccctgataaagtgtgtaagcaaccagcaaagaaaccggtccatgcactacttagtagttcagtctggatcagtgctcccccaactgcagcagcagcagcaggaccacctgtcctagctgcagtttgaaaagttgcaagagctgcaggtgcgaaaattggttgaattaagatcatagcaagcgcagaaagcataatgtatacccctgcactagtggcctgaaacacatttgcaataaggaaattgtttagcatcttcacattttttggtcaatgatgagatggaaagtcgatcatagcacaaagaatcccaaatcacataaattttctcaccccataagatgagacaacacataaaaaattgtcccattaacaggaactcttgcaccataaaatcagaagttcatactcaagcaacaatgtgtctcaaactcaactgtcaatgtatcctagatgctcatagaagataaagaaaatactaagtcgaaagcatttgttaggtacatgggtttaaaatctacaatcatcactagctcatcgctgtcttgttaagctaaagtagaatttagccctaattttcacaaacattttgaccaacaaaaacttacagcggaaagaatacaacataatctataattgaagaaagcttctcaaccattagtatagattcttatttataactcataactaatttagtaggacaaagagaa

SEQ ID NO: 42781 - DNA, 5507 bp, Cannabis sativa
tatataatgaaaagtttgcacagcagctcattgagctgatttttccaattaccattttcctattttcttaactcacaagtcgtcttacgtcatctagccaaatgcgaatcactgttcggtcaccatgttaggatgatctagctaattcaacaagtctaatatagcacattgtacttccatgtctctctcttgatccatccagcattagcacaattttgatgtgctaaatgtcgtgcagctgcctatttactgtgccacgtgtcattttattccatgccacatcatttagacagtttttgagataacacttatgatgtccaatcttgagacatgttataatacaatttaatagccaatctatcatattttatatttttttctcttcttttgaaataaatttaaatttaaattcaaataaaagaggctcaatatttatttacatagcaaactatacattttaacattttttttcaaaaatccatatgaaaaagcaatattggaaattggaatgcatgatgagaaatgcttggatttacaccacttttgagctatcgtgaaattttcgagctcactcatatgtaaagtatcccaaaattagcgaactaaaataaataaaagtcgaaatcgaagagattcccacagcccacccacgcacaaactctcccgcgatcatcttctcgttccccatttccttgcacttttattaaaatggatcttccggtgatcgatctttccgactacttgtcgacaacggctacatcagatgcccaactcagtgagctatgcggcgtagtgagccgctccctaagggagactggggctctgcttgtcaaggatccaaggtgctctgctcaggacaacgatcttttcattgatatgatggagaggtactttcagtccccccgtgatttcaagcttctgcaggagagaccccatttacattaccaggtattcatggagaaaaacaaatatgacaattttcagttgggttttcttattagatttttattatgggaagaaaacaaataaaaagttacttgaattagttgaccctttgagtactcattcttccatggaattgagttggtagcatgagtaaattgtatgttggttaaagtctgaaatgggatttgttaaaaatagagcaatcgtgtactacagtgggattacaaaagtggagggaattttttttttgttgatgcgttatcaatggttatcatttatggtgtaaccacaaattgattatgcttgcaattaaaataacaggttggggtgaccccagaaggggtggaagtccccagaagtttggttgatgaagaaatgcaggaaaaattaagagccatgccggaagaatatcggccatcctctccaaagggcccagattgtaagtggcggtacatgtggagagtgggtcctcggcccttacaaaccaaatttaaggtctctcattgttctcttcatttcacaccaatgtaatttgattgctttctttttttatgttttccttctgttgtttcaggaactcaatgcagagcccgtcatacctgaaggttttcccaagtggaaggataccatggactcttggggttacaaaatgatatcggccatagaggtaaagcagtaatgtggtctatttatctgtaatttatgattcgttacgcattttttattttattttttaaaaatcaaattgttgaccttctccccaggttgttgctgaaatggcagccattggatttggtctgcctaaggatgcattcacttccctaatgaagcaggtgataggtctttgtgactagaaacttcaactttactggagttcgtttcttaacgtaactgtgatagttatatcgattacattatgtcctcatacatatgcagtgtgtctgatttattctcttactattagtagtataatcgcaacattactctcctctcttaagggatacgagtgtacttgtctacatgtaaccagtattttgtatttcatgaaactgtacattttcatctgtcgcttcctgtttagcttaataaaatttatggcttacttttgtttgcaaacctcagggaccacatcttttagctcccacaggaagtgaccttcaaactcacggccgagagggaactgtgtttgcaggatatcactatgaccttaacttcttaacaattcatggcagaagtagatttcctggtttaaatatctggcttagaaatgggcgaaaagttgaggtgaaggttcccgtaggatgccttctcattcaaactggaaaacaggttagagtacttgagagtcatgtgcataaatcataacaattcttttaacttggttctttcattttgaagctacgcgagcttttgattacataagaggaacatatattctataatgttaaatttttacagcaatgaagattaaccatcacaatttgttttagtgatgttgtagaatagataaatgatcatattttgtgttgaatttatccattttgattttgagtgtgatagttactgttagttttattttttggtcatatttgtattagatatgaagtttcataagagccctcccttagctgtatttagtgtacctaatttatcacgaaggatccagctatgccgatgttatgacaacaaaaattgattcatgaggataataaacttttgtcagattgaactttttagattttcattttgttccacaatatgctatgatcactcgttaagcatagtggtattagttttcgtgctaattccttatgtcacttattgtatgcacagatagaatggttgactgcaggagattgtatagctggaatgcacgaagttgttgtgacaagcaggacaacagatgcaatcaaactagcatccgagcaaaatcggagcctttggagagtgtcgtctacagtgagtgaagctatcagcttcattgaaattgcaatatatgaagtttctttccatctaattggcatttaaagattatttttttctccatatttctgcatggcattttgtataagagtttgagtatgaagaactcaaaaagtcagcaaacataaaatagaaaagatgaatgacttccctcaaacatcttaagcttataattttcttattttttcttttggcagttgtttgctcatatagcgtctgatgctatcctgaaacccttaggccactttgcagaatctccacttgctagcaaatatcctcccctgtgtgcaggagagtttgtggagaaagagcttgctgtaatcaatctgaaaggacaaagtaaagagagctagtaacttctagcaagtgaattctttgttttggccatgtcaaactgaacagaatttatgttgttttaataaaattgagtgctaattgcaacaaggatgctccagacatgtttgtcttctagctgcagaaacttggttactggaggattcattttatcttgttacacaacattttccttctcactctactatgtaatattcaacatttgcgcttgcatggtagatgtttctcatgttttaaaacatcttttgtgaattactatacttgtttggcccttttctaattccataatgtgttcaaatttcttctactgaaaagaaaatttgttggaagtatttggttgatatggatattatatactaacctaaattcttttatatgatgtacattgttgttcttgcatgcaattggctaattttaaaaatagcgaatccaaatttatttttgatattacaaattcttaaaaaattttcaaataacatttatattatagtcgcggtaatatttttgtttttaaattttttgatcacaaaaataaaaatattttttttgtttttgaaaaacaaaaatgtattctacaattacttttatttttcaattttaaaaataaaaaataatagtatgtctgtaaaattcattttttatttttatttgttgattttatttaattcgggtttgaagttgggtccaagtcttggttcgagttcggtttctaaggtctaagttggggtttgagttaaaaatattgattaaaaataaactgttttaaaaataatttgaaagtgattttttttttttaaatttagattcttaattaaaaaataaaaatgttttatagaacatgattatgaaaaatattttcacttttctaattttaaaatcaaaacactgattaaaaaaatattaccaaaccaactatatataaatcctaatatataaatgtctatttattgtgcatttaacataatattgtgtatttaacagaatttatctaaacagaaagttaactttaaaataatgtattgcatcctcttagacagatacaacaaccattcacaataattatctttcaatgtctttaaaactgcagtatataataattctatgaacatgtaccgaaacatgaaactctcctcattagattttttttttttaaacaacttgccttaatatattataataattaattccatatattaacaactacaaccatcaacacatgatgtggaaaaggtacaactaatgtgcagtgttatccatatttttgtaatcataatacgtggattttaatcaagaaaggctacaaagtcattagctctgactagcttcctcaattgatgctctaggaagataaaggcctcaacttcacgggaagaattgccgtgataggaagttccctgactgctagtaacatagagggtatccatgagtcgaagtctttcccagttctaagaaccaaagacatcagctcccgagaagagtgtggattttcccagaagggccaaggtagtttgagatgcgtcaaaccaagctacacccttagcctgcggaggctctgcctatacgtgtcagactatgagcctagtgagcaagctttttcaggtacgacgtcaaaggttttctcccacgacacgctattgtacagagcatgtgtgtccttatgtacctgactaaatgatccaacgactagggataaggaaaattcaaaaaggaaaagccctaagatgacacgcgtatgaggcccaacctgtacaatctggcactcataaatgccatatgggaaaaatgccacctagcaatctaatggttagatttcgccccaacgttgatcaatccaaggcagcacatgaagagaggttggcctataaataccgtggtaaagcacaagagtgggggacttttgggagagactcttttactggggcaagattcattgttcaccattttgggcaaacacacttgtattaagcgagatagtattacacttaaagaactccagaatattctcactaagcttcctcttcttcaaaaagagcacgggggaaaaggggtttcagtccattgtatctctatttgtataaatagtaatcgaccgatgggcctaataaaatagactcgtggactaagggcagctaacgcctgaaccacgtaagaatatcttatttgttatcttgttatttatatcattattactttcttaagctctaaaaatatttagttgccgaaaa

SEQ ID NO: 42782 - DNA, 4955 bp, Cannabis sativa
  modified_base (3290)..(3290): a, c, t, g, unknown or other
ataaatatataatatatatatattgggttggtctctatttttttttttttttggcagaacggagtggtctaatttaaatgcggttgattctttagtttatacaagagaaaaataaattaaagtaattaaatgatggaataaagccacaatagataaatatctgataaaaccccaatttttctttatttcacgtgaatatatatataaaaaaaatactttcctaggtcattttcttttaaaaaaagaaattactagcgatatatatgacatcaaactgcagggaccatctgtatatatatttatagcaatatgtataatttagtattggacaaaatatatatcattaacgccaagcttatctcttgtccaatttcttacattatgtatatatatacatatgcatgagaggatggctattggttaattactttagtaacatatgcacatgatgataaaatacaaacgtacactatagtacacagtatgtacataaatagataggacctagctctctttagtatatataaatagatataaaaaaaaaatatagtattattagtagaatatatatatttataggaataaagagatgcatgtggatgatgaaaccaagcacatgctctacgtgacgttcatgccctgcccttgatcatctgctttatattgcttatatatatccaaaattcgcagaatggctcttctgctctttgtctagggatctttccacgtttatatattaaaaacatgatatggaaagctcttgtccccttagcttgcacctccaatagtatcactatacataaatatatatatatatctacttcaattatctaatttttaatttggtgtagatatatgttttatgtttgtaatgaaatgaattaaccccactcaagtgaaatattaataattatttcatcggcttaggttaatcaaaatctttttaagatctctcgctgtttatattttatacaagggattttggaaattataatacgtggaagctattggtagcatatcaatatatatatatgtcgtttaatgcacatggtgtggtggttaataatgtttattggagagtcactaattatgaccaatatgactaaataatctcacagctagcaattttttgaagctaaatatatatttattttagtaaaaaccctccgtgtgggaaaagataaattgaggtggttgttgatttgaacgatgtagttgatgtaataatttatttttataaccaagaatccaaggaggtcatctctttaatgggtacatatatagtttgcaaacccgaattatgttgtttctgtttatttttattgactttaatcataaattacagcgtatatatataatatatatataatagcctgtatttctcctacgagttgtgctagctttataactgatcaagttttgtcattgtttaaggcataagtacatatgtacaataagatatctcgatatatatggctagctagaagaaaacaaaagttctatctctctctctactctacgttcgtttattttttttttcttttcaattttttgaaattccaagagagaggatgaaaaaataaataaattaaaaagttatatattaatttagatttggtagggctgatgggagcataggatagcattgatgtagccatatatttaggctcccactcccatgggcagtgaagtgagagagagtaataaattgcataggataggatattgattataattaaggttctttgtggtaatgatagaaaagagccccacactagagtagtaccacatggactatacagttgttaatcccttattatggactactttcttggatttaataactaattaataaccctaaaattatatcacttagtatggggaaatcttaattaaagtcacacttcccatgaatggcctcatcacttcatcacgtgctctaaagaagattgtcattttgttgaatataaagcagtgggttctcatgatataagtagtgggtcaattctccatctggcattggccaagcttcttttcaccatataataaccacttatatcaaattgcaagcaaccacctgattctctctcttttctttttatgctatatattaacagtactaattataatcaaaatgtagttaattaaatattaaagctagattgattgggaacgggcaaaaaaaatctgtgtatagctagctaggggcagtgtaacttttttgcataattttttagcctagttaaaaggaaaacaatatagctagtttgacccaaattttatgtaggttggtgttcccatatatttgtttaattattaattattatttttaaaaaaatagaaacagcactgtatgtaggatagcaaactatatattatcagtagtataattaataatctgtaataatcaaactgatcgattgaaataataataaattaaagttgcatgatgcttattttatattcaagttttatgtattgtttgttaaggttaatatatagtttgattttgatgatcacattatattagaataataacaataatatctcgagctaagcacgaagaaagagaggaaaaagataatagtagaggtaagcaagtagtgcaaaattaattaattatatggtgtgacagtatatttatatttaagtatgggcacatggctaaccagtaaccagaaaatccagttgggctaatgactatatcattttcataggcccaattacttatttgttgttaatccaatgtgtgtatgctcatatgatctcattacttataatatagtatctctatatatgatcactctcgtttacactttggtccttcaattttttttttttttttgatgcacctacaatttttttttttagtcaaataatacatatccagctatagactttcatttttaaagtatcattgtatcaaatatgatgggtgcattatgtaaacgctattttttttttctgtttattaattaataagtaaaaatatggtcaaaaaataattatttttcttaaaattatttttatttataaaaatacgaatattttttttttttgaacaatataagaatcaaatattttggaaatgttgaaaacagaaataaattactctcaaaatttacttaaacaagttttttttttttttttttgaaagacaacaacttttattaaccatagtctattttataggaataattacataaaggcacaccattttttataagaaaaatttatttttacatttaaagatttttttttatattttttacggttttttataaaaacancacgaaaacaacaagaaaactacaaaaaagtaacatgaaaaataacatctaaataacatcaaaataataacaaattaacaatagtataacataaaaagactgtatgtattgtaaataaaatcaaaaaaatcgtaaaaaagtttaaaattctgtaaaaccgtatttttgtaattttttactgtttttgtgtatttgtgaaaccgtatttttgattttttgtaaatataataaaaaaatcgtaaaaatatttttgtaaataactacgaagatggaaggcataaaagaaaagaaaaattgagaaaaagctacaagatctagaaacctttgatgatgagaactgttactgccatccgtttggctcgttgagacccagaggtgcccagatcagacccaaaactcacagctccagtaatccgacccttttgacggcaagagaacagtgagggacctttaagagttatggatctggggtcttcaaaactttacaaatccatctatggcatttgtttggacccatggggtcggagttagctccatccgtgcatagtcgagagatgagagtgacgatgagagggagtcgagataaggggtttctaaaggttgtgagcacactggtgtggtccgtttcaatcatcgtcgatatcggaggatggccattgtggcctagccgtgcatgtttgacagtgaataaagagaaagaggtgggattgagtgagaggaaaggggaaagcttgggttgggggtttatgagggaaattaggatttttttttaaacttttatttgtttaataaaaatagaaaaaaataattttttagtaaattaatttatttattttattttttcactttattttttttaattttaaatttatttttaaatatttatttacgtggaccaataatatagtgccatgtgtacattgtgtacacacggacaatatcttatgtacacatggatatttagatgaagtagctaagtgcttatagaacttgagtttatgaagttttactgctagaaaatgagtttggggttaattacttgcaaagtgaaagttttcgacattttgccacaaattacatcttgtattttaccaaggacagccctatttgcctcacaaagttaactagttaagagcagctagatataatcttcttcctattaatttcatgaaaaattgatccatctttaatatttgcttttatatcgatcaattaatacagtctagagttaataacgatttcatctatataatacacacatcagttgagccaaatactataaaccatccctaccattgtttgtgtcgttgagatcagatcagaaagcaaattcctcttttcctttgtgttaataatccagccgaggcaaagaataaaactcagtaggccaaagcacacttaattccaagccacttttataactatttttagagaacacaccgtcaaagaacgggagcagtgagcctaacctaaacaacactaccataacttacttttctgcaatttgataggtacactacataattcttcctaattttgaacctgagtaaagatttcttttagaatatgtttcgtttgatggaatgaggattgtaatggaatcactattaccattacattctttgttttaacttttaaagcttacatcatatattgtaatcctca

SEQ ID NO: 42783 - DNA, 4455 bp, Cannabis sativa
ataaattttatgaaaaatttgaatggagtggatggatttaggatgagaaataggtaaggagaaaaggtagaagcatgaaggacccatggttggcaaaactagaggacatgacttatgagaagtcggcatctccactttggactcttgcactagctgtagcttcccacttttaatgtctttcttttaaaattattgtcactatatactattacttatatgaatattattattggtacttttacgtatactcactcatgcaatctcccccaacctcatatgtatactttgtatatgctataattaagctatatataactcaacatcactatatatcatatcacacgtgtgtcatcgatacatcccatccatctttttccaaattagacaatgattgatacacttgcataccaccatttgtttcttctatatgtgtatgtatacgtccaaattccaatactatgcatatttagaatattgctatgcatgatgtgataaatcctaataatctgtaatttaagaataatgatatttactttcatgacttgacagtttatttcaaccaaatcttatttatttttatgagattcattgtttaaattgaacctaccacatcaattaaaatagaaatataagttggcactacagccagcgtattttaatataattaattaatttatgcttcatatatttattaggtcaataatttttaatcaaaattttagtcttgggctctaggagctagactaaagcatgagcataattcaacagtactgtatgtaccgttttggtacataattttgttacaccaatcacaatttgttaaatttggacaacttgatgagccatacaacaacactaatattattttatttatgatgtatataatgaaatgaagatggtggtggttaagacttataatagggatagcacatgtaaccaataaatgcaggagagacaaaaaacgaaaggggattgggttttgaattgatcaccatttttattaaatttcatccattccacaagaatggttttatgtccccttgggtagctctcaatgtcccctaccccattcttacacacacatgcaccttaacttgtttaataatcttcttcatcatttattattatagcccttctcctctcctcccatcgtggccttcttttagccttatcatcatcatcatcataatcatctatacacaatcaattcacggttaaatctattacatagatctctatgttctttcttgttgatcaatataatcttctactctataatattatataatatcaacaacaaagacaaccatgcatataatgttagctaggtagtctctacatgtgctgtacctccatatcgatataatatatgtatatatatatatataattacgtgcgtattccaacgaatttgacttgaaattttaatttaacagaaaagaaaaaaaacaagaagtattacagaaaacgatgcattatagttaaacacacaaacacgcacaaaattaaatttgtgtacgtaaagtgatgatgaattggaggaaaaggataggtatatagtgaggttgagaaagtgatagtagacttattagctcactttttcccaatctcactatctcattattactcatccccctatattaacattaatactaattaattttgaaaacataatgaatgataataataataataataataataataataataatccaaaacgttcatacatgactaactaacaaacacaactcttgactccaaaattttgaaacttctaaaagcaaggaggctcccatgatggtaatttttgactgaaaaatcttgccacaactcttgactccaaaatttttatccctgagtcgtatttaatacatctgggtgttttgtactggttcagagaagatccttgtgaaacacaaaaatccattaaagcatcaaaggttccttccttcacaacccttatctccaatgctccaatggacttgtccttagctctacatcttctgtaaacagagtccaatgactcttctaccctccaacaacattcctccattacatcttgattcaactccaattctgaatatgctcctcctgatttgctcttaagctcccaaaacagcacgtaatggcctgggattgatgacgtgtcagcgtagctactgtactctgtcactaagaacccaactgcttcaaccacctcttttgctttcccaactgcctgtaacagatcctcttcattagttttatctgcgtcaatgcttaacaccacgtttctacgctgcacaaatctgaactgaggtgctttgttgtgaaagccaatcactcttagaatgtcacccactctgtatctatacaagcctataaatatatataaaccaaaagttagaccaaaaaacaggggaattaattagttaaatggaaattttaaatgtcatcactcacaccacctgtgaaagtggttactacgagttcgtagtaatgaccgagcttcacatctactaggtccactactacttgttctttattagaacaaccagtaatactatctttacggtcattattgtctgctggtgctactactggtaagaactcgaagtaagccatggtgggaatgagagtgtaagagacatcacatggcttgcttagtggtttgaagttaatgccgaagaaacattcggaggaagcgtacatggtcgacaccaaaggaaggcctctaccgtagaattccagggtcgagatgtattgagccatggaccctgtgacaataacttcaataaacttggttttgggccaaacccttttgatgataccttcccatgacctctccctgcattgggtttcgatcaagtcagccagttctggatttggtttgagcattaatgatgacacggcattcctacaagttggatcagagatccattggctcaactgggcagatcttatgttgcagcataactcttcccaatgatcctccaagaacttaatggctctgagaaaagcagaggcgaaaactgctccaactctgagaacatggtctcgttcgagtaaaccgcagagtaattggcagtacatgctctgctttgtgtcatcacataagattgtctcatcggggcttgtgtagacgttgtaacggttgaatggcctttttctgaagttatcactcttgtaatagcttgtcagcacaggcctcgccctcaagccagatggggtactcacttctggtttcacaaacagaagatacatggcttttccttggtccagccctcccacatatctgtcaatatatacacacatattatattattacacaactatatatataaagatcataacaggcatactaaagcttcatattcaatcacatgtatacttgttcatgatgggcacaagaaggttatagaaaaatgtcttcctctccaattcttcatgcgttgaaggcatcatctttggttgccctcctgaagttcctgagctgcatatcatgatgtgtatgtgtcataacatgtcatgtcatatatcatatatatatatatatgtgatgttatacctcgtgagaagctctgttattggttgagctgaaatgatgttggaggattccccattggcaattcggttgataaaaggcttgatatcttcatacttcacaatgggaactctttccttgaaaagcttcatatcagagtaaccattgagaaagctgcttagatattcagtggcagcattgtttgatagtatctccttcagtgcctgttgttgaaaatggtgtgcatttgtggttaggtcctccaaaagcttcataccagcttcattgtcgtttggatcaaacatgggcaacatttctggcaattcttattattctctatgtgctaagtaattatcagaatttgtttagtagatttggtatctgtctgtctgtataagtataataataatagcctttgatatgttcagcttttatacttttttgattcacatttgaaaagctcaatctgtctccacttgctaatggctattggggaagtaacatatatatgtacatattttgtttctttttcatttttttttcaatcaagaaaaaacaaaagaaaaagggggaggagagcatacttctaggacctacgcatgtggccttgtctatgtatgaaatatatatatatattatataatataatagaaagggtagggtagagagtcacctagagtagaatagaatagaggtttggtctctttttctttctttttttttttttaaaaaaaaacaactaaaagcgtttatagattaaaaatatcacacggtcattacaaaatagatttattagtattgaaaaagcattcaaataagggtaatttacacttatacattatataattttattacaatatatgtgcatatacaatatataaatggtaagtatttgattatttgatttattatcactcattattatagtt

SEQ ID NO: 42784 - DNA, 3870 bp, Cannabis sativa
ataaaagacaacgaacatccaagattaaatcagagaaactagacagatcagtggatgtagtagttagagcatgaaaaactctaagggcatcagtctctatgttggtgatgtgaagttgttgcttcagcgcccagttgaggctatgaaatagtgcttttgcttccatttcgtctgaacaaaaacaacattgtgtcggcttagaaagtgcagcaattacctgtccacaactgtcctgaacaatggctcctactcccagtttttttgttgttgaattcccatcagcgtcaatgttgagtttaagaccaacaacagttgggggctgccaatgaacctctacaatgttgtaggaactgctagacgaaggagcagcgttctcgacaataataggagcttggttgttgtgttttcgagtggacgatagtctgaatttttccacataatctttagcaaatgttgtcgtttgtttcccatcataatttttactaccatgtaaagatttatttctacacgaccatatagcctacaagatgcatatgattagctcaaaatccctttgtgaatgtagagtagaaaggtagaaaatattatcaccattgtacatttgttgtgctttcttagagtccattaggaaaccagtatgtttccaaacaaattttgcgtgggggcaattaaaaagagcatgccaatagactcccatgcactagagcacatcgaacaggcatccgagtctagcactttttgtcgatgcaatgctgccgcagttggaagagcattatgcataatcttccatgcaaaaatttttagcttggagggaagagataaatgccaaaaagtttttcaccaagaactatgcaagtctgaggtggaagaattttgttgctcatccaagattgcagccaaatgaaaaccgaacttgactatgtactcacccgatgttgtgtgatgccatactaaatgatcagccgagggaaagaaactcaaaggaattgagacaattctatcaatatccaactgaccgaagtagttgtttaggatttcaaggttccattcccttttatctgtgatgagattagcaactggcaaggatggatctcccgtataagtgattggacaaaactccgtatggccggggatccatttgtgaagaccactttgaatgtgaaagccaatccctactttaaatcgaaggcctttaagaagtagttcacgcccccaatggatgctttgccatgtaagtgatggggagtttccaattcttgcttccaaaaatgacttgttggaaaaatatcgactctttagaagttgacttagtaaggacgtaggcatgtcaaaaattttccaagcttgctttgcaagtagcgcttgattgtaattgcgttgccattggagtgttcggagagaatgacattaccgacttttgaggatttagcatttgacctgaagctttatgatatatatcaagggctctctgaatagccaatgcagaagagttagttgcttcacaaaatagtagactgtcatcagcgaagaggaggtgaaaaattaaaggcgcttgtctcatgatacgtagtccttgtaggttaccaatagcttcttcatgttgtagcgatcgtgaaagtccttccgaacagattaggaacaaatagggcgatagtggatctccttgtctcagccctctggtaggccgcacaaggcccgtagtatctccattgagtgggaaggtgaggctagatgataataaacatttaaaaattaagttagtccatgaccttacaaagcccattttatccatgatagcccttaagtaggtccactcaacacgatcaaaagccttactcatacccaatttgagtgctgagaaactttttttgccccgtgttctatgttgaatgttgtgtacaagttcaaaggcaacaagcacattatcagtaattaaccggttggaaagaaatgcacttttgagtctcagagatgacaatagggagagcttctttgaatctcaacacaatcatcttggaaatgatcttgtagatgacattgcataaactgattgggcaaaaattagccatgactgttggtgaattgacttttggaacaagggtgatgatcgccttattaattaaatccatgtccataccatgattgaagacccccaacactacatcagtaatagaagaaccaacaatatgccagtaattttggtagaacattgcagacatgccatcactaccaggacttttgtcagggctcatggtttttaaagcagcagttatctccatttcagtaaaaggggcagtgagagtgtcattgattgcaagtgtaattgaagtgggaatggtggatgtaacctggtctattgcagtcgggtctgctgctgtagcagtgaagagattggcaaaaaattctgtgataatgttggacattccttcttttgaagttgttttggtgtcgttgctgtccaagagagaattaattctattagcagcttttacgtgaggaaggatgtgcgtgataaaaatttggtattttgatcaccacttcgtagccaattgacacgcgatcgttgctgccaatattgctcttcttgttccaataattcatccaagacgctttcagacttctttatatcattaattaaagtctgagttcttgcttgttgattgttcaaacgtgacacttgcttctgtgctgtggagatttttttccttcatattgccaaatgtagacacatgacattgctgtaaagaagatgaacaagctgcaatattatgcaaaaacttatccatggcagaacctgatgcttgggacgtccattgcttctcaataatgttggcagcctcttcattttgaagccacatttgttcaaacttgaacctagtgcgtcgatggtgttgctgctgttctgaattttttatatgaacattgactgctattgctcgatggtcagagttatagtagtcaagatgtttagtcacaattggagtgaattgggaggtccaacaatcatttacgaagcaccaatccagcctttcttttactgtgttcactgtgcatctacctttgatccatgtgtacgggtcaccctcaaaaggaacctcgtttaaatggcagcagtcaagtacatttagaaattgttccatttgagcctcatttcgaagtataccacctactttgttatcattagaaatgatctcattaaagtcactgataacaagtcaaagagatagaggtgagacatctttaagtctttctaaaagagtccaagtttgagagcggagttgagtgagctccatagttgtaaaatctcagtaacagactgcaatctattgtcatcatcagcgtcacgcaatttgttttcaatatttgctatcctttctctaaaagcttgaaagaataatagtattttaactacacataaacaaacaatacgaatgaaaaataaaaataatgagtaaataaacattattgtaaatttatatttattttcactatagataaacaaaataagcatcaatagatagaatttatagaaaactaaatacttccaacagataaaattaaaaagaaaatataaaatgacttatcttgtcaaatacaattagtgtctcaagtagaaaataatttaattatttaaataagtattataactccaataactttataactcaaatagttgataacttaaattatgtttataataatctaatttaactattttacataaaaaaaattaattatagaaaaagaaaatgattgaaaggaaaaattattaatcaacacaacagtttttattcgaaaaaaatcaataagataaaattagagacactgaaataatatccttaaaagaaatgtaggcgcaatcataaaaag

SEQ ID NO: 42785 - DNA, 3195 bp, Cannabis sativa
atttgagtttgattgtaagctcctttccttccccaatctccgacgactaaaaaactcaacgagccgtcggcttttgtgggatgctgcaaccgtggaagttccgcggttgcaagtgaaatgaagaagaagaatgcatggacaccaatgaaatttgtcaacaaaaacctcaaatgaaattccattatatcaattcctatgtacacaactatgtttatatatataaaatgattaagatgatgaaaatgactaattaattccttcacttttatttatttatatgatgtttttttttgtacgtgtacatagaagttagaaggaaataatgttgcatggcaatatatgggatggtataatatctaatctatattaacaaacaaaaatgataatgaaatattatgtgcattattattattattatgtaagtgggacccaccaaaggttattccttccctataccaatcatatctcaaagaagaaattggtgatgtaagagataagataattattggataggtgatggtgttgtgtgtgttgtgtggggctctcctttagttttgttttgtagacaaggttgagttcatggtagtttcctagcaatttcaaattgatgagatggatttgtatacatgggctagaaatggccaactaatttggtttttctcaataaaaggaaacttccaaaaaaaattgaggaataagatcaataatacaatcaccaagttcaagatcaagatcatgacatacaagacatatacacaatgatttttatatcatgtttatatttagtgattagacaaaatctctttttcactatgaagaagatgatatatgtagaatcactagtactcaaactaaatgtatgttccttaagggatgttaccatgcaccaaattgaagaatttagagttgaaagaattcagactttgttttgatttagtttctgctttttgcttttagtttctcaggaaattcattttgagaaaactactaaaattgacttttattaaaagagtgttttagaatttaaaactaaaattcactgattacccaactagcaacataagtcatttttgagcttaagcccaaaactaacttttaaaagtctagctaaccaaaatctaagtgttaaaacacactgaatttttattaaaattcaccaactgatcagaatcgaaaccatactagtaaaattaatgagtcttgaaacgagtgcaatgcttggagggaagaatattaagctatcatccgcgaaaaataagtgtgaaatttggtcttaccaaattgaagactcaacaatagctctgtatcacaatctttctttaccagtgtggataaatttcgcaccataagaaaagaagataggggattcccttgccggagttccacgataaggaaccaaattatcaagaacttcaccattagttaagaactgaagagatacaactaattaagaccaactgaaacccaatactcatggagcctaagtttcctcatcatctcaacaataattaaacacccattcaaccctacaaaacggctagttttatggcttcaatagattttgagtttggcattatgagttgattgaaactcaaatgagatatatgttattatatgagttgagattgtaagtttaaaatagttggtgatttgagttatgaaattagagttcgttttaaagaaagattgtgaagattttttttgttggaaggagtgtaaactctatgtattcaatgaggttttttttaagaaatgtgattttttgggttaatattatatattttttcgatcatatattttacaaaaaatactaattagactctctattttgttagatgataaattgaacattgtattctttcaaatcgtactaaatagtatcctgaactcaatttttaacaatttttttttaatataaccaacttgaagataatttctaataccaacatatatagaaaatgcaatcagtcttgtcataacatctttagatcatactattattaaattttattttgacaaaatatcaactcaggatacattttgaactatttaaaaaatacaaggtctaatttctcatttaataaaatagaagataaatcaccaacttttgcaaactataagtttaaaatggtatttaatctttccttttttctcctaaaattagtcaggataagtttataatacatcccccttaaatgactgttttgatagacctcctatttatctcagcattcaagaaaaatttttaatctaattttttttttttatgatcgtgtactactatacattataattatttatgactacttgtaaattttcaaaaaaatttaaaataatttacaatgttgagaaataagaattaaatattctattatatgcccaactaattttttatatacgcttagtaataattatttgaaccttatttttaaccttataaattatttaaaattttcaataaatttacatataaccctataagaataatttgatgcaaaaacaaataaagaatttaagagaatacctcggagagtgtacaagataaatttggtattagatattagattgtagttagaataaataaagtatccaaattggaatattctagtcatatttgttgtgcttaggaataagagagaatatgccatagtttgaatgacttatcccattcgtatattcgaatattacattaacttcctttgcccaatactactcacttttggactctactactcccacattaatatccaaaaagaaaaaatatatgatcatcaaacacactaattaatgattattttattatattttttctctctaaaattagaagataagtactaattcttactataatctcttaatttttaaaatgaagtggtattcgttatagttataatatcattctatgaatttttaaaaattttaaataatttacagtatcgaaaattaaatttttaatattttaatttaacactcgtgtttaaaaaactttatatctattctcggcactataaattatttaaaattcttataaggatgatattatgagtataacgaatactgttacgaaaaaaatatatattctaatatatattttcgggcacaaaaattgattaagaaattgtaataaaagattaacagtaacactccataaaaataattactcctaatatgagaccaaaaattaaaaaaaaaaaa

SEQ ID NO: 42786 - DNA, 6296 bp, Cannabis sativa
ttggattggatcagatgatgattttccaaatccaattactaattggattggattggatgaggaaaaacaggttggattggatcggatgcccaccgtaaacaatgctccccagattttgaaatataccaaagcatgccctttgaactttgacatgcactaaattatgcccttgaacttttatctatgttagatttttttgattaaaattggacaaaaataatctttaaatccaacaatcttaaaagttcaggagacattttcaacgaccttaaaaattcaaaggatataatttggtatatatcaaagtttagggatatttttaacgattttaaaaatttaagagacataatttattacatgtcaaagtttaggggtaaaaatcttaattagactgaaatttataggcaattagcattttatattggaacatactttataaatataaagtatggtaagagttttttctcttgctactctcgtttgtgtttagctttgctcctttaacttattttaatggcgtcttcttcatctctctcaaggttatcgaatctccgcagacacttggacccttccaaaacttcagataacaacaaggttccattttcataccccaaattcatcataattggctttcgtataatattactctagttctctacttatatcattcgctttccctctctttgttgtttgtaatttatatatatatatatatgtatttatagggtgtaggattaatcaaggtttctccggaggtttctgaagccttgtcaaatggaggtcctgttgttgcccttgaatccaccattatttcccatggtgaacccacttctctattacagttttttcttctaatatgggatttgtttgattacttcgtctttttaaactacagttagtttttgtgttgtcatatatgactttgtgaaatgtgtgcataaaactatgatttataacctgttcacaatgtatatgacacataagatttcagactcaatattgttttctatattctgcttgcatatagggatgccatatccaaaaaatctggaaactgcaaaggaggttgaggcaattgtgcgaggcaaaggagctgttccggccaccattgcaattttagatggcataccatgtgtaggtaaatattcaacttttctcttcttttcaagacaaattttattgataatggggcttatttttattgcaattttattacttggtgtttgaaattttcagcctaagaagtttgaagtaagtataatggggtttgagtgattgcagtgaacattatttttttggctattgctttggaggtcatatcactttttttcttggacagttctgtgagttattgcatgtttaaatccaatcaattttgctttaaaaatgatttgagtttgttataattttctttaataatggttttaacaaagtcctgatataataataggggagacctatcatgatgaccaagtattttcattatatcttattatgttggtaagtagaagagagaataagaaagcatttgattattgtttttatgattgaagttttaagcctatataaactttttgtgatgctttgataaagaaaatttggtaaaggaatatttttagttgttgaatcaaagtgttacccccaggttgattggtctacaatcttaattatcctgtgattttgccagatattgttggtatgttaaagatagtggcttgtagctgtaggtggtctggaatcttgtattgtttgccaacgtaagtctctagctgctactgtatagttgatggttcgtgattgctcttttaatattgctaaactattgttttataggtttgagtgtggtagagctagagaggcttgctaaccttggtacccaagctcaaaagacagctcgtagagacattgcacatgttgtaagtgattacttgagaatattaagcattggttgttcaggttacttttgattattttctgtaacttctagtaaatgaacatgctgatgtaactttctttgaagagatatcattaatcctcttcttctctcgaatttgtcttggcacttttattagaatgatagaaatcaaatataaggtccaagtgttcgagaggtttggggctttccatacaagaggctcactccatatctgctttccccactgaatgatttctaaactatatatgcacacacactacagatacaactcacaagaaatttgttggtgcttgtaaccatggccttcctccgccataagcgaggattctcaatatatttggagacgagacatgtgacctttgtctcttttccaaaaaaaaaattaaaaagaacaagtaacattaaaaaccgcacatgatacattagcaccaaaaatgaatggcgtacaaattcccttattctaccttctacaatatgtgacaggtgtgatgtacaagttcacttattcatcattctataatatgtaaatcagaccgggggcttatcaaattattactccataactatagtttgcttgtagtttatcatgtccagcataattttatgtggtgactaacaaggctctttcctaggtggcctccaaaggaaatggcgcaactacagtatcagcaaccatgcttattgcttctatggtgattactttttaaattgtttaaaaccagtttatttatttgttaaaaaaaaataaattaggatattgtttgattactcaagcaactgggtacatatttccaatttgtgtcattgcacatttttctattactcaatatgaaaattgtttcaggttggcatttcagtttttgtaacaggagggattggaggagtccacagacacggtgaaaacagtaagctaatctttctttccttctattataaatcatttcagcttgtaataagtatgtattattgagtaaatagcggctaaaatacccaatgtttttcaatcttattattttaacagtgaatgcacctaatattttcaaaatgttgcacttttatacctattttttcttttcaaaatgtctcaaaaatatgtattttgtcactactcactattaccatctaacagttttaaaagagtgtttaaaagtgcatcattttgaaaacattgagtatatttaccgtttaataaaaaagatttatgagtatgaaagtacaattttaaaatattgattataagaaaaagaatgagtatagaaagacatcaatttaaatacattggttattttagccgctatttactttataaattattcatgcttcaactcatctttcccacatgtactgtagtcgtatgataacaatatccctgaatctaacttgacactgaaatttacgtaattaggaaagtgaggaaaagcgaatgatataactagagtaatattaaatagagtgatattataacaataaccctttaggaataataatcaaggtcacattgtaaggttttaagttgacatgctacagataggccttgccctgaaaagctccttttgttcttgtacattttcctgtggtatttagcatcagcaagagggcagttcatagttattattgtcttctgtagttgtagagatcatttttagtttcattatttacactctaggatgtatggattgattactcccgtagtgttattagatgatgaaagagctttgataccatttcattccaaattccatctcatttgtttgttttattttagttatactaattttaatttatgccttattatataagctcgttaaatgttaagcatgatggttgtttattaattgttgatgtatcttcctttgtagcaatggatatatcttctgatctgactgagcttgggaggacaccagtagcagttatttctgctggtgtgaaatcaatattagatataccccggacactggaatatttggtactatctatgctccgtgttaataaaaccactatatattatgaacagtcgagcataaatccattatattaccaactattatttggtttttcacatacgtttctgtaggagactcaaggagtttgcgttgctgcttacaagaccaacgagtttccagcattttttacccgaacgagcggctgcaaggtattattcaataatttatcggtttccttattgtattaagatgactgtactctaggaacaggtactgtactatttgttgggaccctgatatgagtaaataaataggttccttgccgtgtagacaccgcagaagaatgtgcccgacttattggtaattggaaagtcaaattatgcttttattgtaacatttgtcttgcaattgtaaagtctttggttgtaacctctactctttctgtttattattcatgtaacagatgcaaacatgaaacttggtcttggaactgggattctaatcgcagttccaattccacaagaacatgaagcttctggaagtttaattgattctgtagttcaaagagctctgaaagaagctaggtaaaacaaatatctttagtgcgttatctttacctcttattgtgggttgatttcattaaacatcttctaataatatcatcattggggtttggaactatttctcagggacaagaacataacaggaaatgccgaaactcctttcttacttgctcgagtgaatgaactaacaggaggtgcttctctttcatcaagtatcctttcccaattatggttcctgttttcggtactatggaatctagtttgcgttgtcatatactgttatcatcatatgttatttatgagttggatttggttaaacaatttcttaactaattgttagatattgcgttggtgaagaataatgcacttgttggagctgaaattgctgtagcactttctcaccttagtgattagtgtaacaaaggtattaatacttgtagttttgattaattgattgataacattaatgaaaggagaagaaaagcatttgaatctaaacggtaacaacaccttggacatgacatgatttgcatttcaaatagtgatattcattaaaaggctgtgttatctcatctggttttttttttggcaggtgattcggagttgattgtcatagattatacaatgcacatctgtatcagaaaatattatcatcgatattaaaaattacactttgagttgacagtaacaaatttattttcctattatttaaattttatactagttatgtaggattttaactcgttgcactcaataaaagcagtttttagtattatttgtagtttgttaatgttaatgttaatgttttttttgtataataacaaaattttaatcttgactgcataaaagaaaaagaccatttgacattataagaaactctctctctctaagaaactctctctctctggcgatggcgaataacgattcaaccatgctctcttcggaagagcctaatcataagatgtgctcgggaagcatggatcaaatggaggaactgctatcccgaacaagtaaactcaaagtcaccgatgatgagggctgggaaatcaatgaagaaggggctgaagacattggcaaatcatgtcttattggaagactctgcactatgaaaccatttagtcgttctttactgaagaacatactttgcagattatggaacttgggggaattcgactgggacttgaaaattaagaaggtaactgataaagctttattcctaaccctttcattcaaacagaacaatcatcttgaaagaatcttgggaagaacaccatgggtgttgaatactgggttccttattcttgaaagaatgaagggaattccaacagaatggaaacgacattgacaacattcatcatctccgggcgagtgttgaatttaccaatcaaagcaatcacaaagacaaatatgctacgattagcaagcatggcaggggaggtgatagaaatccaagaaccagatacaaatcgaataacaataaatggattctttaaattcaaagtcaagaactccattcaatccaaaatttttccaggatatttgtttcctcatgaaggaagacgtagatggcttcaattccaatatgacagattaccatatatgtgtttcaattgtggaaaaattgggcatgaaacacgccaatgttctgaagatcgggcaaatgtaatgaaagaaaatggggaagtggcccaggcttatggtacatggctgaaggtggatatgacgggaaaacggagactcctaacaatcgagagacacatatccacaatcaacaagacagcaagggcactctaaacatcagtccatctcaattaaatccataaacattcgaaggaggagaggaaacaaaccaga

SEQ ID NO: 42787 - DNA, 4931 bp, Cannabis sativa
attaattaagaacaagaacgaagacactaacaataatctaaatattaatctaaaattataagagcccatctaacatctttaaggcacttatttgtaacatcaattatagtgttgtgatatctctaaaaaacattgatgtacgtacgtaattgaggttcttctaagtaacacagaagaaatcatcgtaggctgatgttgataataacgataaaggtgatgaagtgttactatattttgcagcgaggcaatgtagtcgaacacgaaagaaatccaaagagtttgaataataaggtatgagatcgggacaaaggcggaggccaaaacaattagaagtatctagcaacttggtacagcaaggaggagatattgaatgattcttatgtttgaagttagacaagtcatcaatgcatgatccaatatcatctgattgatacacacaaatatcttgtttataccattcatctatttctcccactagtacacctcatcaatatgcagctcaaccacaaactcaacacaataattgataataaatattgcttcatcgtgaaaattattaatatcaaagagagctttatttagcagatcgatctaaaattttttttgctgaaagaatgatttaagttttttagttgatcatattgtgtttatatagattttttttattagatacctactgtgaatatatcacgtaaattttaaatattttataattagtttcagttatctttttttaaaaaaacaaacgaataataaaatatacaaaaataatttgtattcataatattttattttttaatgagatttacaggtcaggccggaagatatttttattagaaaaagtagtgtttatttttgaaaaaagtcatagatttttttttaattattatattttaaaatataaaagtttaaattaaatggatataattaaaatgctgaaatttaagtaatactgtagttttattattaagtccagaaccaattgtccttgttgttatcgataccaaggcccataggcccaataggcccaagcccaataaaagaagtaagaaaaagataaacctaagccttaacggcacccctctctctctctctctctctctctctctctctctccagaaaatctgaccggtgccgaccctgttgcttcgattcacggcggctctctctctctctatcgaaaataacgaccagtgccacgcagcagctcaccttctctctcttgcttcctgagcaggtcagacatagagagcagtaactttacttacactctggtatgtatattctttctttggttttcaatgaatgtatggggtttgttatgatttcgaagctttatgccgattttcgaactgggtatgtgtttgttttggtggaaaatgtttaaacccctgttaaaaatcgagtcttcaattgaaataaattaagagttagtaaagcttcaggtagaaattattatcattagttttgttttctcaactctaagattagatcgaataaaacaaaaaattcgggagaaaaagaaacaactttctgtgttatgaattatgatctcatagggtctgattgtgtgtatagttgttgtagttgtttgtataatgtttgataaaatgactctgtgaatagttggcttatattttgaagtgtacagctttgtttgtttttgcattatgtaaatgattgatcattgttttcaagtgagtgcagattttgctcaagtatgattggtcttgtctttgtgttgtgtcgtgttcatctcacaaacattgtttaaaatactaaatattgaacttgagttacttatacttagaccatctccaatagagtgctagcatagtagtttgaattagctttccaatagtgtgctaaattcggcccatgttaaaaattataccaaatttagaacaagatattgcattggcactcgatgaatatagctttttaattacggttttaacattgatcactaaagagaagtaaaaatacatattatttttattataatattttcattaactattttttaaaatctttaatttattgatgatgattaataatattttactttttgtcatgatttgcatctttcatcttacattttgtgttaaatttaacacaatatttacatcttagattgaagatggtcttatatatctgttttgtgtatgtgtgtttgtgcatagaatattgtgaatttttatgcaagcgaactacacatagagcaaggatgaaaggtggaaggaagaatttgaaaagggatactgaagaagtgagcttaaattttgaagatggccatgccataatggaagtgttgtccctcagaggttctaatctcattgaggtattcttgtaaataacttctacttgtatagcatggcttttattctcttagtttccatttgtggtggtctatgtgatcatacagaaaactcaccttgatatgactgtggtgtaattataggtactagattcacaaggcaagaaatcattggccctttttccagctaagtttcaaaagagcatgtggataaagcaaggtgtgtgtctgtgtgtgttgaaataatgtattatgtataagtgtgtgcatagattattgtgaattggttgatttttccatgagttgctataaacactgaaatacaatattcaactgaaagttttcgaaatacaggtagttttgttgtggttgatgacagtgggaaggtgaaggctcttgaatcaggcagcaaggtgacatgcattgttactaaagttctcttctatgaacaagtgcgtgctcttcggaaattaccagactggtatggttttttttttttttcgttttgttttgttaccaatttggtttgctaccgctagtcaaaatcagaacttggcatagtagttatgtcgtagaagatccttttttcggtcaataatatgtactgaaaaatacataatatcctttcttgatttgttaggtatttttgtttactaatcttttgatgttagttacaactcttctcagtagacatggtcttattgaatcaaaatgtttagaaatttcattttagtctaaccaatgtgttgaccttgttgtttttatctctactatgcaggccagaagtcttcaaatcgactgttttggatgattctaacggaagtcgagagggagagacttcgcaacgagaagggaatgatctcgtatcgagcgatgatgatgatgatgatgacgatgatggacttcctcctcttgaagccaatacaaacagaaacagaccgattgaattgcaagaggaatccgattcaggttcagactcggattcttgacaattcattctttccattgaattagaattagtgagataatagcaattttatatatagttatatacattttatattatataactatatgatatcaaaattttgaatcagaaaaggtgctgaaatgcacctttttattatactttgttctacagtcaattcatttattcctactatatattctagctactcacacaattacgtaatgattcaaatgcactaatttcttttgtaaagataatcatagaattatgacaatacaaattctcatgcaatctaaaaagagagccctcatgcatagcttcaactaggaataataatacaagagtcctcttcatcgaagtcgcgcgaactcattgagacttggtatcatgttgaaaatccctcgagaaggatgaaatttgaatcccttgagcatggtgcccttgctctatatcccctattcttttaatcgatctctttatgtgaatgagaaactacgagatggcgtcttataattggttagtgattctttatagtctttattaaatcaaaataaataagacttgatattatattagagcaatagtgatattatatgtcacaaagatgctaagtactgtgagtaacttatagcaattctctttattttttgacaaaagactaatgcaaaagtaactttttctccacatcaaatttacacttcaaatccacagtcgtggtctctattgtgcaatatttagcacatatatacataatatttgtcttgaaaattatatcaccttgtatatgtagtaagaccactttaatgggcgaagatgaggtttgtgcaatattgctcaatgttcgaagagtgggaaattactcatatttctcgaatgtgcaatttcgcagcacacaatgttgcaaagtgggcagcaatggggagaaaatctggagcctttgtgcctcatgatatggtttcaggagtcttggatgatttaagagaatgggacccgggacctccaaaccaattgtcaagtggctgagctgatgaagtttctgatgtagttttagttttcttttgctgtttccagttttttcttgcatctttttgtaactgctctgtttttcgtatttctgttgttttagactcttgggcgtttgtttttgctgtgtcttaaatgaatgggtgtcctgggacacccccccttcatcaaaaaaaaaaaaaaaaaaaaagaccactttaatgggcaactcttattctagatgctctaaaggttgatgaagcttttgaccaaatttggggtttatatattatttggctaaaattgatgtaaaggtgtaaaacaccaaaaactagttttttttaggtgccaccctctcaaagattcaaactttaaaagtaggttgtagagattttttttttctttttatcttttcccatgcaaggaaagatattttattgaatttctgcatgttcaatttgtgaatggaaaaattgggggggtttcttgtttgatgccttaaaaccaaattggtgttatgttattgtaaatgtatattttggaaattggtgtagcatttttcagtttttcaactttcttagaagaaatatttgtggtgttaaatgacatgtattatcatcaaagcaggtaactataggtgtt

SEQ ID NO: 42788 - DNA, 1830 bp, Cannabis sativa
  modified_base (1710)..(1719): a, c, t, g, unknown or other
tatatatatatttatataaaaatagttcaactgtcaaaacaatgataggatgtgatgtcatataatatttcttcttttttcatagtgatttcaacctttctcattgttatgttagtctttgtctcagattgttacactaaggacttttttgcaatttctttgtagcattaaatacctctaaatatgaagttttgtagtcattaatggaatgtagaatgagataatacaactttggttcattgggagattagaactgtctctaagggagtgagatttgggagatttatcttgtttcgaagagaacctattacctatcacaactgtggttaaagttagtttttgaatagaattaatttatggaacttggtgaaaatgatgatttttgttttgttaggatcttagtatagcttagattgagtaaaaatgttgctgaactcagttataaaactcttgtttgagctcttgagagggctaatctgatgaacattggtgcataatttgtgttataacagagcagtagccgagtacttatcaagagatcttccttacaagttaacatctgatgatgttttcatcacatctggttgtacacaagccattgatgttgcattaacaatgcttgctcgtcccggtgctaacatattgcttccaaggcctggttttcccatttatgaactctgtgctgcatttagacatgttgaagttcgccactttgatcttgtccctcagaatggatgggaagctgatctcgattcactcgaagctttagcagatcataacaccgtcgctatggttgttataaaccccggtaatccttgtgggaatgtgtacagatataagtatttggagaaggtatgtatagctatatgacattgtgttttctgttgtttacttgtttttcttacttttaatggttatgttcattcaatttaggttgcagaaaaggcgaaaaagctgaaaattcttgtgattgctgatgaagtttatggacaccttgcttttggagacaatccctttgttccaatgggtgtgtttggtgaaactgttcctgttcttactcttggatccttatcaaagagatggattgtgcccggttggcgacttggttggttcgtcacaactgatccttgtggcatgtttagggaaccaaaggtggttttctagcttaaatgatttcaaaacattgttatgtctccatacagattaaatgatgttaactcattctacttgtgttgtaattcaggttgttgagcgtattaagaagtatttcgatatcttgggagggccagcaaccttcattcaggtcagtattttgaatagatttcttctgagattatgtaaagtggtactaatctctgcaattacattctgtcaaaggctaagacatgtatgttacgccttgatattagtctcggtagtgtaattgaataggatttttcgaggttggtttggggtcgggccttcttttcacactattacagatacgaaaataataggaaacattggatttgattgtcaactgttcctatcagaaataggatcaactatggattcgagccatagcacatggtttcataaaatcgtacaacttttcccattgtagattcttgtccaagatttgtatcatttcatgatgtcatgtgaatccttagaaacatgtgaagtgtatggctaatccaataacaaaagtttcgtaagggaactggagcnnnnnnnnnngagacaaaagattttctttctaaaaagattctatttgaaattattatatatccaaagctcagtattgaaataattttagagtttttgcttgactttgtccatgtcaacaaa

SEQ ID NO: 42789 - DNA, 1622 bp, Cannabis sativa
aataaatactagatattgatgagccttgtcttgatcatcgcttttgtagtgttagatgtacttttcatataaatgggtgactggtgagggtgtaataaattaagtatagtataagaagaagctggtagggtcgatggagagagtgacatgatcatccattcatgttttggcaaaatcaaatgagggttttgtgttgtgggatggggtatatatatattatttagagaatatataagagtacaaaagcatggtaggtccatatttggagcaacttgtttccgcacgctttacattattatattattcatccaaataatacaaagcgtcctctcgcttctctcaaagtgtgccttactacttatttatgtataaacacatttaaaaatatacataaatgcttttgtggaggagagcagaacatacaagaacaaaaaacacacaatagatacaaatttaaatattatacaatacactactttttggtcgtgagatatatatatatatacataaatatatattaaaaaaatcctataaaatattagagagagagagagagagagagagaagagataataacaagtacaacttgaggctgagggtatcatccagcattttttttttttttaaaatagagagagttgacattaattgtgtgcttatgtattttaatacaattcaagttaggagaaatatcaggtaaagtatagctatatagctagaaatatgcataattaattaaaatgggcgaattataagtggatcggcgtgtttatataacacaataaaattaaagaaattaattttacaaaagttcttaattttatatacaaattgcatgcacgtaaactcttaataatttttcttatattatatatgaaagtgtatctaattatgttagtattttgttggtttctcgtcattgtgtaccgctaattaaggactaatcaaaataatcacgtgagatcacgttgagaaaaagagaaggcactaaagtttctaagcacatatataaacaactaaaaaattgtttattagttcctattgaaaagaaaattaattaattattaaattaatttcacagaagagttaatttgttcaattaaaaaatcaaccaaacccacctgaataccccaaagtagatgattttaaaagcatcaataatatgtactattaatcatgctcatgtgtaagatatatttgaaaattcggtcgattgtgtaaaacatatcctcttgacttttggtttgattgtaagggaactacccttacaattttattatttggtttagttttgaattttttttaatatatttataataatttacattacatgtactatttttattaataagcatcgcaaactaaacactattatattacactatttatatagaaacaaaataattcttacacttcttttgtacttttcctttacctaaagaatttacacatctctcatcttttgtttgttaacaacaatttttcttttttcttcgtactattaatactcagggggcgtttggtataaagtgttcaaaataatttgattatagggaatattatgaaggaaaatatgattataggaaaatgtgtaaactgtgtttgattgtgtagggtaatat

SEQ ID NO: 42790 - DNA, 1507 bp, Cannabis sativa
aaaaatactcatgtcaccaatcaaacatgtacttctactagaggttttgctctttcaggactcctcacaccagctctgacttggaaccccagtttcaaaagctccctggataattttgagtgcttaaaagttttagaacaaaatgacaagttgaatcatttcacataaatggagaagtgacacaaaattaacctcactagtcgcgagcctactcgaccagttgcaccggcaacaaatgcaaggttctcatcttttgagtcctttggagttgcattagatgtctctgagcttaattttgttgtccctactaaaaatattggatttcagatacattatacgatggtaaagtataataaaacaatggagaccaaattttcatgataacccaaatataaagaacaagacttttagtattgcaggaattatactcacaagaactttccaaattaacaagcaattgggatcaaatgtcacatttatttaaatacaatatttccatttcactaatactgtatataattcagtaaaaagaattgtatccaatccaatccataaatagtattactaaaactttactaacatttctacatgattccatgaagaaaaactcaaccaaatccaccatttaaaacaaaaataaaaaatgcccatttgaataaaaatgtgaagggaaataaaagttaataaattgtatataccagaagcttgagcagtgataggaagaaatttgaaacttttgagatttgggtctctcttggaattgggaaacttaagtaggtgattgtgtaagaaaggtttgtctgagagggcattaattctgggaatggaggaagaagatggtacaaggttcaaagctgatgagtgaagagagcaacaaccctccattggcttagctgatcaaactcaaagcctcaaatttgaaacaaggaaagagacaagggagagaagagaaaagagtgacttaaagttgaagttgggagttgggagtagtttttggctcaccaatctggatatgatgggtcccatgggaattccctagtttcattttgcacctgtggtcattttaatttattatttattttttaaaagataataatgtttttcttcttccaagtgcttgaagggacataaaaggtgattagaagtgaataatataaagctgaggtttttaaagatcttttccatgtgtttgtgtatgttttttactcttattattgaaagtgaaaattacaccaaatatggaattttataaaaaagtttaataaatatggtattttaaactttaccacccttatatggcatttgttcaaagttaatgttttttatggtattttatttgccacttttttgtaaatttaattttcaaattccatattctaggtttgtctattcagccctaattttttcaacttctttctctctagtcggctgcctctctcattttcttctctgaggaagaagttggtcaggctccgagtcaagattccggcaccgttcgcaaattatc

SEQ ID NO: 42791 - DNA, 2040 bp, Cannabis sativa
  modified_base (117)..(118): a, c, t, g, unknown or other
ttattcattataacactgttatagtaccggttctattttaattataactagtttgagttattttatgttatttatttttatttattatgttacaaaaccggttatatttcaattatnnccggtttgagttattagtttttatcaacacgttagaatcacttttagaattatgtttagagcccaaattatcttccaaaatagaattatctttagaaaagttatttgttaaatcatccaagtacttggcagtgtacaacctcgacttttcgaacctccagtactaacaatcctcatgaatggaggagcaaagaggaatagagagaataaccatcctagaatctcaacatcccaatcacgagcatcgatcttcataaggctagaaattgtattatcaattaatctcgaatgtgtagacaaaatataagggtgatcaacatcagtaagctaaggatccttcaaaatactagctgagagaccagcaccaacacttttacacacctcggccaccaccaagtctctggcttcaaagatactttgctagacgaagctcgaattagagccaatcttcactgtaagaaaagaaccactaggaagatagcgagcctttaaaatacgagtagccgaagacaataggcgagtcaataaacgccaaccttatttgtctaggagcgccatattaaaatcaggaaggcttcgaaaacccaatcctcctacattcttgtgcttacacaatcttttccaactcatccaactcactcccttttattgaggcttattcgaattccaccaaaacttagctatgagtttttccaattctttacaagttttaatgaaaagcaaaaatacactcataatatgatttgatagagattgaaggatctcgtggcttaaggatggtgataaatgctctaaatttttcttcctttctgctgcgatcaaaggaagaagaaatgccattgactgcattctgaataaaaacaatgagtggattaatgaccgaacactgataggacatgaattcctggactttttcaatagcattttttctggctctgatagcaatcgcctgatggactgtgattatctatttcgagagaagatttctatcgagaatcaagctgacgttgtttgttgcccttcccgtgaagagattagaagaactttgtttgccatgagtaaccacaaggctcctggccctgatggaatgtcagtgctttttttcaaacactactgggagtccgttggagatgacttctgcgatgctgttgaagatttttttgtcaatggtcgaatgcacaagggggttaattcgacgaatgttgttctcatccctaaaatgcagaacccgaagaaaccaaaccatttcagacctatctctctctgcaatgtgctgtataaggttatatcaaagattattgcaaataggttaaaaccaattctcccttctctaatttgccctactcaagctgcgtttgtcccaggaaggaatatccaggataacaatgttatggtgcaagaaattattcattccttcaataggaagaaaggtaaagaatgtttttttgcgatcaaaattgatcttgttaaagcatacgatagagtgagctggaaatttattgatcaagttctgcgggagctcggtttccctcaacaattctgtagttgggtttctcaatgtattaccacttcctccctcaatatatgcctcaacggtggccctgttggtaagattcttccttcgtgtggccttcgtcaaggggacccgctatctccctatctgttcatctgtgttgcggaagtgttgtccagacttttggaggatgagttaggaaaaggaagtatccatggtatcaaattaagtagagggggcccggtgctatcccatgtcttctttgcggatgacctaatactggttggtcgtgctaacttaattgaggccaaaggtttttggaattgtcttgagaagttttgcgagtggtctgggcagaaggtcaataagcttaagacttccatattctttagcaagaatacccctgatgg

SEQ ID NO: 42792 - DNA, 5147 bp, Cannabis sativa
ggtgtaattaagtatcaaattctccgtagggaataaagcaaatcaatcgtagggcgccacctataaaaagtgttagacactgtatatgtctaatagcaatgttttaaattatatgagatagaataattaattgcaccaatagcgatatgatttatttgtttttagtccaaataactctaattatgattattgttttcaggtatccagatgatattaaggatcgcaactggagatattatgatgtgaataattttggagcaaactggactacattaagcacaagtctcgctgtcaaccctagcttaaactacaagttaccacctgtggtcatgagtactgccatcacaccaacaaaacccgatgaaccactaatttatgagtggtcaacttacagtaataaaaaggccgtttattcatttttgcactttgctgaagttgagaagctcaaagctaacgaatatagagcttttgatatctacatgaatggagaacactactttgggccttatgcccctaaataccttgtcgtggatactttatacggtgataaagctctccctataccttcaaatatttttggtagttacaatttcaccttggtcaaaactgcaaattcaactttgccaccgatcctaaatgctattgagttgtacacttcgattgatttttcacagttagaaaccaacgaagaagatggtacgtacttataatattttaagatacatatatggatgccttttattttatttaattatcttatttttatgtttgtgtttgtttgtttggtcatatgaatgattgttttgactactttatcattattaatatgtgtgtgtattagtggaagccattactatgataaagtcaacctacggagtaaagaaaaactggggtggtgatccctgtggtccccaaaaatacgtgtggacaggtgtaaattgtagttatggttctgatcctccaagaatcatatctttgtaagctttactaaattaatatataccttaaattaatatattccattaattttattagcagtttcattaataattgtaactatcatatgtaatttcaggaatttgtcatctagttggttgagtggtgagataacctcgaatatatcaaagctcactatgttgcaaactttgtaagtaataaatgaactcacaatatatgaattttgtaaataaatattaccaactccaattaaattcgattttatcatatacactaacgcaactgcacatgcacgtgtgtatgtgcagggacttattcaacaacgacttagttggaccagtgcctgaatttctatcacaaatgccaaacttgagggtcttgtaagctactaacaactcatgttgatcatgactttttgttaattaattaataaaaagctgtaggaaagtatttttatttacaattagtttttttttaaaactatgtatatattaatttatttattttttcttcaagaaacttggcaaagaacaagtttacaggtcccattccagcagggcttatagcaaaatcaaaaagtggctccctatcactaaggtaaatgtcttgtaaaatttattattattattatttttaataaaagatgagaaaaattatatatataatgtatatttaattagtactttggcattgtttgtagattaatttttaattcaagcaaagatatattcttttttacaacttaaaataactgactaggacttcatatataaattttgtagcatcgatagtactgatagtgctggtaacactgacgattgtacctcatctacatgcaagcgaaagaatagtagcaatattataattccagttgtagcatccattggtgggttggtcttgttgcttttagtagcagctgctattctatttttcaaatggagaaggatgcaaggtaataataattgtaataacttaagtgagaattaatttgctttcaagaattatatattaaaagccaatacaattttttttttactatttaatattgtctccataattatgacagtggcatcaacaaaaccccaagcaacatcagagccagagatccaatttggtttaattgagtccaaaaaacgacaatttacatactctgaggtcctgaattttacaaacaattttgaaagaattattggaaaaggtggatttggaacagtttatcatggcttcattgataacactgaagttgcaatcaaaatgctttcttcttcatctgttcagggctatcaacagtttcaagcagaggtatatatgtatatctcttttttacatgcaattagcaaactctgtatttgttttaagcactatctaatgcatgatgtgcttgaatttgaatttcaggttaaccttttgatgacagttcaccacagaaacttgactagtcttactgggtattgtattgaaggaaccaaaatggcattgatctatgagtacatgtccaatggagatttagacttgcttcttataggttcagtttattattaacatttcaaaacaaaaaaagaaatttctcatttcctagttttattgacaatttgcatgcatgacacaagtgactttatctatgtgcagaccagaaaaatgaaaatgtattgagttgggaaacaagacttcaaatagcaattgattcagcacaaggtctgtaatgaaaatttacacctattattttaagttttttcccttattatctgctcaaaaactcagtacaatctctaacattcattaaaattataatggattgatatatgtaggattggaatatctccatagtggttgcaagccaccaatagttcacagagatattaagaccacaaatatcttattaactaacaatttccaagcaaaactagctgattttggcctctccaaaagctttcctacggatggtggtacttatgtgtctactgctattgccggtactccaggataccttgatcctgagtaagtttttgcattatttatttttacacactagtcttcattaaagacggccacttgtcaaaataatgaaaaaactttgatttactgaattttgcagatactctataacaaaccggctaaccgaaaagagtgatgtgtatagttttggagttgttctactccaaataattacaagccgaactgccattctatgtagaggcagtgaaaggactcacataagcacatgggttagttcgatgcttggtaatggagatgttagaagtattattgatccgcggttggaacaagattttgaaactaattctgtatggaaagctgttgaaatagctttagcttgtgtgtccccgaaatgcagtcataggccaaatatgagccaggtagtggctgagctaaaagagtgtttggcagcagagtttgctcgaaaaaaccacagtcgtatgactgactccactaattcaacagaagtgttctccagtactaccagccttacctctgcatttggtcccttagcaaggtagtagtatataatactatatatttttggcaaaaccatgtatttgtatcttactataaataagtttccttatgattcttttgtcgcatgagttggattagttaatgtgttatttatttttatgaaatggaatttatgtattattgtgtttcatgaatttatttgttctctattaataaattgtctcgcgcgctttgttaaaaataatcacgggtcatcatttcacaagaatttttaatcaaatagagatgctttaatttagagtaatttgtagtaatttgtggcataaatatttaagtttaagtctcataattgtagataaatatataagtttaatttttgacagtaataatacttaaattatatatattttcagaattttcataactacctaaccgttaagtgttaaattattattcacatgtcgtttttttaattagtatatttaaattaatttttaaataaaaaacaaaaatataatgaactaaatcataattaaggattgtttcatgaccattgacttggtactttacggtcagatacccatagaagtttgaaaatataacttacgtattattatcgtaaaaaattaaacttagatatttatatatttgcaattgggagtgaaacttagatatttatgccacagattactctttaatttaactgtttgtgttttttgttaaggtaaataaaatttttcattaataggtaaatcgaacataatccattagagagagagagggtggctccattagtgctatgatggagagacggcgatatgaagccaaagagaggagagagagagaggtcagagagagagaggagagaaagagagcagacggaaatagggaagaaagggggctcgcataggtttgtatttgctaaaacttttattggcccaattaataccgccagtaaaacttaaaaagtaaccctaaaatgaaacgattaagtgaaacttttaccatcgcaattcatagcgccgataaaaaaattccccctaaaaatgcttgcgcaccttttcagcgcgtgggaattattctgccaaaaactttgacagttttgccggtgcaaaaggtcgccgataaaaggtgaaaacccctgcgaacaaactttcgccttttggcagttctcatcaagactttcactgtctagctcattaggaacttgcaccggtaaaacagactattactggtgattgccagcaaaaatatttcatagtgccaaatgaaatagacatagatttcgatattggacaaaagtacttatatacagtttatgtagcaaatatgatttttttggtttaatgcgaattatatgtataatttaccataaaagtgtaggactttgccatataatttagattctatatgaatatagatgtaactaataatttgctatcacatgaaatttaatataactaaattgtattttactataagaagttgatacaattgaaattaaatgccctatttttctaatcattgttaattgtctttttatttgtttgttatcgtagctatcaattacaatcaccattcagttttggtagctatatagaattaaaaaatcaattaattagtaattaactataattcttgtgagatcgacttcactattgtgagcgatacatattgtacgtgcatgttaagattttttacaacagtacgtaacc

SEQ ID NO: 42793 - DNA, 6558 bp, Cannabis sativa
tgctaattgcctttactaatctaaattactaaagcggtcattacacctatcgtatcaaaatagctccatgccaacacatcctaatttcttttgacaacatttataatgttttcttttactgttggaggcaggtttcttcccactttgattatcttagtggggtctacatcacaaattttgacctcttccacatcctccattggctcaataatcctttcaattcccacacgggggtctaactcatctttaaaatcctccctgatagttacaacttttgcctaagtttctgttctgggagcaataggtttctcttcctaggccatgaacatagtccaaacagagacattgtaacagctttttgcgctcttctagccgcctctgaacattccaatgcatccattgtcgtaggggaactttatacataaatgttgtatcgaagttttttctccaaagtctactaagacagggtgtttcagtattgcgttgtatgctgtgggacaatctaccaccacaaaggtacaattcttgaaggcaaaaacattgttttctcctttgagggtgacaggtagttggatctcccccatcgacattagagcattcccattaaagccttgtagctagatgggataaggcgataagtccagctcgatgagtctgatcacttgaaaagcgaatttgaacagaatgtgcacggagcacccattatccaccaggactctagaatccctcttgttcactatctgggctttgatgaccaagggatcattatgggggaaatgcacatatctggcatcctccgctattaaagtgatgggtaggttcattgtttgaggacacagagttggagattgtacaacgacacacatttcccttctccatctaactccctcatatacctcttctaggagtttttggtgcttcttgcaaggtgcggtccaccggagatcgtcgccacatgtccatcaatcgataacagagctaagcctaggggatatgggtttcctaatcctgaagccacaacaatcactacagcttgacctgacagagtagggagcattggaagttgcattcccaggacttgagagtgacctaccccttatggaggatttatggtaccctactgtatggaaattctcaactgtccatgagtgatcccctatccaggatatatgatggggatccgtactcattgtcccaaatggcctgccctgactagcttttcgatttcatccgtcaagtgcttacattcattgttggagtgtcccacttctccatgatactcacactttttactcggatctcttttcaaatttttcccctgaggtgttcgtgagggctttctataatggaccatgtttcaagttgccttataaacattctcacaattatccattagactggagtactcactatatcttggttcatagtccttcttggctttttttttttggaatttctcactctgtcctgcaccttttcctcctctcttgttctgggattaactcacgttcagctctagaacttctaatttcaactattaggaatgatactgcatttgatatgtgtcactccatacccaaagaaatgggtctttgtgggtgcttgtacagatgcggatggtccgtaaatagtcgaggtgtattgagctccaggaataggaactggagaggtaaatccaggagtggaagcaactggagttaatgtcggagggacactagatgcttgttgataagcattttccaaaatgataaagccttgttcctttcccatgaactcagacagcgttttgaaccttctcctctacatttctccccataggagagaactgactgcctgtccagattttaggtgttacccaagttttcattaatcagacacgagatgtgatcgaagggaaggatacagttacaactcaagtcattcaaggtaaccgagaaaaatgactcccagacctagaaggctaggagaggcgatggcctccgagaaagcttcccttagtaaggaacctagaagacaataaaggccttagagacgttggccacgtcatcaccttacctaatatcaccccgtagacagtgaaacctttttctgacacaatatcagattttttttacccatgccaaatcatggtacgtacgcaccctcaagtacgttttttcctaacaacctagttaaagaatatttttcaaaggagaaacctttacacgacatgtgtccaggatcgtacaaaattcctcacaagcagctgtacaccacacgatgaagaaggttactatcagccaatggtcagatcgtcctctcatagtacaaaccttaataacatgtggaatatgaaaccctaggtaagtaaagggtgcgccctttaccccatgggtgcctataaatagtctcatttttcttgaggcaaagggagaacaattctttatacagttactctactaaaattctaagaagcctctctctcaggagaagcaaggcagtcttcattgtaatatcttgtagtcttgaaaacatttgcccattgaggttaacaatatggactcgtagattaaggatcattaacgcttgaaccacgtaaaaatccatctatttattatttgttattcgttaccttctctaagctctcaaatattaaattttcgaaaaactctgtaaacattttggtgctttcattgagagccgaagaaagctcgatagtgttgatcatcctctgatcatggtaaagacgcaaaacaataccggcaaaggaactccattagatacgatcttggaggagggaacctctagtacagctgatgcataggtgggaaatgatggagaaggcatagctactactgaaaacccagagaggaataccactgctaaaaatcaagaaatgaaaactcaaaatgtcgtagactgtcatggagatggccaagatataaaggactatgacgaggatgatgatgatgactactataaagatggtcagtattataaacatgaccctagtctggtgcgagtaactacagagttggaagcatcacatgcaaccctagaacatcagcaaaggcttattgccaagatgaaggccgccatggagcaacttcagaccaagttcaatggtttacttggaatagatggagaaccgtctgtggaagcgatgaccaaagggagagctcgtgagcaagctaacattgaaacccgaaatcctcgcatggacaagggtaagggaaaagtgggtgaaccctcaccaaaaattgttcccaaaactcatcggaaagacgcgctttcagttgggaaacccttgaggacgcagaaggcaaccagcgcttttgagcctggacgcccttctgaccctcgagacagggttgcaccaaaaggaccaccaacaaaagtatctaagcctagaagacaagtagatcctcctagtgattctgtctatcaagatggaagggctcctatcagtcattctggagatagttgatccatggtagatctgcagcagcggttggacgcgaagtacgagaggtacaagagcgaaaaggtgaggtcgcgtgggggtgacctaagaaatcatctaagtgacaaactgagaggacgtcatttcccaaaaagtgatactaagagactggaagatcaaatcgtagccttgactaagttggcgaaaaagtaaagtggggcattgtcagattttgaggacaaagatctggaaccctgtgtcaaaagaattgcaaagacccctctccctgagaactttaagatgcctcacatcaaattatatgaggactgaattgatccgcgaacacatttagccaaatacaacaagatgatgcaagtaacccgtgttagggatgatgctaagtgtttatgcttttccccgactctaactaagtccgcgaaagattggtggaagcaattggctcccagatcaattgacagttggaaggacctacagtcagcattctgcaagcaatttattgctgcacgagagaaagacatggaagttgggtccttaactaatgtcaagcagaaacctaatgaaagtttgaaggctttcatttaaagaatgatggaagctgccgccaagaccaaggtcagtgatgatctgaagttgatggctctccagtcgggattggttgtaggctccctgttgtggggatagatgcaaagaaagagagcagagaccctaagtgaattcatggctaaggcataaggtataattaaccatgaggatgcttatatccaagctttcggagtccctctagttccaacaactacaacaaccgctctaagctttgcatcccaaactcctgccccatctctgtcccttctcagacctcaattttctccaactatccacggacctactgcatccagtctcatccctacgcaaacccatttatctgagtacggggtggcacaaactgggtgcagtgtggctctcgaacagtccaaatttgaagtcacttactctagtgcgaggcattcatggggtaagaagggaggtaagagtcacaattgtaaagattcagtgaagaaacgaagaaaggaatacgatccaaagtacaccgaatacacaagtttgatagatactccgaagaatgtttataaagcaacatgtaatatgtcaatggcgagaggaacaggcgggatcaaaacaagcaatgttaatatcatggagaaaagagccacaccacatttgaatgtgagtatttgaaagatgagattgaaatggttgtccgagcagggcatttgggacagtgggtctacatcctgattatttatcccgaacaaggggtagtccaggggcacatgatgcttcccggataacagggtaccataaatccccagcaaggggtagtgcaccctcaagctcctggaacatcattacctactcttcctgctttgttggctccagttggggtggcactgcttgctctaggaccgggaactccatatcctcctgggattgctcggccacccgtagacagacatgttgcaacaattttgggtggaccctttctcgccagaagtacccataatgtgcagaagagatatctaaaagaagtggagggggaaaaatgtgtgcgttggtatggtctcccgcacagcatctgaggaggatgaatctcccaattaccttcacagaagaagatgctaagaatgtgcatatccctcacaatgaccctttggtaattaatgcacagatttccaataagcgagtttctagggtcttgatcaataacggaagttctgtcaacattttattcaagttcacattccaagtgattggactaattaaagcgaatttaactccatgccctgtccaattgcaaggctttaacagcaatgctctgatgcccatgggtaaaatcaagttgtcgatcaccctcaagggggataatgaggcgagtgcattcaaacattcgaccttcgtggtagttaactaccctatagcttataatgttaaactgagtcggccgactctagtggacttcggtgcagtaacttctatttgacacttgtgtctgaagttcccatgtgataatggatgtatttgcaccatcaaagaagatcagcagagcgcaaaaaactgctataatgtatctactcaaattgtgtttatggttagggaagaagcgctcgaggcactcaaactagaggacctgatggacacagatggagttctggagggatacgaggatgagttggattcaagagtcagactagaaagaaatttggagccaatggaagagatagaggaagtgagcatcagcaaggaagatctcaccagaactatcaaggtgggaaaaaacctccctccagctgtaagagaagatgttattaatacggttagacaaaaccaagatgtattgacttggagtcattgagacatgaccgggattgaccggaataccatttgtcatgctttaaatatccgggaggatgcaactctagtctgttagaaaagaagacctctagatcccattaaagttgatgcgatgaaagcggaagttgacaagctgactaccaatgacttccttcgggaatcattgtacctagtttggcttgcgaactcaattttggtcccgaagcccaatgacacgtggaggatgtgcatagactttatggacctaaacaaggcctgcccaaatgattgtttctactcccacggatcgatcagatggtagatgctacatttaggtacaagtttctcaccttcatggacgcctcctctgggtataatcagatcaaaatacatatagttgatgaggagcatggaaattaatttacaaaactaattattctcaaattggtttcaacaaaaaatataataaagtgatgagaatatgtaaaaaattaacaaacacaaactatgagaagaaacaagctagaactattaaattggcaaaaaaaatgtaaagttgatataatactgcaaatgagtattgttgtaaattaataatgttaattaaaactttaaaatgtcataatcttttttccaaagtatttatggttttattctctaattaattaccatatttctatgcccaattaattttaagaataccaatt

SEQ ID NO: 42794 - DNA, 2262 bp, Cannabis sativa
  modified_base (48)..(60): a, c, t, g, unknown or other
atatagttttacataaaaatattgcataaaatacaattcaatataatnnnnnnnnnnnnnatacgacttaatacggcgttccaaacgagccctaaaggtgctattaaagtgggacgacccatgagttatttatggttgggatttctattttaagtataatacctattcgcaggacggtttagaaaaagtggtggatttaattttatttaacgggcattaggacactgataagttttaaaaaaacttttaccaggagataactaataatatcatcaaaggtggtaagttgaatggttatgggaaagataaatgagtttagactaaagagccaaatggattgttttcgactaagtctgcttatttgattcaagctttggatcaagctcttttatgtaatgttgctccggtattatggaacaaactacagaactctagagttttggagcatcacaaggttctttggtggatcattctctcaaatgtcctgcccattcgtgccctttttgctaagagaatgcttattgaggaggtctcttgttccctgtgttggggagagagaggagataatggaacacattttccttaattgtagttttagaatatagaaacaccttttcttatattgtagttttacaatatagaaattaatatttaaaccgtttattttacacgcgtataaaataaaaaagtcatgcgtgtaatatactctttgaacactatttttgacgtgttaaatttttccgaatttcttaaaaatttacaagatatcttaaataactataacgtacaccattataaattttttttatataaataccaaaatagttagaagttgtatcaaatatattttaagagaacatcattaacacatttcgaaagagtatattgtagaattttgttaaaatataaatttcctcaaaaaaaaaaaataaataaataaataaataaataaataaaggtcccacttatccaatcagcatagcctccacacacttgaaatcatctgataactaacgactttccaagtttcatcaactgaaaaataacagcatagcttcattcactcattcatggcctcaattactcctcttcctcttcttcccaaatctttctccccatttctccacaacccaccttcaattccccacacccaattcctcaaactctctttcttcaaccctcctcgccccaaaagaccatcactccgaacccatgccggagacaacaaggaccactggctcgactttttcgacgacggagccgaccccgacatggaatacggatccttattcacggacggaaagcaagaggaggacccgagaccgcccgataaccccgagaacccttatggatttctgaaatttccaatgggattcaatgtggagattgctcctttgggtctgaaagtgaggggtgatgttaggaggtgttgttgtatggtgtctggtggtgtttatgaaaatttactgttttttccggtaattcagttgattaaggatcgttatcctggtgttctaatcgatgtggtttcgtctgagagaggaaaacaaagttatgaattgaataagaatgtgagatgggctaatgtgtatgacattgatgatcattttcctgaaccagctgagtatactgatatggttggacttctcaaggttagtctttttttcttttcttttatcaaatcaaatatattttaatgactaccattgttattaggcaccttaatcaagttagtcttgaaaattagtaggtgggtatttgcggtacgagtagtgtgggttgaaattttttctttttcaaaaatcaaatcgcacttgcggtttttgtaatttttcaaactgcaacactgcgagatcttaaaactgtaaaattatactgtaaaattacagtgatgcgttgcgatatgtacagtttacactacaatcagaaaattcaaaaataagcctaataaagttttaaaaataattaaaaaaaaaacttattaaaattttaataacatatataatcatcaagtcattttattaaattatttctaaaatcgtattgtaaaaattaattattttataatatatcatgcggtgcgatttgaattataattattaaattcaaaactgcaaactatactgaactacacggtttgataaaaatacaaaccacacacaagtctaacctgcctatatctaaagtcgaacctaactttaagggtgcgtttggaagtaactgtgtaattactaggtaggataattactagggtggtaatta

SEQ ID NO: 42795 - DNA, 7551 bp, Cannabis sativa
  modified_base (979)..(980): a, c, t, g, unknown or other
  modified_base (1401)..(1403): a, c, t, g, unknown or other
aatgaaaaatacttctgcttctttgttgatattgaataatctggattacattgaaatgaagctttatttagggcataaatcccaacaacaatttaggtcacgaaacgcaaatttgacatgaacacgactcgagattttattagtttgacatgacgacactaaaaatttgctacttgcatttgtgttttatcgattttttatgttaccggtcgtgttcgtgtctgccatctaaaataaatttgaaaattctacataacacggacatagcatgatgacattaaaatcaacaatttagtttacaacccgccaacacgatatgcgattttgtgggtttgacacgacacgaacttattcgagtcgtgtttgtgtctgctttttaatttcttcgtgtcacgtgtcgtgttcgtgtcagcaactttttagtaaatttaagacctcagcacaacacgaacactaattgccactccaactgtaaagcatgacgagcacaagaaaattcaatcccaatccaaatatcacatgtaatataacattgtttacaatgcacgattgactacaatatgtgccacttgattagcatccctataaataaaattcaaaccaattacacaatcttgtgtaaaatattaatttattttaatatgaattaaaaaatgtttattaatttatttttgagtaatttgcgacataaatacttaagtttaattctttattgcagataaatacctaagttttattctttttacggtattacataagttatatttctagaactttcctagttacttggccattaaatgtcaacttattattcacgtgttattttttattggtatatttaaattaattttaaataaaaaataaaattaatgatctagactaattagggtctaccatgtggccattaacttaacacttaatgaccaagtacctagggaagttccaaaattttagtttaggtattattactgtcaaaaannaaacttaaatatttatctgcaatcgaaaattaagtttagatatttataccacaaattactcatttattttaatatgaattagttgattatatgcttatttaaatacacattgatgtatacatattaatttatattttattatgaattattgtacttattaaattttttttatgacccaaaaaattgtagtactcaaaaactaattttataaagaaaataaatctaagaaagacataaaatataatctttagaaaataaattttaaaaaacaattaatcctcagcaagcttattaaaataaatatttttaaacgcaacatactaaaaaaaatatctttagaagaatatgaaaaaaataaaaaattactaattaagtgtactaaaaaatatctaaccattaaatttatttttttttttaaaannnaaaaaagaaaaagaaaaaaaaagacattagtgtaaagataaaaaatgtgtaaaaatattactagttaggttctactattactatcatatttcctcaactttattaccattagatcaacaatcaagagctaaaaaaatatttctattatagggataaaaccaaaaactctaccataaacatttccaatatatataatgtcaaaatgcgggtaacaatattttaatgttgttgttgttattatcattattatagtaagataggattgtacctaaaacaaaaatcattctaaaaaaagaacatataggaattaggatcacctccgaagcatcgttatacgtattctataacacttcacacatcacaaaattcttcaacacaaggcttacactaaatttaatatcaagtacaacatgcaaaatttaacatataaataactctatgattattgtcctatgacggatcgcttctcaatgctctacatctacaataacaaattacccttctcgagtatttgaaatatgtttatacgataataaaatatgtttattcggtttcaagttcaatattaccatgttctaagcaagttaagcatagataatagcatctgcctcgaatatgaggatcttacattcacatatactataaagaaatgctaacatattctcttcttttcatatatatatataagagcattgctattagacaccagtggtgtctagtaccttctcgacatgtcacgttgcgattggctagcgatacttcctaaaaattaatatattaaattatgtggaacccgatacttagttagaccaatagcaatactaacacatatgaagatgctagacaccactagtgcccattttgtctatatatatatataaatatatatatatgtttaaaactaggaattaaaacagtacacatatgcagaggaaatgctcttcgtttttttcaaacatatgtaaagtttgcctcccatttatagatttttttgttcatggaacaaggtggcttagtatattggaaggaaagatcatttgtttgagttgaaattccaactttgtcaattgtcaactccttctcactccatctttcggtttggtatattaatatagtgcattggttttggcacaagttgggtattttctcagagctgaagtattatagggaaccataagttaagtcttcaccattcccctgtcatatatccaaccataaataataaataacaaattccaattataggagcgagacagaaagtaaagctcatcatatttttctttacttctattctactggtcttggtcgacatgtttgactttaacatagataatgtagccttattttttcaaaggcacatgttgtaatgatagctgattctgatggtaacgatgaaaagtaattgacaattcaaaccaaacaagtggaaaatatatatatacgcaatgacgacttactggtaccgatactaattaccaagacaatgaggcttcattgctgcattgtccagcacgaaatagaaaacttggaccacctgtacttttcaattccacataacataataattggacaaccttgaatgtagtatacccccataaaactaaaattaaagcataaaaaaaaaagcacaaatacagtcctctcctgcacacaaaaattttgaactaaaaaaaaaaaaccatttgagctagtcactcggattttctacacacatggctatataaatatgctatatgtattaaaagccgactgcctactgcttaaactaaatgtctgacaaggtttctattttttacatgaaaacattaataacaatgagaagaaaaataaaaataaaaataaaaaagaaactaagaaaagtaaaaggaaatacaaacataaattaataaaatcagggctactattctaatgctattcgtattaattattctttgtttcattgcttaagaaaggatttccccaaagtgggaatgaggctccaagtgtgtaatcacttatttgaatctgttttcgactgttacagcctaaaaaaaaaagcagcaatgtttaataatggcatatgagctgtgtgagtttatggggaaaataggcggaggaccccagaaagaattaactaatgttaacaactcataccataagaagaaccgaaatgaaaaaatgttgccaaataatagatggcctgatttagctaataaaactactaaattatattattattattattggtatatacttattttctgtttcacatttagtttgctaaagtacgagtgagaagtcaatagattcgatttacaaagaataagatgctcagtcagtcagctcttaaattatcaaaaagagcaaacaaaatcataaatccatttccaaatgaaattaaaggcagcttatcagtataataacatcaaaaaccaaactccgacaaccgcgcccacacataaatgcaagaaaacagaaatcgcagtgtctaattgaatcgaaaacgtaatcaagaagtaggtagatcttgcaaatcgaaaaacaaaaaattcaaaacaaagaaagaatgaaaaaagtttaaatcaatagaacctgagatgagatctgaactcataagaaagaagaaaaatgcatatgaatctggatacgaagattgaagcataggaaaccctcctcaccgcggtctccgattcagttgatgcaaggcgggatccatttcgctccaaaaaaaaaatccaatcccattgcgaaccggttcccgacctgcaccaagcgaattagagaccgctggtaactgaatcaaatatcaacccccaacctctctctctctctatctccatatctccatgtctctctctctctttctctttctagtttctcctcttactctctctttctctcaccctcgtaattttatactccccgttgcacaaccagatgttgccacgtatacaaccaccgacttcgtagatggttttcttttccactccaactatgcccttgccgttgcttttatttacatttgctttctctatttcagtgttcacgtgctatcttcgcgtaactaccctggattacattactctactcacgtgacctctctataaatatccatcttcttcccctttaatactaattattatatattactttacagctcattacatattaaaactcaatgcatttataattttagtattaacctacttttgctacatccataaaattacataaagagtatacagattctcattctattataataatttcttatctacacctaacgtatttttttctccttcacaaatattaatcctgagaccatctctaataaaagatttgaaatttattttaaatttgacacacaaaaaaaaaaaaaggctatatttgatccgtgaaaaaattattatattaataattatttaatattttattaagaatatacaaaaactattatttttttattcttttattatttaaataatagtaatataataaataaagaatgtaaaatttagtaaaagtcaataaattatattaattagtaacatctagtaaataaataagtaacatttattgtaggctaaatttatcacaataatatatcttgtactaaatttggctggcacataaatttagtacaatttttagcatgcgtcaaatttaacacactttttagaacattattggagtagtaattttttttttaagtgtgttaaaatatagtaatacaccactattttaaaactccattgaagatgctttaagatagttgagtgaactaacattatcttttttgtaaaaataattagtaattttacccttaaacttttgacgatactaattctgccctttaaaatatatgacttgttaaaagtttcccctaaactcttacatttacagtaatttagtccttctgttaggttttgtcccattattctgttttattgttggaggaattttgacaacaccaaataaaaataaaatataatttttaataaaagagcgcgagtactcaacctagaatggtgagtattcaaatgagactacacagacaaattggaaaaactatgaacacaagggagtatagtggttcagtcagatcacggtctgcttagtctacaattgcaaggaattctgtcttgccttattcatattggaccactcctttatatacaaagcaagtgtccctttgataacacaaaacttaattatcgaaccgttttacattgaatatcagcattaaatttaagaaaacataaatggaataaatgaagaacagtttcaatatgttttactcaatacaacaatgcatgcgaccttcatagtgtgtattgtctgttcctatacacgcacaagctcgcaggcttagggtgtgttcttgttaacacaagactactgagtcccatgctaagatatcgtcctgagtcgcatatatggataccttgtttgtgtcgacaactcaagaagtgcgagtctttatcgagtcaccgatcacgttaggtcattcggaccagctcgttaagtaaagagttgatctttactaaatcgaaggagaagtcttcatagacatcacatatatcgtggtatatgcgagacttgagtacgtccttcttggtcctacgtcatgtgagacgtaataatgcgactaaactctatcaaggtcacatcatctccctgagcttggtttaggcgaggtttattctcaagagattctcttcagacatctcagcaaccctcgagggatgtgagtccacgtgtcattcctatggaagcctaatctcgagtttctaggtcaaaaattcacactataacacataaccctagtttcacgattgatagccatgtcattagggaaactatgagagagaggcagtcgagtggttgtcacgagatggtgactcttggttgtcttgtcgagggtttcaaaaagatggttgtaattattttttttattcctttgaggtgccacatcatcagaaccctttggggtatgtgtagttgtgtttactagtaaacattggattgagagaccttaggaattccttgccacgtgtctccatcccaataaatgagggattttagtatttaaatctcttgttacaaaataatccttacacatttccctctcattttcgtctctcccctttccttacttagaatttcaaatccttaaaattcctctaaattttttgaattcccttcagctgagaacgatttcaaaggcttcactacttacaaaatcaccaaggaagaactatatttcaaggttggtgatttacctttctttgtaactgttttctttttcttgagaattcgtatgcgttcggtgtttttaggggtagaaaatgcatgaaacaatagggtttattattttcttttcgtagtttaggcaaaatactatattattctggaaaatacttgcctgaaacttgaatactcgcggatttcaggaagaacacttcgaatattcgcgagttttaagaagtacatcttcaatactcgcaagtttacctttaaatatttgaatgctcaaaattactttatctaaccaatagctaaattttttgaccccgtttttcagagtttttttttttaactcttaggccttttttagcttttaggttatatgtatttttattgtgaaaactattggggttctcgaaatagtaggagtgtcacattaacttaatgttcatgcaattgtcgcatgcccccttgggatactgtgatatgcccaaccatttcttgagacatacggttagttttcatttttctcacattttattcattgttggaactaattagtttcttgaaatggtgggtgtttctcagtgacttaatgttcatgttagtgacatgacccttatgacactgagatacccccagccattactagagatgcatggccaaatctgtaaacttttctactttaatttttataacgcgggtgagggcacttaacttgttaaaattgcacttgcaccacactgaaaagatcttttatcttttagatgagcgacctgttagatagccagaggtatgactctagatagggggccttcacagatgaattggaaaggagcgacagcttcatcccaacctcaatgtccaaggatgaagctcttgtagccaaagctcgtgagggctcgttatctgcaaacgagat

SEQ ID NO: 42796 - DNA, 9756 bp, Cannabis sativa
taacaagctgaatagattaaggggcataatagtatagtgtcataagtacagggggtaaaaaagataattattcaaaaggaaaaaaaatgaagtaacaaacaaattttataaaaaaaaaatacataataatataaaaaaaaaaattaaagttgccaatattaagtaaaaaaaaaaaattggtaatacaaaaacaatccaagaagttaacattaatttgcatattataataagattagtgtcttattattttttttattactttgcagttgtcttgttgtggtctaagtgttctatagttgtatttttgttttactgaaacatatcatttttgtaattttaaaactttaagaaagtatttttgaaaatttaattttgtaaaatttttttaaaaaaatatctatttattgttgccttgggagttggtaattgacatttaccatatggagcaatagtaggcctgccataatgaaatttcaccttccttttattatcaggattataagaaggcagccacttttgttctagctgatgatgcttatgtgctttgtactacaatatcttaagcacataaaccatattcaactttctaaatatcagcttcatgtagttcatggactatgctactcaagaaaacaacaagacttctagttttctatgatcctcttctcaaaccacatactaaacgcacaccattcagttattgaaccccactcaacctagcccaatccacgaattgcatcccaccgtatacattgttagcaaaccgtaccccaacagtgaaagccatagctacaggtggaacctgcttcgccatagcagagccttctaccaaccgctcaagtccattgacaatctgatatcgggtgttggaagaaactgcaaggaacacacctacaaatttgggacgaacgaggaatgaagaaaagcatcagtcaaagctataaaactgtgtaaaagctaaagatgtgtttgggaaagaaaccagtatagatacaaaagcaattgttcattaaacatgcgacgaaatcatgcatatctgactatgtgtaacaagctagataagccataataagtccagtaggtaaagttgagcataccccaaagagcagcacttttgagtagaggtggcacaggtatatcttcttctgatttattaatgctcctgataatcaaaacacaatattcttagtactcctccataactccatatagagaaaatgaaaccttttcatagttaccagattagattcaggataaatttacagcagtgaagttattataaatctgaatataacagttcttaaagtacgtagtactataaatccaaataaggtagagggtatgtgtgaatatagattgtaccgcttagcagtcataatcaaatttgcaatgccctggccaatgattccacaaccaaaaccaacggctccatacatgataccctgaaaggaaagggcacatcaaaactataaaagcaaaaataaacaaacaggagctacatatcattaatgagagagaattcttaccttgtagaaataagtaccaattctctgctccaaagaaaatctacatcccggcctttctgcttcaaatacactgcataacaagattatttgtcaataatttgaaaacttcccaatataatacttggacgattggcctactagttttcagtgatgattaaatcacctgctaggaagagctccataagcgtgttgcaaacgtccaagcaaaccttttgatacattcggttgcccgatacgaacatatggtgctaacataccaactaatacaacattaactacagttccaaccaaaagatctgcaacatacaactcaaactctgaccagaaatctttgcccctcttttgaacttcagcaaatgtagcacaacaagagtcaatgactatctgtaaacattggtcaatagcaaaattatactttagacataataaaatttgccataacaaagtcagcgatgttgaacactcccacttaatagttcttactgatgacaatacagatggaaactttgttgacatgtatacatattcatggaacagctaaagacaaataaaaccccactaatgggtgcatctaagccaggacatctggttaacatgaaaactggttctacatacaccaaaacaatgatttctacatacagccatcttactccaaccatttaatgagagaaaaataagttaactagaaagtgtatcataacaatcccaactaacctccgttccaatcttgaaaagaaaggctggatcagccaacatccgattacgaagcatagagcatgacctcattgcaaaggctaaaatcccagaagacccctgcagattaaaaatgcttaaaaacaggattttaaagaacaaggctcttaaaagaaaaaagaagaagaaaacaaaaacactactactcattagaagcaaaagggtacctgcaaatctaagtatctaagcagaagcacttttcgaattcccacactcttggcagcttccaacatatcagagggaagagtaacccctcgagcctcagtctccttcataacctctgcaaatttcatcatgggcccaaactcctcttcttcatagtcatcaccgttttcatctcctcctccaccacctccaccacctccttctcctcctttaccatttgtaaagttcccattaccaccattaccttcaagtgcaacctcaccatagccaccaccacctactttgtcttcttccttcccagtcttaaaaacccctgtctttcccacagtactcccactatcttctttggaaatcgtaattgctgccagaggggattgggactcaccttgtgactccaccatgttcattatcacaagcctctcttttctcttcaaataaatatgtccagtcccattattcttactcaacagtggaaaaccaacctcttttatgagattctgattccacatcttcctagaaacaacatcgtttcgaaagttgacaacatgggtcaatccaaaactcgatgaacaacccgccatttgaacctcaaaagcaataaacaaaatttaacccagagaagtcgacaagttaaggaattgcactaaccaaaagctatataacgaaaccccacaatgcaatctaatcaaaagcacaaatattgaatctaaaaatcaaaacaactcgagtttaaacgataaaaatcacaacttcacaactttttgggggtgtccagaccatcaaactcagtttttgatctttaaatcgtcaaggtaaagggtatataggagtgaaaataaagagaaaggccagtaaaagtgaaatgtgaggtagtgggatagagtttagatgaagagaaagtttgagggagaatgaagcttactagtttaaaaagagaactagtaagacatgaagtggctcctagtttggttttgtgttgttattgtttgttgatgtgggcttgttcaggttcataattcattgtcattgtgtgaaactcacacgtgttctacactattctatgcgtgtgggattctctagggttttgctaacatacgctggtggtgtagctttcaaaattaattttttttgttttttttttttctaaattacagtaaacataatatttatttaagtgtaaatattattttggattgtgtgttttgcaaaaattattaattggactatcttttttgttaaatgacaaaatagaccctgtattttttaaaattatacaaatagttacctaaactgattttttgtcaaaataaaacttaataataatctgatctacagatattatgacaaagctaataacattttttgtaattgttcgtgttagaaattatcttaaatttggttatgtcaaaaaataaaattgttaaaaattgagctcagggtcctattttcactattttagaaaataaaatgttcattttgtcatttaagaaaatagaaggtccaattagtaatttttacaaaacacaaaatcaaaaatgatatttacccttaatttaattatttatgtaactaccaaaactttattataattagtgtaatttgtagtcaaactatttaattttttgaatttgccatgatcaatcaattctattgaattttggggataaaactcccaaaatttcaattgggttttgatctccacttttttgtctacttagtctattaagtaccaatatggactgccactatgtacaaaaaaatatacacatgtcaacttttcattagtctacctaatattaataacttaaatattataaaaaataattaaaatattttaaaatttaaaatatcagaaaaaaaataattaaaatattttaaaatttaaaatatcagaaaaaaataattaaaataattttaaaataattaattttttaattttttttttctttctttttcttttcttcttcctcttttttattttgttgttaactcagatttttgttaacaataaatgaagtcttgtaaataaaaaactgattatttataattaataaatacatatatatatatatatatgaaacactaagaattttacgtagttttatagttaaaatttacatactccacgagtcattattatttttgagtatttcttgataatatgtatagattacaagagaattactatgcatattcactcaatcttacaaggtcttttcattccaaaaaggatcgatcccttttcccttaggttctatttctatttatagattttttaaggaggacagttatttatctttcaatcttatctaggtaaccgctcatgaaacgtggatgatccacacgtttcatatatacaacatgtggataaaatagaataattgatgctaactgctttttattcttattaggaaatagtttccgtcgccaaagatatttgagaatgactggtcgtattctgcaagacactagtcaggatgtgtgtcctcgttgttaccttttatgtcaacaactaagattagtctcttaggaatcctgagataagttacattttgcgtatttcccttagtatttccagatactcatgagtatgtggatcaatgagttgcaagctcttaaagaactcgttatctacccttcctagcgacattgtttcagttcttgcatgcttctgagtgatcctggttagctttgagatgaccccagaaagttgttatctctcaatactgtgtactttatcgttgtcgtgttaatgctattgtagcgtagcactaggttaatatctgcctatggttacttctctcaaggcagaataactgttttaattatgattctcttttaatattcgtaaataatacacacatgtcttgtccatatttatggctcaaaatatggtcataataatttcccccaacaaagctctttctggaacaagaagagttttttaaactatccttaattggtaatgagtacatttctttggtaattttatttcttccgagaaaggttaattaatcatttaattaaatgtcccttcatctaacggggttttttacctgtcttttcatctttcctagaaagatccccgaccgttttgataaaatttagaaccagatcaatgactccccatttttcaatataaaagggtttttactattgtcttcctcattactttttttgaaatacaaaaccagagagaaaagcccattttcttcaaaagattgttgcatgcccaacttttctttgacttattttttcatgtgatcaacaccattttttctgcaaccttgaatgtgtcaaggtctggccagccactcctggaaggctggactggccttggccagccaaccccattatgggcagctcttgatggttgaccaaccctatgctaggtagggtctgcgctgctcgttctcccctaattggcttgtgcagcctgtgcgttgacagtaggtagatcacaccagttgctagagttaggtagatctagatatctaaagtgactggactcacttctcaagttgttgtcttgggtgttttcacccattcccgaacctaactggttgaagattggcctttgggttactcgctcctagaggccctgagatagaatttcaccatgctggtcggccaagggtgaactaccaaggggctggttggccaaaggctgaccaactaggggtgttatagagcttgagatctctaggcgtccccgaaattgttggttttcgggatttggctgttctcaccactagaccttcatggcaaggcttgtcctccttcaggtaggggaaggtctgttctggttcctgaagaacctagttggacaatctgtcggtagaccttccctaatttgtcgactagtctcccttaaagaggatctttaatgagatcttggcctcttccaacagttctctcattgaactgccttattaggtcactagtttctctattacggcagtacaactccatctggtgagatcaaaagatgtattcttggtcatctatccatcttaaagatttgcatctctattgcttgaatacatcgcaaccaatagtgtgtggttcttcagtttggccaacttgacaaatgacttctttaagtctggctaactcgagatctttatccaagtctacatggggctcgccaatagctggctcgctaattcctggccctgtctctctagcataattctgggcaccagatctagttgttgtgcttgggggctgctccacgtgggtccttccttcagtgggaggtgctggtggagggtcctccctaggaggcatgggtcgattgttcagactaataggaatggttgtgttgacctggccagctgtggtggccagatttgttgtgcctactgaggtagtaggagtggccacatctatcgagttcatggagattccagtcatgactggaacacaaacatcatgatcaacttccataggatctttaggaagacccgaggaggtaaatgttgtagccaaagttctctttgtgttaaccatgacatttgatcagataaaccaataactcgctctcaataaaagtactaaactgtcgacttcagatttggccaactgatagcggagtcaaatttaatactaatgcttgccacctgttacacaattagaacagaaaagtaaataggcacgagattttatagaagttcgactcccttagttagcaggtaacaacctactacccttttagttgtattgatactagagataataccacttagatcactatagtagtgggatctgaagtagctctcttaagattacaatgcgagaatagttttggcaatatctcaagtgagagagagtgcctatgcgtgcgagaaagagaaagatcatatgagttgagttatcagacttagagcttaaggcttggggattgagacttagggttttagggtttgactaatgctcttaatattgtagagcttacatccctagtatcccttaagaataggtaaataaagctattatttacatactaaattaataaagtttaaatgactaaattacctctcaaaaatggggaagttactgatattttctctctatttttctgggctgctaacgccaaattcatggtttgacttgctatccacagatgaaaggtgtgcaccaaaaacctgccatgacaatggctggctggccgtgcacctgcaagtgcaagctggccggccatatggtgtccataagctagtcggccatatggtgtccataagctggccgacctatgctggccataaggcgcctatcaggggtggccgaccagccccctcgaggtagctagttcgtcatttcatcgtccctcttaagtactcgaacccctcgttagttgaagtgttgagtagatggcttgacattcttgttggtgagctgtactcccacgtagcattgatgttggccacatagacatgccacgtcaggtgggcaaaaatcaagaacaattataatccaacccaatgtcccacctttagcaatcatcttcctttttaattccataatagataactctttatttcctcctccaatttcattaagatctaagttttccatgatcataaaaatattcttcacattatcctccacaaaatcagggccatgttgatgcacaataactaattcttaaatctcatgatctcttgccctgttcattgcgtcaacactttccatattgggagtcatcgaagacctccttacaccaccaataaaattacctcactggccctgaaaacaagtggctttgaacccttcccgattgcaaccattgagaagcaatcaggtttttttgttgacgaggagcaactctcataaattccccatatggtttttcaattttttccaaaagagtatcaaaaatctttccacaaaaaccctttgatgtctttttattccacaaataaagcaaaaggttagagcatactcatatttaaaattcatccagaaccaatcattactatcgatccttcgaatattcattcttctttgtagtggcttgtcaatttcaataatgactcttaatcttaaatattaatgctagacccctagaaaaattattaatatcagactcaataaaacgtcccaatatagttcacaatctcattcataacatgatccaaacaaaaattatgttgaacatcataaagttgaacccataagtttggcttgttaagaactattgtttataaattatcgtccaaccagagatgatggaaaataagtttgtagtattcaaaattttaaagactcccagtaatcactctttgaatatcaatctcatggtagaaataaaatggatataaattttttttctagatctttgacatacagacctttactatgcttcaaagaaaagccatggtatgttgcatttcttgaatgtcaattatccgacacttagaaagctacccactaaacaccatctcacgtcaaaatcatcatcttccatccttaccaacaacgacagtcctcaaatctcctcattctctagaataattccagcacactacacctccaaaccactggaatcactagtcgaatccatcgatagaacaaaatgacaaaactacgattttttgacacaaagaacaaaattaatcatgtcaaagacaagactagctagctatgtattagtcttttaggttggtggtacttcacaattgtagcagtatatatttacatatatggatgaatattcattagttacatcaaatatgtaactatttatgattatattaattttagtcattaaattattaataaataattatgattaatacataaattaaattaaaatattaatagattacctaatttgatataaggattaattgcacaatacaacgacaatattaaaatatttgtaaaattatcttcatcactttaattaattgaaataccgctatcatttcaattagttttgaggcacgtatactaaaatgaaattatattcctcttttctagttgatagtctagtcgatgcacttcaaaaaatttctcttatttatttattcaatttatttttctctctcttttattattattattattattattattaaaaaaattgaaataatgagctattcacatattgtctcactttaataattttaaaataaattaattcagtgtttgtacgtttttcttttattttatttttttgctaattactttcttttttatttttatatgactcatgacatatatagtaaacatatttctttttaataataataataaacttgtccaacattctctttttttttttttttagtgtttttatattttgtta

SEQ ID NO: 42797 - DNA, 5269 bp, Cannabis sativa
  modified_base (195)..(205): a, c, t, g, unknown or other
taaatcctaaaccctagttgaaatactataaaagaacatgatgctctcattctcatccaacttatttcaaccaaactaaacctagttttcattctctggtaacaagtagatgagagactgattttctatagtgatttcacaccttattcattattcttcaccaatttgagccatagtgatagagtaccatgcccnnnnnnnnnnngtcaagtactcaatcatagtgcagaagacgaacggtggtaaccaaactcgaaggaaagaaggatatctaggctcagatcttgttattactctgtgacagaaaggaacaagagttagagatctaaacagaaggagtcatattagagagttaatttcacattactaatgtgtggaaataaattgtcatatataaaatgaatgagctacttctctcataactaattagttttcaggaggaatccatgcatcttatcctaaattttaacatggtatcagagtcatttgtaattcattgtgagtctaaagtactgttcgtccgaaaagatgagctaaactaaaaacttacgcagttttatttgaaacttttcggccaatgtgtgtcaattttcagtattggggtcttttacctgttgatttgatcttgtgaaatttttttcaaatgtcacgtttcggcctcgtagtctcttaaagataaaattattggagcgtcttctggttgaggtgcagaattgagtttcttcacctgagaatgttcaactagagtgctcaattcttctcgagatggaggaagttgaaacccgtcaagaagaaatctggaaccaaaaatccaaagaattatggcttaaggatggggacagaaatactcgattctttcatgcctcttttttggttagaaggaataggaatttcatttgggcagtttcggaggacggggatcactggatagaagatcaaagacttattgctgatttctttcgcaataatttatggggatatttcagtcgtcatctcctctaatcgacgagaatttactgtctctggtggctccgtgtgttactgatagtgagaatgaaattgtgacgatcccgtcttcagaagaaattcgtaaagttgtgaggggaatgcctcaactgaaatccccaggtccggatgggttcccagctaaattttatacgaatgactgggatactgtggggagggatctggtcaattttgtgcaggaattttttagaaacgggaagtttactaaggcgatcagtcggacattcattgtcttgattccgaaaagaagcaatgccagtaagtttgatgattaccggcccatcagcttatgtaatgtgagctacaggattattgcgaagatcctggctaatagaattcgtcctgttttggagaagataattagccctttccaatcggcttttgtgaagggtcgctggatagcggagaattctataatttctagtgaaattgtccatgatatggggattaagaaaggaagggaggcgttcatgggggtgaaatgtgatatgtccaaggcctatgacagactggagtggaatttcgtgaatgaagttttaaaagcctttggctttagtgagtcggtgagaaaattgattatgtattgcatctcttcggttagcttccaagtgctgttaaatgggggtttaaccaagatttttactcctcagcgttgcctaaggcagggggaccccctctcgccttatttgtttattctttgctctgagattctttctcgtctcaacctggagaaggagaggttgggattgattgaggggtatagaatgtcgaggaatggtcccacggtgtctcacctgatgtatgcagatgatagtatgctttttgttaaagctaatttgcggaatgtggaaaccttgtctaaagcaatgcaaatttattgcagttagtctggccaagaaatcaacacgggtagatctaaagttctcttgtctaagaactgtgatagggggaaaggcctggagctggcagaagtgttcggctttgaattaatggatggtaacgaatttttcctgggaaaccccctatttgtcaaaggtaatagaagcaaagatttcaatttcatagttgacaaggctcgcagaaggatggaagggtggaaggctaagttgttttctcaggcagcgagaacaacgttaatcaaaagtgtggtatctgcgataccaacttacaacatggctgtctttcccattcctgtgagtataactaactctctagatgctcttgttcgtcatttttggtggaaaggaaatttggaggggggtcgatatctggctctgttgaactggaattcgatgtgtaagccaaaaccgtgtggtgggcttggcattcagtgctttagggacatcaatttctgcttccttgcgaagctagggtggatgatggcaagcaattctaatgccctttgggttaggattctctcgagcaaatattacaatgatacagacttcttgagcatcaatctccaagtaatgcttctctggttgctagggggatttggagaactagagaattcattaatgataatagtttgtggctggtaggtgatgggaaacatgtcaatatttggaaaaaggcttggtcctgtggtgatgagattatcttggaggcgggtgtaattaaccttcttatggtggacaagggttctctgaaagggtttttctcaaatgatggtactgaatgggacgtgtctgctatagtcaggaagttcagaccctctgctgcagaggccataatcagttgcaagatagaagaattgaacacggtggataggctggtgtggagagataaccttaaaggtgagttttcaattaagaccgtctttaggagtttatattcagcatcttctactgttgatgtttattgcacgaagctgtggaagctgaagtttcaggagcgattgaagttattcctgtggaaagtctatagggggtgtgtcccttttgggtccatttataatcgtatctttggtagctatgtgggtgattgtgccttatgtggagtagcatatggtgacactgacgaacatttctttacctcttgtgtgatcacttgtgatttgtggtgggaaagcaagtggggtaattggactgatcagctgagcccagggtccgggaaggaggtggttaaactgattcttgacccctcttcctttcctgatatttttcaggcttgtgaccgggaggagttcactctttatgggctataaggaatacaaattatcatagtaaagtcaggtggagagtcaatgacagcaatgatagggagtctagcttattggggagatggaagctgccgagacctgggagaattcgagttaatgtcgatttcgctactggagacgggataggggcgattggggttgtcacatgggatgctagtggaggcatcaaggctctctttgccctgaaggtctctctgcagtcggttactcatggggagttggaggcagtcgggaaaggagcggaggttctccacagattggggatcatagaggctgatatcctctcggacaaccaggttgtagtcgaggctctctcttcgaatgagtccctttcttggagtgattctcttcttttctcaaaagtttgtaatctgctttctagtttgcaggctgagatcctttggattcctagatctaagaatttttctgcccatgctttggctaaatgggaattgtttaacaattataagggatttcttaattgctgggaggtgatgccctgtatgctcaccaagatcttagaccattatgaataaatcatctttcagcaaaaaaaaaaaaatataaggaagaagggattagccatcaatttggacaatatggtgacaatacaatggtgaattttgtgcatttagatatttacatatgtattcaaattgtgataaatattaatcataatattacctcaattaaaattttcattaattttttaaatattactatattattttattataaatatatataaaggtgtattcgttaattttatgtattatttacatataaattcattacattttaatttaccttattagtgttttaatattgtgtgtacatacatgtacatcaaagattctgttgtacttatttattaatttgtctatatgtgaagacaaattaaaaccaaaattataggccaatattactacagctcagattttcttcctttttttttaccaagtatgacaacttcgagtaccacttcaacctcatcaaggtaagaaattaagcacatacacctacatcattcatatgtctatacatagagacccttatttagaatccactattttattttgtaaagtttttataaataaaaccataagctaaatgtgataaataatgtccaaagttgagtgaaaagaaaaaaggttatgattatgtgataatatgaaaaaagaaaagaaaaaggttatgagattaatatgaagaaaaaaaagtcgttgggacttgagagcctccaagaatcttcttccttttttttttctcagtggtgaagagcgtatttagaggttgaaacttggctccatctcttcaccaaatcaacaaagtccttatttttatttaaaaaaaaaaaataaaaaaaataaagacagccaaatcaacaaagttcccatatataaatttcctttttttttttcagtcttcaaatattagatcttcaattaatgctggctaaatttagaacctattttttgatctgtcaaaatcttttaagacagaaaaattagatattcaattaatgtctccaataaacatatacaccacccatgacaaaatacaataataataatcttatctatctatttatttatttaattaattattatatttttggttgatggagagtatttaaaatttctggtatttatataaaataaaattgggcaacggactcagatgaaaaataaaataaaattggggcaacgaccacgtcatcaagcgcgaggggtagatagccgttagagacaaaccattgcgaccttttgtttttgtatgaacatctaacggctacagtttaatcaagagccaaaaacgaagatcgaacggctatattttattagccgttaatttcaaaatagagaaagaatgcatgcggggacattgccccgttggccttccatccttgatctaattttcgctttttcctttgttcgttttcttaccttttattccgttcattataatcatccccaatcaaatcctttcctcttaacttctctatttttttctttttttttt

SEQ ID NO: 42798 - DNA, 6144 bp, Cannabis sativa
gagattgcaggaacaaatacatcgctttgagaacacacgtagaagtcaacaaccttctcgaattcagtagtgtccgaatccaagatctttgattttttatccgcaggtataatcccatcctgcaatagttcaaagattaaagcttttgggcattttacaaattttgaagtaagaacataataaaatgcaaatgaatcaagcaaagattttagtcaaaccgataacaaagacgctaaagataagatttttatgtgaagatttctcacctgcaatagttcaaagattaaacctttttccaaaagttacacttttgaaaaggatattatacaaattataagtaaaaacataatgcagatgaataaaagggaagatttcagtcaaaccgaaacaaagaaaataagataagattttgtgtatggatttctcaccttaatataagtttttgggaagacatcttttaagtagtctaagctgctgtcccacttagattcagtcaaataaattgtggtatctttgctaaacccgagttttgtcaaaaaggtacctatctcgtctgcgctataacaactttttgtaccagaatcagcatctcctaggcaacccttatgctccaacatctcaagccgcaagtccactgcaacaaattgcccatctgactttcgactcagtgttcttagacgctcaaccatcgagtcaactacttcttgaatctcgggttgcaactctaaagttccaaacattgccaaacatgcaactgaatcactaggactctctttgtccgcctttttcatgtttaccgaagggaagtaagtaaccaacttaatagttcctttatttcgataaattggttcaatatgctccgcgatatactcttctgtaaccctattagggactttcacaacagcaagattccttgttgatagcttagcaggaggattctttgtcactctcaccactccttcaaggctcttcacaaacttctcgacatcataaatttcttcgaaactcctgtgcatattttcaagaaagttagtttaatatcaattgctttctcataagaaaagaacctattctttctttttcttcttttcattgcaaatacaaaagtaacttgtcataattattgattggaatattgagtaacaatgtgaataacactccttttcgagtaatacagaagtaacaaggacagtcttttcttcggttaatgtattttagttctagtgactaacctctggtcaccgggtttgtttcctctaatgtcgggaactacgagggttgctcctagagatcttgctactaccaccgcatcagcaatctgcgaaaatattcaggaaaacataacaaagttagagaataagggaaatttttatatgatcaaaagatgacaaagagatgcatctgtatcacataaacaaacaaccacttcaatgttcctagtgaaaggaaaaagaatcgatgaaatcatagacaccgaaaagcaaacaacatgaagggaattcatatattgaaggaatgaattggctgatgtgatgaaaggaactatgaacatgagatatcataaagcaatacatatgactgaatgtagtcattatcaagctatcgaaattcgaaacattcaactcgatgataactaataattgagggcttagcttggcctccctgattccaagatattgtttcagcttgctttcaaaataaaataaatcagaaagtgtgaacaaaaatgttataaaactaagctaatcaatagcagaactctgcaacaaaaagctgagaaaagttgatctaacaacaattacaaacaaatatattatattagaacaaaactaaaaaaacccaatgaactaataattgagtagttgatttggatacctgagaaacatgatattcagggccgtttgttaaagagaatatgacaaatccatttgtctgctccacaccatctgctaacagaaaaacacttaacaattgccatgaaaataagaacataatgaagcaaaattatcatgtaactatatacatacctaaacctggtttagaccaacatgctttcagttcttgattgttatctttccatggcactacactcttttctggaaaactaacaacttgctttgcaatcttggcattatccaaattaacatgtctatctcctgggaatgtttcctgtaaattaaaaacaaacaaaatacaaagcttaattataaatcttcattgatagattagactctaattgaactctccaccaactcaatttttctctcagattcaagtgagagcataaaacaattcattttgtttgtttgccaaattaaaaaacaatattgggatttctgccaatttcaaagctaattagagcaaatcaaacaaaacccatcacagaaaaacaaatctaaaaaaaaaaaaaaaaaagtagctcaatttaaagagataattgagtgtgagtgagtgagaaagagagagtgtgtgtgtgtgtattcataggcattaaattaaaaacttacaccaacagcagaatcaaaatggtctcttttaatcatattcccaagcatcacaaacattgtcaatgtaagtattccagccaccacttgccttaaatcaacacccatctcttctatcttcttttctttcccaaaaatgttttctttttctttctcagatcttttcccaggaaacaaacagatacccaatattagaaaaacagaaaagattaatgggtcagaacccaaatggggagaaatgaaaaaacaaaatcaatggatctctatttccctagttctaaatataaaacacaaggtgacccttataacccaataaataagagagagaataaaggttaaagctttacaaagacaaaactatgtaacagcttattctatacccacaaagattaataatacaaccaaagagagatatttcagtttcataattttcttttttcttttttcttttttcaaataaataaatcaataaaaaaaatcctgtttttttcttctccaattacagcaccgacactttcatggaaaatgacggcttgcctaaatctacttttacgtttttttttttctaatgtattatttctgatctaaaacaaaaaaaaaatatgggatttgaatgtaaaaatcagaactttattttgtttagctgaataaaaataagaactttattaatggagataattaactatccagaaaaagaaaagaaaaaaacaaacttagaaaatatagaaagataattttctattttcttatattagatatgttattattttttaaaggtcaatttgtgaattttttttatattttaatttttatatattttattttttaattttttagtagcaaaattgttttaaatttttttttttattttttttttaaatttaagccattagttaattattactattaaatattaatcgaatgattattatatatacctgtgtatatatgacaataaaatttcaaaattaatatagtgaatcactaattattttgttggtatttatcggtaatatttaactaatatcacaaatttgtaaaaaaaacaaacttaaaaaaaaattattgccaaaaataaaaaaaattaagtgtataaaatcaaaatgtattaagaaattttggtgataataatcattttttaaaataaaatgaaatttattatatttactattggggattttttttttttttaactgtgtgtgtcacatgcttttgctgtaaattaaattggtcatattagttgtaggctaggataacaagaaattaataaatgaatctgacaaaaatgaataaataaatctacacatttacacatggtgtatataaaaaaaaaaaggcccactaagcactaacattaagcattaaaggttgtaataatttaattggaaatgacaaagattaatgccaaataaaactagtgcttatttatcaggtataaattatttaagtatggcccacaaacaagagtaaatgaaatgaaaataccaaggttagttaattaattaattgatattatttttatttatttatttggtaaaaaaaagtacaaaaagttatattctatttcaatttaattatttaaatttttttaaaaaaaatctttgataatttgggcccatgtagctttattcgttctaagcttgtgagaaaaacattacatttatgtttcttaattattatacatgataataatttatttctctttttttgataaaataaatgttaataattttaatgttaatgtgattcgtcactttgtttcttttttgttgttgttttatgtaagattgttttgagtgagtgagccacttaaaaaaggaaattaaggattgtacatgtttaaatatttttcattaattattagggtaaaaaagtaaaaaagaaaaataaataaataaatagaattcagttcaatttccacatatacctaccaataagaatatgttattcaaattattcttttattctgttggtccacatttgaacatttcttttatcctaagctttttaatacatttacctcaaaagaaaatgaataagaagaaataatcatatatctttctgcacaagcaaaaatatgaattttcagaaaaaagaaacaaaaaatatgaaattaataatgatatatgagtaatgctagatatacatttaaattgtatatactgatataataaatattaaaccatttatatttttaagtaagatcatatcacttttaattatatgattaagattaattacacattattgccttaaatttatccaaacaaaatttctccataaaaattgagaaaaatactagcttttaagtgctttgaactaagggaatttgattacacttgggaattgattttgttatcttgttctcttaattatatgtatttatatatacttaattaggaaattaatgtaataaaaattaaactaattaaagtaaagactttttattatgtacttaaaataagaagaagaacaagaagaagtgtcaatatcttaagtggacctataaatctgcctcatactatgggttttaatttaagtcaaacattaacatttccctattaatatataagaccttggttttaactttttttttataattaaattaaatacattgagatatgatgacttaactttaaagcaaaaatattttgaaaaatatataattataattaataatctcttttattttattatattacaatacaagttgttgttttaattgtttgcataatataattaatttaagtaatatgatcactttttagattattttattataatattattgctttattatattaattttttaaaaagaaaatgttaacacagccaccctttttgggatttcatcaattaaagaaaatatattaatggattcggtagccattatatattgaccataaatagtagaataatcaaggttgattatgacatcctaatggaagaacaaacacaacaatttttatttatttatttaatatttgtatataaataaataaataaagaagaaaataatataatagcataatgcaagagaaaataataagacacaaatcaattattcaaaaaataaataaataagacacaaatcaaaactgggagtgttgtttacacttttattattgaaaatggatttgttttgtgctatttttatagttagatggtttaagtatacactttgacaaattaaattatgatctttctcactattttgaggcttttaattaggttctattttaagaaatttatacaagatattatttttgataaaaaaaaataatttacatttttatgttcaaatatatatatattttttttaatctttttacgttatttaaaagcaacacaaaattattaagaaaaccacataaaattaatagagaaataatatccaaaatgcataaaaataatatacaaataataaaaaagcaacaacaaaataataagattacaacataaaaataatatgaaaacatcaaaagactatatttttctataaataaaatcttaaaaattggaaaaatatttaaaattttatacaactgtatttttgtaattttttattatttttgtatattttttaaataatcccgttatttcaaccttataataaaagtatcaatatttttggtttttg

SEQ ID NO: 42799 - DNA, 3657 bp, Cannabis sativa
aggttagagtgtgtagagaaaaagcaacaggtcatgtatatgcaatgaagaagctaaagaagtcagagatgcttcgcagaggccaagtatttactttttcctaacttcatagagacaatcttttacgtttgttttgtttcttgttcttattccctataaatatatgttttgtattcaggttgaacatgtgaaagctgaaaggaatctacttgcagaggttgacagtaattgcattgtcaaactatattgttcctttcaagacgaggaatatttatatctcatcatggaatatcttcctggtggagatatgatgactttactgatgcggaaggacactttgactgaagatgaggctaggttttatgtcggagaaacagtgcttgctattgaatcgattcataaacataattatattcataggtacgttaatattgtaaacctattcctattatttgatcagattagatatgtatttccatcagtctttttgtaccatcatgtgaaccctttatgtttgcaatttttacagagatatcaaacctgacaacttgctgctcgacaaagatggtcacatgaaattatcagatttcggattgtgtaaaccactggactgtagtaatctccaagaaaaagatttttctgttggaaacaaccttagcggggctcttcagagtgatggacggcctgttgcaccaaaacgcacccaacaggagcaattgcagcactggcagagaaatagaagaatgcttgtgagattccattacttgttcaaaatatgtcttgtcaatattgtatagagtagattgaagctttgcactaagctatcgagacatatgattttcatgaacagtctgttatccacaatctatgctctgttagaaatcttttatgtttaaaatctgatgttctattggtatttcaggcttattctactgttggaacacctgactatattgcccccgaggttctgctgaagaaaggatatgggatggaatgtgattggtcggtattttaagtagatttttctgtttattacataaatatattcttgacattgaagacttatgccttcactaatactatccaggtggtcacttggtgccatcatgtacgaaatgcttgtgggatatccacccttttactcggatgaacctatgtcaacctgcaggaaggtaacggagcctagaatttgatgtaattttgatattttgtaatgggaatggtcacttgtccgacgcttggttggttttactttacatttatttcatgtctttgttgccattctttgataattgactggtggcgtcttctcaatatcttgcagatagtaaattggagaacccatttgaaatttccagaagaagcaaggctttctccggaggcaaaggacctgattagtaaactcttatgtaatgttgatcagaggcttggaaccaaaggggcggatgaaattaaggtgttgtgtggtgtgttctgtgctacattcttcggtctgtgctacaatttagatagtagctcgtatgttcaactagtttgctttgcttgttattttcaggctcatccatggttcaatggtattgagtgggacaagttgtatcaaatgaaagctgcatttattcctgaggtcaatgatgaattggatactcagaactttgagaagtttgatgaggtaatttagtatgctagcttatacatatgctctcacaagaattaccaatataagtttataacttattctgtctttttgaccatggaatcttgaacagggtgagaacgaaattcaaagctcatcaaaagcaggcccgtggagaaaggtgtgaacttattttccgagtagattttacttttgaaatataaatgttgttttgtcaacaaaattaagaatgatcaattgcttttttttttctttcacatctgatcaaatggcagtaaatattggggttggtgaagttttagatttcaaaataatatttaatatatatagttcacacaacaatattcatttatgaggaagttggtagttttgcatgttcttcagcctctactcttttttctttatttcttgttataaggttttcacattccaccaagtttttcttgctcgggagttagttaatgaatcttattttcatcatcgagaactattcatttgctatctacaatgtggtaaaaatgttttcttgctcatttatcggttttgttattgttgttgttgctgtgaacttgctgcagatgctgtcatctaaggacatcaacttcgtgggatacacatataaaaactttgaaattgtaaacgatcatcaattacctgggataggtacgcagttcgttacacatttaaaccactaatccattttagaaacaacaaattctgagattcatcgagttgcatgtttttaacatcttgattcctcgatgcagctgagttgaaaaagaagagcacaaaaagtaaaaggccttccatcaaaaccctttttggtaatcatcatcatcatcatcataaaaatcaattctttccgaattttctcttaataacccgagttttatttcttttctttccccagatgatgagtctgcagtagctactaaccagcaacctgtacaagggagctttttgaaacttctcccaccccaactggaacttccagagaagcagagtgaatccaagtgaggctcgatcgaactaattttccaatttgtttttcttcgtaacatcagattgcggccagcagcatccgaagatgatatgatatttaactaatgatagagatgaacagactttttatggggcaaatgccctgggagagagtggtttgggggaatactatatagcacttggtcagataccttatttgcatttttcttccaagtatatattctttgaaattgttgtgtattcttttttctttgttttctgttttccacttcaccaagctgcaaaaaaaaaaatctgtgtacaatatagctgcaaattgttcttgtatctatctccttaaatgtagttatgagaagtcaaaagggtttgtgattgttattaagttttccatttctcgttggaaaagaaaagtagtatgaatttgattatgttagactcagctcgaatgttataatgaagcattttcttttatatatatatgaatatattatgagctttcttctactaatttgtaattaccttgtcaaaagatgacaatttgttgccaatttcttttcccaattcctttatttatgcaagtcaatattatggtaattttctttcaatggacagtctaccgtgtcacttaattaaagtttttgaaggaaagtgtaaaaagcaaagtagaatggggtttagtaggttgtctttaaaaaattagtttatgtaattaagtgttaaaaatataaaatttaagtggtgttgctgctaatattccataaataaataaaaaaatattttatttatttcaagattattattctctcctatgttcttagtgggtttcaccagttgttataaagtgaaacatgttttcccacaataatttctcacaattttccctctaaattataatatgtatatatttatcaaactcaatttaaaattatgacttgaaggaattgtgcttaaattggtattcttaaaattaattgggcataggaatatgttaattaattaga

SEQ ID NO: 42800 - DNA, 4117 bp, Cannabis sativa
ttatggttatgaacaaatattgggcacatagttaataattgtgtttatggtattaagcttatgattatattagtccacaataataattctaacatacacaaaggcaaaagcaacttcatgaaataataaattaccataaatcttgaagaattaatttaagatgctctaatattaaatgttagaatactctaatttacatttagctttaattaattcataaaaaatctaacaatagaatcaaaaattagtaaaagcatacttgagtccataaaatcaactttagaattgtatgagcttccaactttgcatcaaaactttttctctgaaattttggtctcttgatgatgaagattcaagaataaaaagatatgatgcaaattaatttagccccacattaaatcaaaaattgtatttatgatatctacatattaacattataacaatcatgctaaattttattctaaaatagaccacataaatttgacacgatgacttaacacatatttatatatataattgtgcttccaaataaatgaatttctaacagtaacttcatacagtgggagattgttcatatctcttgtaaatgcaatttcatggctcataacactgctaagtgagcaagaaagaggcatatcacaagtctcttacagccaactgacatgcgatcctgtattatgttgattgaagatgttctattttttttttcttctgtgtttcctgctgtttcttatttttcttttttgttggttgtttctgtttttgttcttgaacttcagcttgtattttatttagttttattgaatacggtgcttagcacctcctttccattaaaaagaaaattttagtgtaaaagaaaagaaaagactaaataaaactatttttaaaatcgtcaaataataaaactgaacaagtgagaatcgcattatttatttattttgtaaggatataatgtttactgtaaacaataagaaatacaattttgcgaagaattatattattagagtagaaaagaataatttagaaatattctgtgaaactaaaaattatctggcagtggtttcccggctagaaatgaattgaagagaactagagatctctctggctgagaaaatggagcttcgtgagatgctcctctaatggtggcataagataaaatatcaccatgcacttgtgtccaccccgccacctgcaatttaatacaaaagtcaataaataactcaaaataatctcaatgtttgatccaaatattacatttatagttacaaagtccttatgttttaactcagtgagattttgataattaaataaatggcatatgtataaattaattaaatgaagaaaaaaatgtaaaaatatttgagcccaataatgtgaaattaattaaattttattatgtttaagttcaagtaaaaattagaaatacatttaatggattgattaccttataattataagtataaatactgaatttgatatatttctttgttattacatcacatgtatatcattatttttattaggagtatttattagaccacatttaatattgttagatttattcaaattcgatctaattatatattagatgttagattttaccattcgatttgatttcattaatttcagtcattcaatcgattcaacatccattggatgttggattagatcgtaactatcaattggatggatttcatgcatatttattgctttaatttggatttatataatgttttaagcctagtattttttgaatcggatcatatcaatccatattttagatccagtatttattagattagattggatccatccaatccaaaaaaaaaaaaatcaatgtttatttttatatatacatatattttttttcaagtataacaacatttttaattacttatccaaactaaatgaaaatattaatttgtttgattggatgttcaatgtattggatttttagacaccccatccaacatccaaaccgatccaattggatattaaaaaataatattcattctaatccgatcacaattagatatccaatgtttgaagaggtaagttgtaactggatcagtataaaatatttattatttattgtagttaattttaataaaatattcattatttactattttgaacgaagttttggtttaaaatgtccacaaatgataattttactgagaaaattcgaaagagttaggaaaagccaatatcaagaaggacaatgtacaaagtgctcaagattatcaacaaagaaggtttcaatgacattcacaaggttgatactcaagcaaaacaggctatgttggagattatagaagagctaaataaagatcctcttaatttccttacaaaaaaatcctcttaattttattttaatggaataggaacaaagggccagagacaaatatttcaattttcatagtgtctataatttatttttagctcaaaaatttaaagcaaattgggttaagaatagggatgaaaatacaacaatatttcatgcatccttgaaggctcgaagatctcagaatcgaatttactctatcaagaatgaggaaggcttttgggtgtataatgcagaaggtgtccaagaagcttttttgagctattatcaaaagttgttaggaacttctacgagcaacagagtcaaagtgtattaatcaatagtcgatttaggtctatagaacaagaaatatacatagcacaaaaatagagcaaggctcgagagaacaagaaggaaagaaagaaagagagaaaaaagcttgactattctgttaatagattaatatttatatatcgtgattatacatggattgagcataaaactgtgataactaactaacattaattacttaactaacaattgacataactaactgataacaaacatcaagtcatattgaattatactaacatcccccccccttcacaaataaaaaggagtagcagccatttgaagattggactttagatagttgaatcgatcagttgagagagacttggtgagaatgtcagatgtttgatccagagaatggacatatcgaacagacaattgttttgctatgatttgatctctaacaaaatacagatcaatctctatatgcttggacctagcatgaaatattggatttgatgcaagagttgtagcactctagttatcaacccatataaaagggtagtaggcaggtggagcttgtaattcagtaagcagagatgtaatccatcttagttcagctgcagcattggctaatgccttgaattcacttttaatgctggatagagccaccacacttttcttttttgcagaccatgatatgatatttccccaaaaaagacaacatagccactagttaagcgtctgtcatctacacaactcgctcagtcagcatcagagtagcatttaatggtcattgcaatagcatgtcgtaatagtatgccatctaaaatagtgctcttaagatattttagcaaccgtttgcatgcttcccagtgtatggttgttagagcttggatgaattgacttagtttgttgactataaaagcaacatcttgccttgtcactgtaaggtattgcagagcacccaaagttgatctatataaagatggatcttcaaagggatcaccctctgtcaaagaaagcttggtggaggcactgttggattagggcagctctttgctccatccatatgtaatttgaccagcaaatcaatgatatatttagtttgggataggtacattctatgtgaatctctatgaatcttaactcccaagaaatagtgaacttcacctagacttttaagttaaaattgtgtgttgagatcacgaacaagtttggaaatcagttgcttatttggacctatcaagtttggaaatgtttcctcatagtcaaggcctggtgtttgagagtagccctttgcaaccaacctggatttgaacctgtttagggaagcatcaacatttagtttaactcgatgcacccaattgttctatataatatgcatggcaggatgctgagggacaaggatccatgctcctgcagcttttaaggtttgagattcacttgtcatggatttaaaccatttgggatcttgtaatgcttctttgagagatcttggct

SEQ ID NO: 42801 - DNA, 3134 bp, Cannabis sativa
atgatagactttaaaaaagagggtaaaaataaaaagagacaatataaaatggtatagagtgtaatttcctcattaagaaaagtgggaatggaaatctgaaagtttactgtatttggttaggtttttaacattttaatgttgggctaagtgaaagtggtgggctttagtttggctaacaaggaaaacctaatgaaaatgtggttttcacttaacttgtaattaattttccaatgatattggcagtttgacacaaatttttgtattttaaaattagttttttttatatatgaatactaatgtatataaaaatatttaaaatataaaataaaataaaataatattaaaaaaatgataaaataagaacgaattaaaaaaaaaataatactattacttttttcttatactaatattattaaaaaaaaaagatataaaatatttaaaatataaaataattccactaaattaaaaaaagatatatgatatattttcttttttttttatatatattttattttatcaatttgtatataagaacgccacgtgtccatactttatttcccacaaagggcacatcaattacgacagttggcatccattgattcggtttaaaactgaaaatagctgaattgggtctgtaaacagaaggcccttttagtaatttcacacaaagcttacgtttcatgcgcctatataaactcggacaatgaccatgtttgaaacagtaggcaatagagagagagagagagagagaggagagagagagagaaaaacgtaatacaaaagtgagggagtgagtgtgttagtaaggagggagagagagagagagagagagagagagagagagcaagaaaaacagcgagcaaagctgagaaacccaacaaggaattttgcacaattcatcaattttgtacagacattagcgtgtttggccccattttggagtttttataggctttatagccaagtcaaagtctatctgaatgagtcgtttagggtttaaatccttggtttaccatggtgatttgtgtttgggcgaattggatgttgtttcggttaaagatcagaatttccagttcccaaacaacgagattcgcattcaccgaatttcaccaccaagcgaacgatgtcctcccctctcgattctccaaacgatttcttcattctccgttcgttgcaagctcgaatcgtcttcaccggtcgatcagccgcatttaatcaatcttcacgcttcctgccactacgaattgagggttccgatctctatcttttcttccgtgttttccggtttctgtttggctgccaagaatagcagtggtctagttttaatttattattacttttactttaagaattcagttttctttgtctcgaattagttatatatatatatttcattgtgacttgcagacagctgtggtattggccggggatgaagagattcatttggtagcgatgctcagtaagcaaaagaagtatccacgcttttggtgctattcagttccgaaaggtttgtataacgcttctgtaggaatgttgaatatgcgatgtctatcgatcgtattcgatctagatgagactctagttgttgcgaataccatgaagtcgtttgaggatagaattgagtatctacgtagcttgattgcgcgcgagattgatcctatgcgcctggctgggatgaatgcagaactgaagcgctacatggatgatcgattgatcttaaagcaatatgctgacaatgatactgtgatggataacgggaaggtgtataaggttcaaatggaagaagttcctcctttatctgataaccatgaaagaaaagtgcggcctgtagttagattgcaagataagaatattgtcctaacccgcattaatcccgaggtaggtggatctattttgttgattatggacttttatcttgtctttttaagttttgaacaaaagaagaaaaagaggagagaaaaacttatctaaagagatggcattatggcaattgtggagaaaataaataccttagaatatttgtttttctaagttatagatcaagtgcatgttaggttgctgattaatgcttgcatagatgaattcacatctaagtttaagttagtaaccgagatttgcttaacattgcttcgaaatgaaaccatttgttgtgtacatgttaggagataaatatctccctgaagtgtgagtagctttgaaataattaagtactcatttcattagatgtatttgtctgagtggaactttgatgtcttacagtcagtcagggaattggtttgagcatagtttttgtgttttgctaatcttgatgcagattcgtgatactagtgtgcttgtacggttacgacctgcatgggaagatttgagaagttatttgaccgcaaaaggaaggaaaagatttgaagtttatgtttgtacaatggctgaaagagactatgctttagaaatgtggaggcttcttgacccagggtcacatctcattggtttaaagcaacttttgggtcgtgttgtttgtgttaaatcaggcaagtttactcttaaggaaccctttagtgatgataggttacctttatgcagtctaaaatacttgaattttgatataattatttaaactgatgtgccattcttttcatttgaaagcttttcttttgttcttgttagttatggatatttttgaatttatcataacttgaaagataaagagtacaaaatggaggttgcttctttgttttcaactcattagtgtatttgtttaattaattaaagaccggtaaatatgcactctaggtattgtgtattagtgtttctcatcaattggaaaattttgacttgattattgtttaggctctaggaaatccttgattaatgtcttccaagatggtgtttgtcactcaaagatggcaatggtaattgatgatcgctcagaggtttgggaatataaggatcaacctagagtgcatgtagttccagcattcactccctattatgctcctcaggcagaggtattcgatcgtgttttcataatcttacactacaatacagctttctttatctccttcattagttttttccctttaacagacagcaaatgccgttcctgtcctctgcgtagcaagaaatgtggcatgcaatgt

SEQ ID NO: 42802 - DNA, 3324 bp, Cannabis sativa
aacttcccagagtgaaactctgctgggccgttcaccggctgttgactcatcccacccaacctataaaaagaacgattgtcagaaacacgaaatgtctgaataaagaaatgaggagctaggctagttccctttcaagaagagtagtacatcaaatttaaatgcagataagtagatagataaaactccaagatttaaatgcttgttatcaaaattctcttaaaccctacaactatttcactttaaaacatcttcatcgaattacaatttgagaaagcacaaacaacctcttgctttgttaatagaaatccaaaaataacaactacttaggttatcgggtctacacattcccgtgaaccttaaaaataaatttaccatacctgaagatttcgccattgtgaagatttccatcgaagagagtccaaatcacttataccagtgacagtacccatgtatctgcgcactccagactcttcggtctcaaacatcattctgaatcgcatgccaagcgaaacttgtgtgtacattgctttattgtattttgctaatggtatcacaaactcagaagggcttgccctattaaattcaaacaattgtttttttgtcagaatcatttcctgcatggcatataccaaatgacaatcatgaataagaactgttggtggtacctggggttgtaaaagattgtaaatgggctgttgttcgcagcagcatgagcagcggcggctaaaattccaatatgcatgctatcactggaaatcactgatgaagagagagcaggctgttgtcttgtagcacgccttatacccaaaagtaactgtgatttttcgtcccttcagaaacaaatttgtttcaatatatagtgtgagaatatattgtatctagctagaaatatcattttacaatgtattcgcttgctaccttataaaaagaacagaatctccagcaaagagtcttttagtgctaacaaagacgctccaacctgtagtcagcagatgcctctttggttggcctgaatgcataaaggaagaatgaattagtagaaggtttaatttgataaacatattggtgagaatccgctaaaaagcagttacacggctaaacaataaagctcataaagcactaagagtagaatatatcagcataatgagcaaataccgcgatagatatgcctgaatgtccatgtattatcatgcaaatctcgagcaactagttcttgagcaggtggttgcattgagtaatcctatcaaacatttcattcagtgaccagtggaaaagagtttatacagagggatggggatgagtaatattttacgaggactacataccaaaggtggaaagatcttctcagctgcacgtcgaggcaccgaaaacccaccatgggtacttgtgtcacttgctgtaagagttttacagaaaaactcagaaggttgtctgttttgtttgagacccatatcagatgccagtaacgcttccctgtcaggctgtacaccagaaattttagatatctatgtaagagaacatgcttatatgtgaaaagaaaatgctgtaagctgtgcattgattcagaaaatgaacggctgacctactttatttacaggctgtagtgtcatttgtgcataaacctcatctgtttccaaatcagcctgatgcacagatatataacagcagatattagaaaataatccacctgaaaaaaattgcaaaggcagtatgtatccatatgttttttctttcttttcatgaacatctcggatcacttgctatcttgagactatactacccatgggtgagactgtccgcaaagctcgagaccataactcaaatgtatcatataaccattttatgaccgagacagaggtagcaaaaaggaagttcaattgaacgtaaagttttacacccttaaggaagctacagaaatcaccttctggtgtgggtggacaacacacacaaactctctctccctccctttcttagtcacacaaatatcaataacgaaacaccttttataattcatgggagattatgctagaaaagacagtgaacaagtcccatacatgtaatgtcacattgtggagcatgcaaatcaattttgaaggaaggttggggtagttaggaataaaatcagtctccttctgcattgatgctgcaacctgcaaatataatacattaggaaaccaatctcaagaaacaacaatacttaaaatacaagagataacagcatacttgttcgctgtggccttgcgggaaataaaccacgagacttccaacaggaggcaaagaaacgagtggcccagcacaagcatgccataattctgaattgatattcttcctctctcctgtttccaaaatcaaataacaccttacaagttattatgacacaatagtgatatcaagttccaatctactaaattttttggctaaaacaaactagcaggtaaacaatttattaaacagaatttgcaattaaagttcttggttttgaatgctttttgtgaaatgtcttactaaaggtgaaggtaaatattattcatatttcatactcctcatttattacaaattattttctgaacatttagaagcaaaacagtctgtctcatcatcattacagcacatataagagaaacgttgagtagagcttatcaccattgagacaaaaaaaaaaaaagaaaagaatcttcctaatggaacacaaaaacttccaaaatattgcagagaagaaaagtagcttccaggctaaggaaagatatgcatatagcatatgtataaaccaacggctgcattttagaaatgagaaccagaaaacaaaatacttaaatcaagaccataaaaaaccgcacacaatacaagaggagacgccaatacaatggacatcacagaattataatgggaccaaaatatgtcatccactactggattaccttgatcaaagctgtcttagatcaccccacaacacacaaaatactatattttgtgttccattcgttcaagaaataaattattacaaaagtaaattaccaacaaagccttgggaagactcagataaagggagcagaaaagaaacaaaaaatgttacagaatgcttaaaatccttaccttctccagcagaagccaaaaacccgtttggaggagccttcatgctggcagataagatttgtgacttgttcagaaatcaattaacttctctcaagttctttaccataaagatggtttatctctgacccaattactcaaatattgcagtatcactaattcgagtaatcaacacgaagatcacctttaatgtttaagcaaccaatgagaaaaaagacgaagaagaagaagaag

SEQ ID NO: 42803 - DNA, 8479 bp, Cannabis sativa
  modified_base (1673)..(1699): a, c, t, g, unknown or other
  modified_base (1972)..(1976): a, c, t, g, unknown or other
attatgacaaaaaaattaaaaattaaaaattatataaaattttcttaaaaaaaatgaaaaatatagacataatttagaaaaaaatataaacataaaatcatataaatattaaaattataaaataatatgtgaggatttttttttttttaaaatacaataagaataatttttaaaaattatttaagtttacttttttaataatagggtatacttatcattttatggtctagaaatagaactctcttaaaataaaaggaaaattacataattaatctcctactttttgaccaaaaaaaaaaatatggcttaaacataaatttgtacaaaaataagagaaaacaaaactcataaatacaaaattttggaaaaaatataggtataaaataagaatttataataaatttcatatttttgtaaacattttttttaaagaaaagctgtcaattatgtaatttctaccaaaataatatttggttgtaagaaatgatgtaagaaatactaatttatgaaattaaagcaatttcaaattttatatttagctttcctaaacaatcactacaattttttattacttttagtcacaacaaaacttgtaacgaaaagaaaaaaaaatgtgactaattataaatcattatttttatgttgtgactaaaaggtccgtgactaagtattagtcacaaaaattataatttattgtgactaaatgtgcttttagttacaatactggttgtgactataagtatattagtgacaacttgtatctaaaaattatgttttagtcacaaataattttttattgtgattaaaagtcacatttagttataaagaattatattgtgaataaaaattcatcactaaaagtaactattttctctaatgaatattgtattatagacatcccaagtctacaacggttaaaaattgtcaactttttaggtaatattaggggtttatacatttcatactaaaatttgtaactttttcattttttttactgtggagtggttttttttaaaaaaaatattgtataagttttatattgtgtactatgttaagttttcacggtaattttaattgttcgattttgttattttacggttgttttataaaaggataatatttttgtaaaaaaaattgtgtgatagtaaaattgtaaacttttacctaaaatctaatatttttgtaaaaattcctaaatattatgcatggttaataaaaacatatctacccatgtatgtttcctatatcatcattatcatgggcgttttctgatgattttgagggtattttcaagttttaagtactattaacaccaccatgatttttgggttcaaaaatagtatcatcacaacactttttgatagattcattttggtatgatttgaatgagatgattttgtatttgaaaagtaactttgtaatcgtgacattaagagttaccaaaagttattgaagttaggagtcatttgaattagtttttgtgaatttattgttggtagaaattataataaataaatgtttaattttgttttaagttgaatgtagaaaaaaaaatatataagaataaaatatatattttattaagttttaaaatataattgtattatatatatatatatatattagatttttaagttattattttctttacattaaaatgttatttgtatatnnnnnnnnnnnnnnnnnnnnnnnnnnnatgtgtggattagattggatcggttactttacatgtcaatcaacattcaatccgcataagtgggaattttaaattttccaatccaataatctacccaagtacaaatatttgtactttatgaattggattgcagattgaattagatcgactattttatgtacacctctagttactatgtaaatttttgtaaaaatacaaaaaaaataaattattgaagtgtaaaaataaaataaaaaaatccaatttttaaattattttttttacattaaaatnnnnnttgtatatataatttttttaaaatttatgttaatatttataaattaaattgaatctgttacttttatattccaatcaacattgagttttctaatcaaattcaatccgcataagtacaaatatctacactttacagattaaatgaaatgaaatctgagtgaattaactattttatgaacataatatcctaactcactcacttttgaactaacacatgatagcaatgcattgtttttgattggataataaattttgtaaatatatttatatttaaatatactctatgaacaaaaaaaattaataataataaatggagaaatatgtagaattatttataggaatgtataggtaggtagaacaaggagtagtgtaggtggcaaatgatggggtgagatgagaagatgagacgggccgccgggattttgcaaagttctgggctggcccagtcagactcgcgagtcaccactctcactaactcactaactcggtgcctcactcactgagtcgtcttctctgtcgttctctttctctttctctcactaacccaaaacccttttctctctctaactctccacctctgcacacacacgcttcttctttttccttcaaaactatctctgtcctttttagtcttttcacatttcatcttcagtctcgcttaatccgacggcccaactatttccacgtcaccatcgtcttcttcaccatcctctgcgacctgctctcccccacacataacatacaacttttctcgtatatatatatacacatttatatttattatattatataactatataacaaccctcctcgttctttgctctagggtttcaagattaatcttcgcctattctctatttttttgggctttcgaattctcgtgcctcggtcggtgatttcgccgcttaagctctcatcttgtttcgttataatgaggtaattttctctgaaattccagtattgtttggtttttgttattgttttagtgttttgatttgtgtaataccaaggtggttttcgtggattttgagtttgtttttttttttttttttgtgttgtgtttaattagggttgggattcggatttttctgtaacgggttggaagagtttggagaattggaggaattttggttcttgttttttgtttctattaatatattatgatacatggcgattgagaaaaacaactttaaggtttcgaggtttgattcggagttttctcccggtagtaggaagagtatgtccagtgatgatgatgagcttcaacgacggagctctgcggttgaatctgatgatgatgatgatgaatttgacgatgctgattctggggctgggtctgatgactttgatttgctggaattgggggaaactggagtagagttttgtcaagttgggaatcaaacttgtagtattccgtttgagctttatgatcttcagggtcttgaagatatattgtcaattgatgtgtggaatgagtgcttggatgacgaggaacgacttggtctaactaaatttcttcctgacatggatcaagagacttatatgattactatgaaagaactctttacaggttccaattttcattttgggagtcctgttaaaaagttgtttgatatgctgaagggaggtttgtgtgagcctagagtcgccctttatcgcgagggctggaatttttttcagaagcgacagcactaccatcttctgaggaagcatcagaacactatggtgagtaatttttgtcagacgagggatgcttggctgaattatcgaggatacagtattgaggagaggcttcgggttttgaacatcatgaaaagccagaagagtttgatgcatgagaagatggaagatttggagactgcctcatcagaaagagggtctgatgtaggtttggcaaatagcagggctaaggataagaagatttcgcagaaaatgggacgtcaatctgcttatgttgctaatcaaaatctggatattcctctacgaggacgtgcaatggctttggaatcaacaaattatgggaagcagaatccgaaaggtatgctcaagttgagtggctccaaaaatcctactgctaaaggaatggggggacgcattacccctgcataccatggattggatatgaactctggaccatacagttcggcggtagcttatcctcggcagagtaaagcattagcttatgaaccaggggcaagccacaaaataagagaccaactgagaggcagtgatgatgctgaagatacatatggatttggtgaccaccgaaatcgcatgatggagaagtctggagttcttaaagtagggagaaagcatgatcttcctagaggtgatgaattgggctctgaaagtttgattggtttccctgtgtcatcaaagactgatatacattcctatggcaggaaaaagaatgcaaatgctttctccgaggcaaacctgtttggcactaagccttctaatgttcgaggtccttatgatcttccaaaaaagggcaagtatcctgaatatgttcagcaatttgcagttgaggaccagatgaagtattttaaaggcagacttccgcaacaatctgggaaaggaagtcgagttgactcatcagaccagattgaatcattctggaataataggggtaaagaggatgctttctctgtagattcacccttcagagctgatgattggagtgttaggagcaagaaacggaagacggggggaaattctcctgatcttaagtacaagttttatagggattcccctacacaattaaatgataggcttttaccttctgaatatagagcaaaaccatttgaagagaagaccagaggacagaatggaggagctgacccagcagtaaatagagctaataaattgtttaatagaaatgaagaaacagaatctgactcaacggatcaatccctcgatgatgaggatagcaaccctttgctgagaagcaagatggcttacccctctggtgttggggaagcttcccggtcttctttgtctaagtatgtgaaaggtgctaaaaaggccaaagttttcatgaaagatccagcagcagatatacagtccctcgatggaactacacactctaagaaggttggtagttttctggaagagggacatctcctcggtatagaaaaatactcttcaaaagcaaaacagaaggggaagatgcgagatagtagtccctttcgtgaatcatctgccatagttatggaagaagataactatgagttgggtttgggtaaatttgctgacggtggtaatgattatgtttacaatttagtcaagaatggcccaggggaacctactggggagaagtcacaaaagacccatccttttgatgggaaacaaaaaaggggaattacccgtgaccaatcacatcacattcgtgattatatggttgatgatgaggatgtttcacttcgacaaggacgattgtcagcggatggtaagagacaaggtagatttgggaagaaaagtatgaacactgaagcatatgtggttgatcattgtgaaaatcctgaggcctctctacaagggtgcagtgtgatgacgaagaaacggaaagggaaggttgatttaactgacatggataagggggatgaaggagacaatgaactgatatctgactataagcatcgtattgatgattccatttctttaaagaaaagggccaagaggaaagttgaggctgacgcttgtggctcagatatagaaccttctgaattacctattccagaaatgggtactacagatatggagctggagattaagccacagaaaaaggcatttactttaatcacaccgacagttctaacaggcttctcattttctattatccatcttctttctgcagttcgcttagcaatgataactccacttccagaagatactttagaggttggcaaatctgttgaagagcagaataagaaggatgatggtgtaaatggggttcattctagagagaatgtagatgccaataacacagagcaggctggggaagttaatgtaccttctctaactgttcaggaaattgtaaaccgtgtgagatcgaaccctggggatccatgcattcttgagactcaagagccacttcaagaccttgtgagaggagttctcaagatattttcctcaaaaacagcaccattaggagcaaaaggttggaagacactggcagtctatgaaaagtctactaaaagttggtcatggcttggtcctgtttctcatagctcatcagatcacgaaacaatcgaggaggtcacatctcctgaggcttggtcccttcctcacaaaatgcttgtcaagttggttgattcatttgctaattggttaaaaagtggccaagagactcttcaacaaataggaagccttcccgcaccaccgttgtcattgatgcagctgaatctggacgagaaagaaaggttcagggacctaagagctcaaaagagtcttaataccattagtcctagcactgaagaagtgagggcttattttcgcaaggaggaaattcttaggtattcaattcctgatagggctttctcttatacagctgctgatggtaagaagtcaattgttgctcccttaagaaggtgtggtggcaagccaacttcaaaagcccgagaccactttatgctgaagcgtgatcgaccaccacatgttactattctttgtcttgttagagatgctgcatctagattgcctggaagcattggcacaagagcagatgtttgtaccttaattagggattctcaatacattgttgaagatgtttctgatagccaagttaatcaagttgttagtggagcccttgaccgtttgcactatgaacgtgatccttgtgtacaatttgatggggaaaggaaattatgggtttatttacatagagaaagagaagaagaagatttcgaggatgatggaacttcatctacaaagaaatggaaaaggcagaaaaaagatgctgcagagcaggctgaccaaggaacagtcactgtggctttctctgggtctgcggatcaggtcggtggatatgatttgtgctctgatctcaatgccgagccaatgagcattgatgataaaggaacagaacttggatttgaaagacatgtggatgatatcattgatccgaatcatgggtctgaacagggtgacatccgtgaaggcgatccaattgtttgggatgctcttgacctaaatcctatgcgagaaaacaaattactgtgtcaggaaaattcaacaaatgaagattttgatgacgaaaccttcggtagagaaagaccagttggagtcttattgtaggcttgcaaggagtccttcaggtagctttcaatagcataatgcttaacccctaatgagttagttacttaatcctatttttagtacatggtgttgcatgacatagttcatgaagccttagctagttatgttcttgttaatctgctacatacagattatgttatataacatctttatatccttaggtttgttaccattaatcaaatatttctattttcaccattctttcttaaaaattgaagaatctgaagactgcccacgattgagtctcacacactcgctatgtgctgcactatttttactcatgtttgacagtcaaatcatgtttaaattttgttgcagacccagatgtgatgtgaagtgatgtgcagtgagtgagatgatgagcatgatctcaatccatggggttgcaagtatgagcaatcaaaacaacaaagcaacagatttgattgaatttgcatgacttgattgcacagtgtatattgattctatttgtttgtagcttgaaaatgtagattaccttacaagttgatctctttttgttggtacagtacaggtggaaatctatatagttccaagttcgtaaataatgcaaattattttttttttctccatatcttacccttttattaccatatttaagataataatttacttgatgccctaaactagggaatagatacctgcttcgtgcagttttaataattttttaaattttacattaaatatattaatttttaattatgaataaaattttaaatttaatacttttttatgtttttttattatgaataatataaaatgtttatgtgaaatcttttttattcgtgattagggaattaatttatgtttttttgcagtctttcataataattgcaatttttttaagttgcttcgaataagtgatataatataatataaataaagaaatttacatgatatattaatttttattatttttttttataaaaatactcttaagtggtattttttatttttttactgtgctttttaataagtttctcactggtattttttaggtgttttactgttgtttagagtttttatactttgtgttttactagtgttttatgaaaatacagtatttttgaaaaaatttccgtgtaagtatttttgtaaaagttaaccaaaatttcaatatttttgtaaatttctctataaatatgacataaatttatgactaaccttaat

SEQ ID NO: 42804 - DNA, 7290 bp, Cannabis sativa
ttaagtatcaaataataaagttaccaattagttagtatgcatacttaattttaatatttaattactcttgtttgataataaattataaaagacactgaaatgttatttttgattttgaatatattatctgatgatggtaaaaagttgtgggttctacataataaaatgaccatcttgaaaaataaatagagagatgatgccagttttgaactaaaagaattaacaatatagttgttattctttaattttaaaattgtaatgaaaagagataaaaataaatatataaaaaaatatttgagtttaaaatttagttattattcttacaaaaaacaaagttacatgtaagcggaaaaatatatattttttagatattaacatgagtattttttaaaaaataagttattataatattactttttaaatcaaaaccaaaataaatagttatgttggtatagctttttttaaaaaaaaaaataatcgtagagaataaaaagcaataaaaaaaataaaaaaataaaaaaatagctaattttcacgtaatggaaaaaaaaaccaaaaaaaaacttagacggaaaaagaattggaatgtacatatatattattttatattaagtatgaaagtatacgtattatctgtattaaaattacatcagtatcagtataaataattttagtattgagtatataattagaagttccccaaaataaaaatgtaataccaaacatggattaggctttaaattcccaatcctgagtaagcaaacatgtacaccaaacaacccataaagttgttacgttagataggagcgttgtcatttggcaccttagggtgcacaacattacatcaatatggcattttataattagcagttttacatatttttttcaaaattaaaatatcaacattgttattggacactagtagtacttagcactttcaaaacgtgttgtatatgttggagaattaattttctaaaagaaaaattatatttagtaatgaaaatttcttcaaaaatatgaaaatttcttcaaagtgttgaaaaaacaaagcgaaatgtattatccatagataaatagagtaattagtgatgaaaccttttaacttcacttttgtttatattttgaagcgttagttaaattttacaattaaatgccaatcagattgtcatcgtataaatctgaatatacatagcatgttttcattaacttcgagattttagagtcaggtttgcgtagtaacaattccaattgttatttaactagcatcccacttaaataggtattgctaaaaaaaatcaaaagattaagtgtataaaaattaaaacataacatttctaatatgtaccaccctatcattaatttatattatcgattaaataatacttttatctgagaatcacaccatctctatcttcaatactgatagagagaattgatctaagttaataacaagacataactgaaaactttaacgttataacattacatacataactctctttttctaaacgtataaaccataaatttgtgtatttctttctactgcttttgtacataaatttgttttgtctttttttgtttatgggactgaaagcagcagtagccattaagatgagcttgtctcactctcaccctccctattacatgacacctatataaagaatatgctggaacccaacaccaaagggaccccttaaatttaaatataaagaaataaagaaagaaaaaaaaaacaaacaattgggttgtgtgcagaccaaaacctattccatggccccattaactaactactactactactactagtactatatctaaccaaaccagcctcctaacaacactttacttacagttttttctaatttaaaagaatattttacatccagcaatgggagttacaatgatgaataatatatcaagggaagagcaaaacttgggcggatttacagtgcggcctcggtgttgaaagagtttccaacatatttggagcaccacaacaaagaagagttttagaaaatcacctgccttaatcctgtaaaaattggaaggctggattctccataagttctgtcgggggttttacgtccgaaaacttcttctcttgtagggaactagaaatatcatcaactgagaatggaatgctgcaatggaggaggggaatattagtaagtgtttgatcaaaacttttagtgttttcagttaaaaaggaaaagagtttagttggccgtaacctggaattgtcatccaacaaaaacgagctgctatcatcgtcgtcgttggaatcatcggtcattagaatcttcatgctagaaattacctgtaaagaggaatggtaggtggtgaaaccatattattagtaacagcccacatgacattactaaacaagcaatttggaaataattttcatagccttacatctggtgacacacttcgggtgttataattgtcatcccagtaaagcgtgcatattctatgaagctgttgaatacttagaatctgatacaaaaccaaataataaatgagaaatttgtaagttatattacatattatgtcgtttatgttaaatataagattagtaagaaatggaattttgtgtaaattggtatgtaataatattcacagttttacaagggaaaagaaacttactgggcataggtcatttgtaatgtcatcgtatgaaattctcgatttttgatgtataacctgcaaattaattgtatcatgaattagcagattgtggaagagctagctcataaacctcatgaaatatttgtgaatattatataaagaaaccatatccagaagttattcctaacacaactgaatacatcataccaaaaatccaacagcctgcctaacatgtttgagttcatcccaagacgagccagcatactgcacaagaaaagtaatcatcaacccaagaactcaaagcataaacgggataaattatgtttacgagaaagagagctatcccttcaaatgataacaaccgtaaaacagtacctcttcttttgcctggccacaccacagctctaattcagccaacccggacttcacatattccccgttgctgaaagtgcaacactctcgacgtaaaagaaggctgccacagcatcagtgaacaatggattcttaagttagttaatacaggtgcttttaattgaaaccaaacaaataagagaaagtggaaacagtgatacctattaaagagttgtacattgatatacgtgaaaacctgagaaaatatcttctgagcaagaacaggaggaacctgaaatgaagctaaggataagttcacagcttattaaagaggaaaatcaagagatgaccaacttcaaattgccaaactaatcacgtacaaaattctctctcaatgtacaaaggagcccgttgaggttgtcaatgatgctgccccaggggctgactgatggactactgccattcgaccctccagatgattttaaaacgtttcctcttgacgttctaggtgcctggattgtcaacaaacaagttatctcctgttagagacatggtacataggaatataataacaaatcattttcattagctagctaggaataatacttaattacctgaattcaacccctaggtcctaagagagacttaaaaaaaggttttggtgtgaaataaatatacctggatacaagatgaaagtagtggtgataactctttcttcaaattatctcttataattccatatatcttctccacatatgctgttagttgctgcttaaagagtaaagctgggtactttgcctcaactgggcgcactatatcaaggggaccaactgaaaggttggctgaggaagagcgaaagccctgagaaagaacaaatttatcttaatgcacaagcaacaactttgattaaattgattcaaatataataagcatttagttacttgggtcatcctcccgaacaaagatgttggcgtagggggctttcttggtacagatcccgcagatttcaaactccgctggagtaagaaaagcaaagctgatgtatttgatagccagtaagccatatgattgttgttatcctggtcctgcaaaaggaaggtttaagtacaaagaaataatgtagttagttcagtccataaacacaaagtgtattctctctttttgagttgggaaccaaaaaccatatcaaaagcatctaagtggatcctatcctagaaaataaggaagtgacattggaggtaaggtgacctagtcatacagtccaactatacaacacttcatttccaattgttacctctattgcagaaccaatcatctgtataagtcgatcaaacacattagttctttctgcttcaaatgatctccagtgaagaaggcatttgtatatagtaaatgctgcaacaggctttccttcaaagaaaccgatgtcctctgttacacatttgataagggcatctacattctcctgcaacacagaagtataaatttcaggttaataaacaaaaacacataaataaattaaaaaacctattgaatccctttaagaacatacatgctgcctttcaatttgagatcttctcagcctactatcagatgtcccaaacttttttgatggcattggtttcagtggttcctgaaaaaagtagactcccttaggatcataaaaaggtacaaaactcacaaaaagtacacaatatacaaaggtgcgcatagtagttttaaacgcttacgtgatgaccattctctttaggctgcaataatgaaggaggaaaatagatcaataaaacattttcagaaataacagaagtataatataagaggaaaagaaaatactaaaatgcataatatattttactgcaccaactctacctcggatgacattgccaaatgttcggacattctcctagaagatgaattaagcaatgtttgctgacgcaaaatttggtcttcagtttccatgtcacagagtttctcttcaagcctaagaatagagtacggtatataaaatacattaaattcagcaaagcaagaaaaaaaaaatatgaatcatgagagaaagggtcactttaatgaaactaagatctccgcctaacccaacaatatttggagaccaataaactatagcaattgctatgtaggtatggcatcagtttgataatagataatagtacctttgcatggcagtctttaattcaattatctttgactctgcatccaaagcctgctttaaccgctcttcactaagcttgctagattcttcaaactttttctctgtttcatcaattttcttttccagtgaattcaccatggcctacaaaatgtcacagcccgtgtaacgttattaagcatcgatgataaagtttgtaagcaggtcacttgaaatgctttcatttggagcaggaaacggatatgtgtttgataaccctaccttgagctgctcattttcagcagcaagcttattcatcaattcattatcaataaccggaacctcctggatgacagggacctcctgaatgactggagcctgttcagctgctaactttaaagcctcgcgctccttgcaaagaagttcttttgtttctttaaactggacttgcatttcttgcaaagcagaatgcagtttcgcattttcctgtgttttagcttcctcaaggtcagcctgcattgcattgatgatacatcaattagaatacaataagaaataaggtaaagtttccagataagaggaaaaaatgaaactccacaaatataaaccattttcacataaccatcttttaccaaaatttttgttttcaaagttcaaacatcagcatcttatagtgaaattcttcatcaacccaaaggctgacaatatatgttaatgacaatcacacaatttaaacttcattgtaggcattagacaagcagaaaaagaaagaacaatactcaatttactaaaaccgttatccaaaattaagttaagaaaaatactttcatttacgaaaaatcagcataacgtgattctttatcatattcaaagaatcaaactccccatataggttaaaaatagtagcttggagaggtaaatgctgacaaataactacagatgacatgtttagggatagcatagagtaacccctcgtttggtggattggagatagtattaaattagaaaaagaaaactatgacaaaatattaaaattataataagttgttcatttgcattaaaagttgcataaattattctgaagtttctcaatggaatttagttatatcacatgctctgtggataaagttctaatatgctctctgatgacaaagccaaaacacatgataaaagtatcaaactcaaccaaatcatatccattatttcaatcaaatatgatataagtaccataaatatcaattaatcttgaggaatataacaactaaaaaaataaaagaataaaaaataactattaaaaaaaagaagcaaatcttaccctcattcgtttctctagctgcagacgccaggtcaattcttcaacttgcttttccagcttatttttggcagcttggagagcaccagtttccttagcagcctgcaaaagattggataaaatcaaaataatattaaaaaagcataaaattactgtcaataaatgagacgaggagttccaggtctaaaatcaggaagaatacaagtttagcaagttgtaacctcaaaacaatttcttaaagtaatagaacaagcatgacattaacaattaacactagaatagatctaatcatgaatgagaaaaccttataaaggaaaaggagataatgaaaaagaaataccattttgagctttcgtaattctctgcgtgcaacttttcctctccaagcacattgtgtggtcactgttgctttctttatcgttaaataacgacggcgatctaagtatttccggcattgactctgacacaatccatagacaagaataagtcagcatagacaatataaaaaatggaaatacaaaccacagtgcacccataaacaaatagacatctatttgacatattgctcaaatttcagttgaaatagctcttcattgttcatagtaactgtattccaattacacatgctatctttacctggataacaatagcagctcttgtctgcttcctgaacttaaggtcactacgtgcagccatccctcgtatacatgtttgaattagaacagctgacgagtgcagcttttgatatgcattcctagaaagacacatacgataacgagtctggattttgatagaagcagcctcccttctcttgtattcatactgatagcgtgcaacttgtcctgccatagat

SEQ ID NO: 42805 - DNA, 1224 bp, Cannabis sativa
cagagtaacaaacttattctaataaaatgtattatttacatccaattgtcttagggagcatgcttgagaagtgcattatatttacatctaattataatatttaacttaggcaataggcaatgcatcatactagtgcatgtcttaaaaggatgatctcttaattaattcctttaagggagttgtaactatttaattaattacttatttttggatctatatcaactgattaattgctggaatagtcaactcactaaaataattgatgagaataatagtactatagaaataataattaatatgtatcatgtatgtagaatataaatattatataatgcaatgtacgtaaacacataattggaaaaaatgctttcactttctcttctttcaatatacatatggcaaatatatatagtaatgtcgttttcatctaattaaaaaaaaaaatcatcacatataaatattattattatgaaagatatttaagaagcacacagacacagttatggtactgctatcaattattagattagatggataagtgaagtgattaatgtagctaatagctatagtatacataattgaagtaagaaattaattaattaattaattatagtagataatattaatatattaatataagaagcacgtgcatatatatactggctatattattatgcatttattaattagaacacaaggaaaaggaatatttgttttgatgtgcaatgcacctgtacagatctctacagcaaagccccactatatatatacacaccaatctatgatatggatcgattatattattcttcgtatttccatatatatatatatgtgcatatattcatgtgctgccaccccaaacttcgcatgcatattaatgatatacatataaatatatatttttatgtatatgatctctcctacccaaaaactcatataaatatatatatatatatatatatttatacgatctttcattgattgtactttgtctgatgttttacttatggtagttacatctttagttttggatgatttaatttaataaaatttatcattattcaaaaaaattcatatatatatatatatataaatcatgttattaattattattattttttcaaccacatatatcatgttatatattaaacactaaaccgtactatatacactctttctttgcacgtatatatataaaaaggcaaccaataccctatggagcta

SEQ ID NO: 42806 - DNA, 2551 bp, Cannabis sativa
agcaactgaatcttgctgcaacatcgcataattaagttagaaattaagcttcttggaaccggaacaaagacagaaatataaatggtatttgataacatttttgttttttaatttttttaatcaaagtagattttttttaaaaaaatttatttttgaaaataaaaatgtattctgtaactacttttatttttgctttcatttaagtcaggtctattttggggtccaaaatattgatgaaagaaaatgtaaatagattgtaattaaaaaagaaacctatttaaaaaattgttgaaagtgatttttttttttaattaaaattttgattctcaattttaaaattaataaacgaaaacatttttatataacatgttttctgaaaatattatctcttttctaataaaaaaaataaaaattgattaaaaacaatattacaaaatacactcacatcaagcaaatttattggagagtaatactacaaaattaaaccaacactaatgtaataatttaagattaaatttaatgatggtataattacttgaaacagacctttgcttccacaagaattagttgtctggtttcgatttttactcttccaacaattgcatttcgttgctggcccttctggtcaaccacaattacttctttccctgattttagttctgaaaggtaacatgttttttcgcccggaatagcaacataggcatgtacaggtccctgcaaacttcaaaaatgtatcagttaaaataagggattgatggaaaattacaactttaaagcactttcaaatgatagcttgaaaattcaccgcattgactcgaaatggtctgctggcaatgtaatttgactccaagcattctgagtgaacaaggaacagccctctagcaaatgatccaacctataatgtatatatgctcatgagaatgaaagactgcaaataatgattagcattggacacagatgaacacgtgcggaagcttacgaggagtccttcaccgggcctcatgatggtacacagatcaacacaaactcgatctcccattcctgctgcttcaactcgggttacagttgccttggtcaagctcaatacgttgttcaagtcatttcttctgtcaagatattcctgatgacattaaccacataagaattcatgtttcgtaattaagacatgcttgcagaaaaatcaagttacctttagctcaaaaacaggttttgtatcctcaactttgagaataactccacccaatccgtgctcgagggcctgcagtaacaagaatgaacatttacagcacattgcttctgtagaaaagcaaatctaagatgtgattatgtgagcctcaactcataccctgatcaagcacattggttatatacctcaaggaagagttgtgcttcagaaaatgtttttgagatagcaaagactgttttttcacttccttgaaatgctgcaacaatattctctgcaggaattacctaaagaaacaaaatcagaaaataaatttcaaaactttacttaaaaaagaaagacattgaacagaaggttcatattatcatgctgcagcatagtaaactaaaatctttgtcatgaaatattctgccttgacagtttccttaatgttgtcaatccacaaaacacgaaatatttgtgtgatggtcagaatctcgtcatctgtaaggggaaagagcgattaaggtgtgcaatctcacatcgtttaggaaagctcaagtgagatgattctaagattgtgtacatatgggactacacagttgaagagaacttaaatgaatacctatatcaacaagataaataatctttttgatagctcatcacttaagaattctaaagttaagcgtgcttgacttagagtaatctcaaaatgagctgtaaagactcatgttggtttgtaagactatcgtcattttagaaagcggccaaagttacgtacccgtgtatactacgtaggtatgagactagacaaagaattagaaagctctattaaatcgataagaccattaaataaaatgttgaaacttgacaaagtaatgtaattaatgttcaaagcaaaaagatgaaacttctatacaaaaattttgcatcacattaaggttaacaacgcctgacatgattctctaaatctaaatgaataactccatagaaaccaccataaagcaaatcaatcttcaaatgtaaaatacttgttacctaaaatcaggtacctgccaatctagtaaatcaacaacaacattctttgccaacccattttcaggttgaagtagttccaactctccaggattagaaatcttaaatacagatccaactcttctcttctccttatcaaaaacccctccctcttcaatatatagaggagatataactgcaattgctgccataatttagaatttaaaaacttgaattcgtgcctctacaaaagattttaacaaaaatctccaactatgtattaagcttacaagaccactcatcggcaagttctcgactttgagaagaaaatataaaagtattccatcctctctcaacggctgccgtcataaccag

SEQ ID NO: 42807 - DNA, 6595 bp, Cannabis sativa
  modified_base (6366)..(6367): a, c, t, g, unknown or other
atatgagtcagtccgttagttaatatgttagttaaagtcggtttaggtgtttagtctatatcggctactgatacatatatataccagtcttagtttgtaacttgtatcgattcaattcaattttcttttcaataagattttctttcctctttctgcaatatggtatcagagcagagaaagagaaactttctctgaccgatcttggttcttgtcggctttccgtgttcttctccggtgaaagtgtcgtgtttcctttcttctctccgacactatcttcatcgcgttcttaaattccttcatcaaacatgtctaatgacgatcaaaccccagttcaatcaggaactgaaggtaatcaagctccgaacattcatggctatcaaagttttcagacctctaatctgaaaaaccctcttgaggatcctgccaatccctactaccttcatcatggagacaatctaggtaatatccttgtctcacaacttcttactggccaagaaaattatgtttcttggagtagagctatggttctttcaatttctgttaagaataaacttgggttccttgatggttccattcttaagccccttactaccgatcttgcattatacaatgcttggatcaggaataacaatattgttatttcctggatcctaaactctgtttctaaagagatctcgtcaagcattctctatgatgagtctgctgctatgatttggacagacttaaaggtcagatttcatcaaagaaatgggccacatatatacaaccttatgaagagtttaatgaatcttaaacaagactcccaatctatcagcatgtattttaccagattaaagactatctgggaggaattatctaactacagaccatcttgtacttgtaatggctgtacatgtggtggtgtaaaaaaacttcaagaacaccatcatatggaatacataatgtcattccttatggggctttctgatcacttctctcaagttcgcagcagcattctcttgatggaacccctccctgaagttaatcgggtatttcatcttgttacacgagaagaaaaccaaagaggaagtcttggagccaccattgatactaataaaaacatggcttttggctttcaaggagataaaactgtagggaacaaatctgattctcaaaaccagaaaacacatccacccaagaagggaaggcctttttgcacccattgcaacattcatgggcacacaattgaaagatgctataaaatacatggatacccaccaggctacaataaacaaaacaaagccaaggatgctgtcactaatcaggtacaaaccgataaggaaaccagcactgtcaacgaagaaccacacactcttctccctcagttaagtgcaaaccaatatcagcaacttcttaatttgctagccagccaacaaaataacattccttcttcagatccttccacatccacaagtaatgcaggtattattctaacttgtagttcagcaaatattcttgatcaatcttggattattgactctggtgccactaggcacataagcaataacatcaagctttttcaatttgtttgttccgttgttgctacaagacttattctaccaaataatgaaatcattgttgttcactatagtggtacagttattatttcaaaagacccctctcttaaaaatgttatttatgtacctaattttaagtttaatctaatctctgttagttgcctaacccatgatgacttctttgctgtaaaattcgacactaacaatttttctatccaggaaacactcaccaagagagtgattggaaaaggtaaagctaataatggtctctatgtgttggagcagcctcctacctctgcctacacactcactgttcctgttaatgtgtggcactcaaggcttgggcatccataaaaaaaagattagctttgctcactgaggatattcgttgtaatgctaatgatttacataaaaactctacttgttacatttgtcctatggcaaaacagaggaaattaccatttccaaagaataataactttgctaagagaattttttatttgattcattgtgatatttggggaccttatcacatcccatctaattctaatcataaattttttcttactttggttgatgataaatctagattcacttggatttacctattacaacataaatctgatgttgctcgtatcatactacagtttctctcatatatccaaactcaatttaatactgtgattaaatgtttcagatccgataatgctcctgaattagtgttcaaagatttgtttgctaagtttggcattttgcatgagtttacttgtgttgagacacccaaacaatacgctgttgctgaaaggaagcaccagcaccttttaaatgtagctagagctcttttttttcaagcaaaactgccaatacatttttggacagattgtatcatgacagctgtataccttataaatcgcacaccaactcccaatttagcaaataagacaccttatgaacttctttttgacaaggttcctcactatgagcatttaagaaattttggatgcttagcttttgcttcgactctcgccgctcatagaactaagtttgctcctagagcacgaacatgtgtttttatgggatatcctcaaggtataaaagggtatagactatatgatatcaacactaaacaattttttgtatctagaaatgttatttttcatgaacatatatatccttttcataaacttaatgacactaatgagcttattgatcctttttctaatattgtcatgccttctcgaaaaatttcacacacacctgttgatgattttccttcatcacctcctagccatagcaatactgacaattgtttacaggatgacattttcttaccaagaaacagtgaggctgctaccgaccctgtacaagaacaaacagatgctcatgacaatccttctggccagcacaacaaacctactaccgcccttcggcgcaccagtagaatcagaagagaacctgcatatcttcgagattttgaatgtcactcaatcattcaagacaattgctcaactcctcactctatttcaaaatttatttcttatgataatttgtctgcttctcacaaagctttcattcttgctattacagccttgtttgaaccaacaaactacaaccaagctgctcagcataaaatatggaatcaagcaatgcaacaagaattgtttgctcttctcaaaaataaaacttggacttatgtgcgactccccccaaacaagaaagcaataggttgtagatgggtctacaaaattaaatacaacagtgatcgaagtgttgaaagatgcaaagctcgtctagtggctcaagggtacactcaacaagaaggattggatttctttgatactttctcccccgtggccaagatggtcaccttcaaactccttcttgccatctccactataaagcaatggcacactctccaactcgacgttaacaatgctttcctaaatggcgatcttcatgaagaagtctatatgacactccccaaaggtctcactttaccttcctcggttcctacagatggtgaaatagtttgcaaactacacaaatcaatctatggccttaagcagtcatctcgacaatggtaccgcaaactctccaactcattgctccaagaaggattctctcaatctcaggccgattacactcttttcaccaaaggcaacaacgattccttcattgctcttcttgtgtatgttgacgacatcatcataactggtccaaatttatccttgttgcaccaacttcaggacaatctcaacagcaagttctcactcaaagctcttgggacactaaagtacttcctaggttttgaaattgcacgagctaaagaaggtctctttttatcccagcgaaagtatacactacaattgctcaatgacagcggttacactggcagtaagccagcaaaaacacctatggatcctagagttaaatttgatgatcaacaaggagaactcctcgaagacccttcccaatatcgtcaactcattgggaagctcctttacctcactctatccagacccgatatcacctacgctgtcaacaacctcagccaattcatggcctctccccggactcctcacctacaagctgcacatcatctattacgttatttaaaaggtagccccggacaaggtctgttgtactcagccacatcctctttacacctccgtggtttctcagattcggattgggcctcttgccccacaacaagacgatctaccacaggcttttgtgtctttattggagactgtttaatctcctggcgcacaaagaaacaacctacaatttcacgcagtttcgctgaagcagaatatcgcgcccttgctgccacaagcagcgaaataacttggattcaatatcttctacaagaccttcacattgctcaaacctcgccagccttcatatattgcgacaaccagtccgctattcacattgccaacaatccaacatttcacgagcgtactaaacacatcgaactggactgtcattttataagggacaaaatcaagaattctactatcagactaattcctgtcaacagtacaatgcaacttgctgatgcattcactaaacccctctcttctactattcttaattcccacatttgcaaaatgtctgtaatgatacagtccatcttgagggggggtaacaaagttatatcaacaactctgctgctactactctgctgcactgttacatctgtttatattcagttagtgagtagtgttgtttttaatctgttagtatacatatgagtcagtccgttagttaatctgttagttaaagtcgtttaggtgtttagtctatgtcggctactggtacatatatataccaatcttagtttgtaacttgtatcgattcaattcaattttcttttcaataagattttctttcctctttccgcaatagttttattgtttaaaaaaacattaaaaaaaaatgggctcataatttaaatattttgccaccttatgtaaattaattgtgtgaaattttacagagtatcaatttatctttatcagtaaaaacatctatattttaatacaatattatgactcaattttttttatataattttgtacattgtaattatagcaagaaaacattctacacatagaaataagattcaacattcaattacacatatgtttatattatatgattgaatatttttaattttatttttaagataataaatgttatatattttctaaacaacaccctagaaacaaaaataacactcttactgtactgctcaataattataatacataatcaggtaggtctctaggtcggctgcacactaaaattaaaataggatttttacatgaaatttttaattttttacttttttattatagtgtagaatttaaaaaaaaaaaaataatgtgtaaattttatactgtgtactatattaagtttttacgattattttttagttgttttattattattttaattgttctattttgttattttacggttgttttataaaaagacgtgttatttttgtaaaaaattctgtgtgacagtaaaattgtaaacttttatccaaaatataatatttttataagaaccccaattaaaatttatgaaaatattattgtaattttaaaataaataattggtggcatgcaaaagttccttatattttaatttttatacattgaatccccttattttgttttttttttctttttttctctggcaaaacccctttaaatttatttttctttgcaaatttgggacattagttaaatatcaccgttaaataccaattaaatgaccaccgtgtacacttgtatatatatgaaagtaaaacttcgaaatcaatacagtaacaatccaattagtatttaacagtgatatacagctaataattaaaatttgtaataaaaaaaataaatataatgacgttttgtcaaaaaaataaataacataattaaatatataaaatcaaaacataaaaaagtttcgccaaaaataattattttaaaaaataaccaaaaattagtcaatatctttgtgcataaataattaaaaaaaaaatgagattctcgatcttaaaagaatcgaatatacataacataaaaaaaatagatatatataaggtgtatttcagaagaatgatacgtttgctaattaatttttttaatgtatacccaatgtaaaatatttttgcttagtatgaacgattaacaaattgtgatttgccattaccatttacatataaatattacttttttagcatttatattaacttaattatatttatagagatatgattttgtcctgttattgtactttnncggattgtaatccgtgatgtacggtagccgtcaaatgaggaaattatttgatctgacggctgagattgatctaggggtaattaggattaaaaagtagaaacatacattgacactcatttaatgtaccctgagacataccacggaatatattctgtaaaagtacaataaggaacaaaatcatatccctatttatatatgtacactttgtatattatatatattatatat

SEQ ID NO: 42808 - DNA, 1651 bp, Cannabis sativa
ttctgaatttgattttagttaaaataattttatattgatttctgttaatgaaaaaattattaatttttagaaagtactatgttgatcaaatttacaaaacacacacatttaacattttaattattatgtgtgtccctaacgtgcactactatatttaattatatagggattgactcggtagaggtaaacctagagcttgagagggtgacagtggtgggatatgttgaccggaacaaggtgttaaaggcggtgaggagggcggggaagagggcggagttctggccttaccccgatccgcccctctacttcacttccacaagtgattatttcagagacaccacaaatgagttcaaggaaagctataactattacaagcatggctacaacattggcgacaaacatggtcgaattcctgtcactcagaggggagacgacaaggtcagcaacatgttcaacgacgacaacgttaatgcttgttctctcatgtaatataactatacgtatatgtatggtgatgtgtatgttcttttatatattatcatcaccccatgaacacatttatatgtgtataatatatgcatgcacgtgttatgtacttaatttatagtaattaagtattttgtgtcatatatatatttatataagggtggacaaatttgaattatatatgtatatgtgtatattgtgaattatttgcataatgtattttaatattttctatttcttttacatgaagctatataacatagttacacgtacacaaattaaatttcataaattttcaaagttgaaaataatttaggatgtctaaatcatcgtataattaattatttaaattgtaatattaacatcttaaattattgaaaaacaaaaagatcacacatgaaaaaaaaaatatattctgttatattatacatcctgaaaacatagaattaaattgtatacatatttatattattatatatatctttaagctagggttaatagtatagatgggtacaagatgagatagatctatgaatatattatatgcttaattattgtacttgttttggtggtggagtgagtggaggaatatattcaatgaaacagtactagatcgatcgtatgaaactgtaccctttgacaatctaaaccatccatattattaatttgttggattatattaaattaattatataaaaatatatagcttactactatatatagccaatagctcctcaaggtaaattcgtctaaccttgaacactatttccaaatattatacattttttttcttgctcctcaaggtaaattatatgttatattatgttatatgtatatgaggtcttatgtaaaacttcatttcaatttaaagcttcacattcctctaatatgacaaagaagtgatactgtagctacatgtaatcacaggataaaactggttattaattattatcgaatcgtacacatctttttgttagagaaatagttttttaatactgtttaatttgttttgttttttcaattttgttactcactaaattgaattttagaggtaattttttaaggctttcagggttagttttagcaaaatttgttaccgactctatttaaagcgacgccgtaagagaagcattaacagacggcataaggacaccctatgccatta

SEQ ID NO: 42809 - DNA, 3208 bp, Cannabis sativa
atttatttgaaacatacctctttacctgacattagagagtcagaggacaatataaaaagagtataaagtgtaatttcctctattttttttagtagttttaaaaaatatcaaatatccttttgaacgaagggctgataatcttggtgattttgggctgttttggttagattttagtaatagaaatattaataagtggatttgattttgtttgtttctttgtgcagagtgttattgataacatgtacaaggaaggaaacaagcccaggacctgaaagatataatagacatttagagcttcactttctaatatttcttcacacacttcccattttcatctctctcttacttattacactataaataattaacaaggtttactgtgttgtaaatgacattttaatattttcatagtcttaatgtttcaattcttagatgacgtttgattggaaaaaaataaaaatattagaatagaaatgtgaataagaatgaaataaaatcaaatttgaaacccataaaaaattagtaaaaaaattataaatttttttcttattttacattagaatggtcattctttctattttaaattgaatagtcatttcactaaaatgataaaaaagttgttagtactttaaaaatgcaattaaataaaaaaatggaataatttttttttttgttttattcattacctctaaccaaattttatattaaatgtatgttactttctttagtacatttttttttatatgttttgtcatcttttttaatgtgtttttcttagcttctgaaaactatgggaaaatattaaccaaacaactattgttttgtttcaacaaaacataaaagaataatttttgttttttgaataagaacaattatatgcactttgccaatattactaataagaaaatgaatgcatagtaataaagaatttcttaggacaatatatgatatacccatgcaaaccaaattcataaacttagaaatacatgagatattgggcctaatgagatacaaaaatctacatcatattaagaagagaaatttacataaactattctttttggtaaatttggtacatatttacgttttttttttaaatatttttacggtatttataaaaataatactaaaacaacaataaaattacataaaaataacataaaaaaaatatataaatataaaaaaactaataacaaaataacaaagagtataatataaaaatatattaaaaatccgtatttaatgttaacaaaatcttaaaactgtaaaaatatttaaaattttgtgtaatcacatttttataaattttattttttattttttaatcgctattaagaattacaagaccttgttattactatttttttattattaaaatgtctcattgtctatgggaaatttgactaatgatgcattattatgaaatgtctagttgtccatgggaaatgtctaattgtcttgttgatatcagacctatcgagcgttatatcggactcatcgtgtcacaatataaaacttaaaattatgaagatcattgggcccactattgggccctatatcagacctatcggactatcttcttcaaccttcaatccctttaacattaatctaccatcggattttatatcaggcttacatcggacatgcatcgggtcaggcgaaaatcacagattcctgtccaaaatacagacctgagccttaaaacttcaaaaatcacatattctccacgaaaaaccactaaaaacacagacctaaaccctaaatcataaaaaataaaacgattacaattaatgtcagcattgggtggtgtggtcgcggtagtctatgagtcgtgtgggtgatgtggtcgcgaggttgaggtggtccgtgagtcgtgggtcgtgtgggtgggtgggtggtccgattgtgtgctcttttgtgtgcgtgttaacagagagagagggggatagaatggggttttaagaaaaagaaaataacctattctactaataatgaataacttaagtttaagaaaataattttgacccaataaataataaatatataattagtcaaatttgccttgtctatatacattagattatataacctgagatttgattccagaacccttctaccccaataccctctatttcacatatatgagaagggttagttttgaaattgatcaccaagagtcttaacctccaccattaaaattaagtaataattattctgattttgaaatgtatttataagagtattaatctttcatattacacacgagtaaaatgagataatttacatatattattattattattattattattattattattttgcttgagaaataaagtgcagactataccctatccacccactagtgttgcaaaatccaaggattttattttgtatatatatatacaaacttacaaaccggccaatttctgcagcgcctaatatgtacaaatttagttctaatagataattaatagtataatttttattataaaaaactgcaacacatatctattaaattaatatggtttatttattaattgaaggctatcaaaaataaataaataaaataaaataaaacggtttgtatatttgagcttccttacaaagaaagaaaaggtctactaaagtcctaaaatgtttcatatttataggattgcaattttcaatttttcaagaatgtctttctcatgttaatcttaagtttaaaaaccataatttatagattggttaagcacatgatctattgattaaataatatgaagtttcttaagtacactccttcaaaagatgttttggtaaaatgctctatgtttatgaaatttttgttttttgaataagaataattatatgcactttgccaatattaattactaataagaaaatgaatgcataataataaagaatttcatagaacaatatatgatatacccatgcacaaaccaaattcataaacatacaaagacatgagatattgggcataatgagatacaaaaatctacatcatattaaggatggaaatttacataaactactcttttttggtaaatttggtatacatttaggttatttttttttttatatttttatggtttataaaaataacaccaaaacaacaataaaactacataaaaataacattcaaataacatcaaaataatatataaaaaacaaaaaaactaagaacaaaataacaaaaatataatat

SEQ ID NO: 42810 - DNA, 5024 bp, Cannabis sativa
aaactcaaacccaaaaatagaacacagattacgaatccaaatgcccaaattcaagctcagatcaataaacattgataaatttttttaacaaaggttacatattgctcaatgtaaatgttagaaacaaatcacattcagataaaggagaaaaacccacaaatgatatactaactctaaaaatcgctaaccatgtcgatctgcattccagtatggtggtcctctttggcttgtcgattcaaattcccagcacgaagctcgcttactctttcaaccccacatgtttctaacttcgatcacgtatggtcactcgccgatagatctcttgagtgatgagaaattagggttttttaattttttatgatttggatacagagagaaaaagaaagaaaaagagattaaaagagggaggttagattctgatgatggtgagaagaaagaacaagatgataaatgggaaaaagagtaaaaaaaaaaaaaaattaggtaaaaaatgtggggatttaggttttgaattaaagtttgtgtttagtgatttgtttttaaacaatgatttttactatgagtttattttttaaaaaaaattttataattttttaaatttcaaatatttttttatttattttttaaataaaaaataattaataaatgatctggaccaatgggaaattgttacgtagatacttatatggcacataacggtgaggtaccaaaaatacgacttaagtaattatgtgttactcggtataaaacttaaatatatttatgccgcaaattactcttatgaaaattttatatgtgctctaataaattccaatgaatgatgtacataagtttttttgtttaataaatatagacgaagtaattataaataaattcatttttttaagcaatatataaaaatttaatatagattttgttgtaatattatcgatagtgaaagtttagaagaccggcccgccattttactaatttgcttgtattcgaagagtacatgaccaaaacattataagaaaccacattcttaaaagatgagattctcacatgttcactagtcaagacagctcaagaaaaagaagttttagaattagaaaatgaacaaaaatcgagaaattcacacaatattagttaataatcaaaagcaaaagcaagaactaattaactttcttgtaattaatcgaataaaaaaaagacacaaacacaagacactacaattaaagaattacaatacaaactactttgttacaagcaacaatagtccccccatgaaggagaaaaaaaaaatgcaaaccttaacaatcaaatcaattttgtataaaccccaaaagtaaaagaaagtaataagttactaataagaagaataatattagaagaggtaactaattaagtttacttgcacaacaaatcatgaaccgttttggatgaagtgttgatgacaaaggtacagtccatttttgcagatctcttcttcttaaaaatcataaacaggtgtacctttccttccaaaattgcagaggcactgaaactcaaattcttggaactgatatcacctgccagatgagaatctgaggagaccttgttggagttaatcgacattgtaatgttgaaactctttgttgaccgagctttgactcgggctttgaccaaagtggtcttcccaacctcagctcctctatataagatcgtggccgtactgttttggaacttgtagtagccgaagttggtgttctttactttgacttctgcattgactttgatcctaaacgaagaggatttggaagaagggtttatgttgatggactcgacagagactgaggctagacgaactttgggtgttctgacacgcataatgaaaacgaaaaagaaaactatgattagggtttgtattatgactccggctactatacaagccaaacacttcctcttccggcgaccgtctaggtttccggtggtcatggctgaaagaaaatggtgtgtttgttatttcttggagttgttttaattaggagaacagaatgatgaagatgattttgtaacttccaatataaactgttttggtgtgtgtaacgttgtatttgtatgtagtatatatatatataagctggttgtgacttgtgagttatgacaaactaaggataattatatgagaaatgataagaaacatgactcaagcattaaaagaaatggtactacattttatattggattctacaattttaatttaataaatagaacattacaaagtgggtaggctagttttttcttttgaaaaagcattgtaagtagttaattagtaatttttttatattatttattaaatcatgtgggatttcaaaatgaattgcactgcttatcatgtaatcacctgtagcaagctgtaaagtatttgaagaatactgatgaagcttctaagtgagattagaaacacagataaaatcctatataatacatactaaaaataaagtagagataataattattatatcatgcattaaattattataattctgcaagtatcttcgtcctagttagttatgataattaatagcatatatcatatgcggatattattaatatgatatatacatggttaagagtgagctagctagctaaatttctttatcagttgaaagatgtaatacttattacattaactaataaattaaagttcagtaaagggtttccttgacgtactttccaacagtactggacatacatgtaacgtggtagagagagagagatcatatgtggaatatttcacaaggaaggcatgaagccagaaattaatattaacaataaataaattaaattcatatgaaagtgactatcacacgtttgaaatattctcaagttgttgaggagggaataagacaaggtttccgtgaagccaggcaaccaagagagatcctctcccactctttttcaacaaaagaggagatccaatccaaccccttataatatatatgtgcacacaaaatatgtattaaaatataaatattatagttttatttttctaacttctgaattccatcttaactccatatatattttgttacatattaatttaatagcgacacgattttgtcctatgatgtatttttacggaataaattttgtagtatattagatgggtcttagggtacattagatgggtctcagggtacgttaccatttttaaccctaattacgtactcctagatcaaccccagccctcagatcaaataacttccccatctaacagctgccgtacatcacggaatacattccataaaaatacatcacaagacaaaatcatttctttaaatttatatgtgtgcacatattatgattactcataattatgccagatagctagaaagatcaagtacgtactagctagatctagagctagttaattagtttaattatcaacaaattaaaaggagagcattgttattagacattatggtgtttagtatcttctcgacatgttgcgttgcgattggatagcaattagaccaatagcaatattgatacgtataaaagagtattaggcatcgctggtaccctttagtatttctatgatacaagacagttatttactatattaatattctaattattgactataacgatctttctcttctatcaaagatatatatatatttatataaaatacattattttttcaaaattaaagaaacaattattcttaattattaaaatatgtagcaccttagtttttatcatacaattttatttgaatagaaagaacgtactctttctcatcaagttatctatgataattaattattaggctttatattaattaaaagatggggactagctagtagtccatttgccaatttataaattaaagctgtagacaatatgcatgatcttagcatgagattgatattgttggataaggaatcattataagcatgatatagttatagtagctagctaatcagtttgtggaatgtgcagaatgtgcatatatatatatatatgtataaatatataattaatcattatatatagttcggaacaggtaaaagcattattataagtttatatatcacactgttccttttgatctatctatctttaacttcaagcaattcggtctccaaatttattaggttttttttttttttttttgtttcgaaatatacaagagcattataggtattatgagtagttagtgattcttttgtagtatttattaatggaaaaattacgagaaaaatccttaaaaaattttgatacagataagtctccaacttaaaaaaatagcagcaatatagtcccaaagcctaaagttcttataattctgttagtctttttttaatagatccgttaattcttccctaaaatatcacgtgttgatattaaatggcgacataagttatgtgtacaaaggtgtaaaggtgaagagatatagcactaatctatatagtcagaatcaaactcaaaattttccttaacgttgacctttcctcttagcctctgaaggatcttgagattgacacctactataaagactttgctattatatatcttatgggtgatagtcttggagctactgataatattcttatgatcaaccctagtagagaaatagtcgaaagaggagatttagagagacatatttagaaagatagatactactacaaacaaaggcctttaatcccggtttttaaggccttttatcccggtttttgctaaaattaaaaccgggatatatgccagtaagataaaaagtccttgaaaaaatcgggataaaaagggactttttatcccggtttttttataacaactgggataaaagatacccttttatcccggttcttatgagaaaagcgggataaaaagtaccattttatcccagttttctcataagaaccgggataaaagggtatcttttatcctagattttattttaaaaccaggataaaaggtccctttttatcccattttttttaaaaaaaaaaacgggataaaaggtcttaaaaggtgaccttttattcaatgtaggtgtttca

SEQ ID NO: 42811 - DNA, 17103 bp, Cannabis sativa
  modified_base (4325)..(4334): a, c, t, g, unknown or other
  modified_base (5604)..(5621): a, c, t, g, unknown or other
ttaactgtcaacatagattgtttatatatacaccattgtacatgtgacacatttatattagtacatctaatattattatttaaaaaaatatcaaaattatttcaaattttataatatttttttatcttttaaatattttatgattttatttaattttaaaataaattttgtaaaaaaattttaaacaataatattacgagtattaatataaatgtgtcatgtatacaagaatatacacacaaataattcatagtagcaattaataccttaaatttactattggtctagtaatttgaaaatttttaccaaaatttaaatttaaaaaattaaatataagtaaaacaataatcaaaaagatttaaccaacaaaaattacatctctttccttgtccctttcaagttatatttgtttatttttcttattataattccagaacaccgcgtagtaatatgtcttacacgaatcaaacaaaatctttttacaaataataataattaaccaaagcccattacttattaaccatatatttgatgaccccatcaaataatatatgcattattatatatgatttcaaaggcagtgcttggaatttcaaagttggagacaattccaatcttcattgccctgtttttgcttcttttccaagtcgtgcattgtttgcttggtcagaaagtcaaagcttttaacaggacaaggtctttgttttctgttcctcttatattccctctctctctctcttttccttcattaaaagatttcatttctttctctctcaacttctaaaaaccataaccccttatttcagttaattgagttcagtttgattcttacactgtttagtgtttatgttattgaatttgaggctattaaactcttcatttgatttgactttagtcaaccctttctagctctgttatagtttttttgatcaactctggattttgatcttttttttaatcaatggatgggtcacaaggtagttctactgcaccagcaccatttctaacgaaaacatatgaattggttgaagaaccaatgacagacaacattgtatcttggagtcaaaatggttgcagttttgttgtatggaatccaactgagttttctaaagatttgcttcctatgtatttcaagcacaataacttttccagctttgtcagacaacttaacacttatgtaagtaatctttacttttgtcacttttcattgaacactcttctatcaattgcacataagtatgtggcttgttagtgctaccattctgtaatggattattagttgatgcatggatattataaaagttttatatgaataattaggatttttgtcgcctgaactataacaactactatctgattcaaatcaaaggttcaagggaattcaaatcaatgtaaaagaattggggacacaatttggtagtagctacacaggactgaaatttctattctatgtagtcttttacatgtgtttctatagagtctgaggttgcacctaatgttttcttatgtgttgtgtttgagcaggggtttaggaagattgatcctgatcaatgggagtttgcaaatgaagaatttattagaggacaaagacatcttttgaagaacattcataggcgaaaaccgattcatagtcattcgatacacaatcaagtgaattctgttcctttaaccgatacagaaagatatgagtatgagaaagaaatcaaaagactaaaaaatgagaagaactctcttcagttgacactacagatgcatgaaagagaaaaacaagagtttgagcttcaaaaacagtctctaaataaccgatttcaaaccatggaacagaggcaaatgcagctgatgtcctccttagctgagctaatgcagaaaccatcatttgcttctatacttatgcaacattcagataatcacaacaagaagagaaggttgttgaattcttctagtaaccattcagatgaatccaatatagacgaaaactcgaattggaatcaagaagacacaaagctgaaccacattgagaagcttgaagggtctatagagttttgggagagttttctatacagaattggtgaagagttcaacagtgttgctggtgtgttctcacaagcctctcctatgattgacacagaaatagtacaacatgttgagctcaacttctgcagatcatgttcacctttgtcacatccatcttcaccgaattcattcgataataataataataatgttcattcatctcccgaggcgcctggctcgcccattaatcatcttgacattgccaatatattctcaatatgtcttgatgctgttgacaccacaccgaaatcttcaaagctcgatatgaactcgagccccgcttgtggtgctgaagttgagggctctaaggaagaagaagatgttggtgtaactgaggtttcgcctgctaaggttaatgatttcttctgggaacaatgcttgactgagaccccccctgcctcttctgatttacatgaaatccaaccggagagagttcaaatcgatgagagctcgaatggaagcaaggctgcaactcacaagacaaattggtggaacatgaatagtaacaacaacacaacacaaagagggcatctcacttcagctaactaattttcagttaaatgccatttcatatttgatagtgttctcatgatgatgatgatgatggttggttgtatgataattgttagtgttatagtgatgagactatgttaagaaggcattagataggtttttagacattacatttttgtagcaaaaagactttggacatattcatttgattttatgtaaagtattattgtggattctgatgttagattgtaaatattactttttttttctttagacttgttcatgtgaaatttctcaaactaaatgttaaaatttgtaaaataatcttatttaatttactttatgcgactattatgattgtaccgtataaatctatactcggtttgcaaccttaaaggtcgttcatgatcatttctgcaactatacaagattattttactaataaatttttggtaaagttattttcctaataaaaaaaatttcataaacactttttacaaaatatgttcatctctttcctattgtatttttctttgatcacatttagatacttgaaaatctttgttgaaacaaaattttcattctagtggttgtgaatgaatgacctttgtattcacgtgtttgatattgtctaatatgtttgaacaaatttacaaatcaccatcgtttttggttataagaatattcagttataagttttggttccaaatttccaatatataatgaaagaagcttcctacaaccattaatccaatccaaacatgtcttctttgtctatctattttctattttttaacataaacacaaagaagaaaagatttttctaaattttggaacctttgactgggtggatgccctaaacatattagtttttaaaatctcaccacaacctcatttgggtgggattatgctcagcttttgatgtgttagtaagagttttatttggtgagttttagtaaagaggagttaagattaagagaaggagatttttcatggaaagtaatttaaaatttacttttatattttacatgacataaataaataatacaaaaatatgttattaaaaattaattaaagttaaaaaatatggaaaaccaaacaaaagaccatatataaataagtttgataaaatttctaataacaaatattactagagaagtcgtaggagaaagacaccgggatcaaaaaattcatcgttggaaaagtcacaagagttaaatatctcagatataaattaaaatagaatcggttttatatcttaatgaataaaaacaagtaacacacaataatttaaattgattataattaaaaaaacaaagaggaaatcagttcttaaatcactgaaatataaattaaaaacaaaactaatttcacaacaaaatgagtaaaaactagtttcacgagatggaattgtactctttgacaatatagaattatatttatagaattcttacttccagtctattgatataatcaatataagtagttcgctctccaattatttgttcataattaaagttggtcaaaattactcttttacctttctaattatctcttaattccttatgtaccattaattcaatgtgaacagttgatctataatcttagcactcccaaaattaacactataagagaattaatattctaccctttcggaaagcttagattctattattgtataccatgttcctattcactcatgttattaagctcacaaaataaaagttgtaagaatcatnnnnnnnnnnaaactttaacgagtgaattaaaaaactcaataaacacaaataggtattcatactcaggattcagactgatctactaatgatcattgttgtgatatgaataactctttcatagtaaacaacatgctgatgaaagatgttattatatatcaatctagtcatgtataatcaaattatacataatatctttactacatgtctatccaccacatatatgattcgaatcaaaatcacacgcactagagtatagtgcatagtaaaatatacttggtaatttcacattaaagattttttactttaatacactatcgacttattttattcatattgtgtatgatcttatttctcttgcacgaccttgcaagtttataccatctttatatgaataggaattttactatatttattaattatacatctatatttaatatattaatttatcttaacattgtattttatgtagtttataatagattatgtgtcaattacttgtttttagggcataagtcctaataggttccatctaccatagtgcaaggcaagtgaacaaaatatcgtcaagactgtggccaatcacattgggcataactgaagtaatggtcgtggccgcaaaaggtgactgagaaggattgtttgaacaagaagaattaggattggaagggttatctataacaacaagatccatagaagactatcgttaatagagctctgatactatgagaaacttagagaaggagaggaagaacatagattgaacttatttatgcaaagtaagaaggaattgatttgagagctatgtaaaagttgcttaactcagtaatataaagtcttatttagagagaaaaagttacaaagtaaaagggtcaagaaaataagaattaagacccaagattattacaactaacatagaaaattaataaactaacaaccatattaatccgtctagtaaccgttaatagttaggtgatttggtcaataactctcttattactatgtaaaaaatattttatttagaacataaaatcttgatttttttttttaaaaaaaataaggtgcgtatatgaatacgagtgtaaatgtaatgctctttttttttaaaaaaaaaaaaaatttacctataattttattatttagttagtaactacatataaatagttagtaaattgaaaaaaaaaaaagagaaaaaaaaatcagtgccactacaataattagtatatgagaaaaaaacatattaatattccactataggtcaataataataataataataatnnnnnnnnnnnnnnnnnnaataataataataaaaaaagttttgtttgttttgtatgaaaggaagaaagaaaaaaaaaagttttgtttgttttatacttaagggaaggaaaaggaaaagagagttgttaatctatcttaaacacaaagcaagcaatagtcagactttgacctactcaaattatgaagccaacaaccgtataatcaaataaatttaaggaaaaaaaaaagcaattggatgtcatttttaattataaattaattttgtatacatagttggtattataaaagaaaaaaaaaaattaagttagtaatttcttgattgacaaaaaagaaagcaaattagagtttttttttatttatttagattgttagatttaaattatgtttaattttaccaagtttaagatcacttttgatacatatcaaaatttgaaataacttactcattatttcataaataaaataaaaaattattgttgaacactacttataattatagatgagatctagtaatattttttaaaaattattaaattaaattatataaaatttaatatttaattatacgaataacaatataacacctaatctcttttcacatttcccttcacaaaaatcttcccaaaaaaaaatcttattattactataaaatttcccaataaaaaagaggaaattaaagataaaaaaaaaagcattaatggtgtattcatgttgccacaaaaaaaatggtgtatttatgtataagtatctccaaatttccataaatgtgttaatgttacgttgaaaaaagataaaggacagcatctagacaattatatcatacccatttcccaattcccagatcggatctctctctagctctctccttctctctcgcttcctgtctttctctctatcccaatatcttctcctcaacttcagtttcaggttcgtcatttcattctctccatttctcttgttcacttcggattcgacattttcaactaatcacattttagttttcaagtttcttttctgtgcatatcatatcatacgtgtgttttcccaccatttttcccctttttaagtcgataggggagatttggttttgaattgtgggaatatgaaaaagagagataattaggagaatgtgtagttgattgcatacgttttgatcaagcaaagaatataattgggttttgtttattgtttcatacccacttcgtttgtgtacatcatattccttttttttcaaattgttgatagaaatttttggcctttataggtaaaattttgagtgctgagattgagctctgaatagtcagtgcttgcatgtgagttttggagctgttaatgagctttatttgctgaaattctggaagggttttgttgggtattggatcagttgacattgaaaatcacatgcaccaggtctcctttgtgtgttaatatgttttatataatctatttatcaaattttgtgggcaatgaataatgttatagatcatcggacaagtttgataaggtttggggagtatattcatggctttgaattagagcaaggaaggagatggtagaggatgatttagatacaaagagggttgaaattactggaagcaagtgcactcaaagtggaagtcttcgaagggagccttcattttctggttggtgtgatgaagatgggaaattagagttggatcatcatttgaggaatagtgatgcaagagtagaagattctgattttgaattgcctttggttcaacaaggtgagatagaaccaaatattgtaggtacacacaggtattttattactgaatataatccaatgagtatccccttgagtggtggggatagcatggatgacacttcaatccatgttgagagagatataaaagagaaatatgagccttttgatattgagattgagtctgcaaagaagataaatgttgcagatggatccgtttcttgtcataatcataagcaagtgccaggaaatacgagtaatcttatatctgcccccgatattttgaagacattatttttcattcttgtttggtacaccttcagcctgtttcttacattgtaagttccttctcatcagtcattcattatatgtacagtttttattcaaatggtttatagattcacagatcatttctttctaaaaattaccattattattattataattatgatgcttttttatcttttcgagtcttaagtttacaactgtttgactaggtataacaagagtttgttagggaatgacttggggaagtttccagcacccctattgatgaacactgtccattttacaatgcaagctgttttatcaaaatcaatcacatggtattggtctgagagattccaaactaatgttgttatgtcatggagggattattttatgagaggtaaactcattatttttctatcttttgtctctacttagtgatgtctatttggtagacttccattggattcgtgattttatgttttttattcctttttttctaatatacactaaaacattgttgttctctatatactttcagttcttgtaagctggctatcataatttactttctttaaattaacatttctatcaactaatgctacagatggaatttgcctttcacagttgtaccaacagctcttgggacagcaatggatattaacttgagcaatgcatctcttgtttctatatcagtcacgtttgccacgatggttggtttttgtcccttctatattcatgagatgttcattcttgtctactttggttgattaaatgtgattattcattctaattttctaatattgtttagccgtgttcttgactttgaactctatttctgcagtgtaaatcaggcgctcctatatttcttcttctatttgcttttgcttttaggtaactctctagtcaagttaatcatgtagtctttatgtttttaatcacgtgcctggctttccgacagacatttgctattatgttttgcctgattatgatggatgctaaaatttgccgctctatgattctttgaaactccttatttccctaattagagtactatgctaaaaaaaattctgcaacacaacttacaacacttttgaaaattgaaatggttaagttttctgtttcattgttttggcacacaaaataattaactgtggcataataggattagagcataattaatggggatgcacagctcttattaagggtgattttgtgtataataacgacttgttaattatcaatatctataagacataggcaggtaactatctctacagcccattggagtatcatggcaactggatgatcatgagtgatttccttagccttattatgtaatcttaagggaaataaatatcataactttaatctattacaataaaatcatcaagtagtaaatcaacaaagcctaaaatgatttctcttccttacccaagacgagtagcttaaagtctgagtttcgagttattcctcagtatttgcatagcaggtgctataatttttgttcttgagggttatgctaggagtctaatcttgaaaaaaaaaattaaagatttatccttctttcaagtttaactactacaataccattgtagtgaatatgatctccacgagatgtacataatgcttcagctagtacacaaatgtgtatactgtgatttttctgttgattagttactgcatgcatttggtgaaggatgacaagtagacatttttttcaacaaatatgagccaggccagtgtctgcaaattaaattgctttactggttatagagctaacctcattttcaacagaaatatgtcagcaatatttcatttcatgtgtttgtaacaaaaaatttacactattttgttattgatcgccttttacttcagtgagcactttcaatttacattagatgaatgtttactttattgctcccgctatctgttttctaacatccacatatttctgatatcatttttccctgatctgtatgcttcgcgagatatcatcatcaatttttaaagctttatacttgttctgatatattttttttctggaaggttggagtctccaagcattaaactgtcaggcataattttagtaatctcccttggaatattattaacaggtaaactgctttttcaggtgcactttacttcttaggcattccaataaataaatgaagatttactttttatatctatgttttcttttttgaattattgatattgcagcacctcttataagaaccttggccaccctattttttcataacttgctttttctattcaataatgttttctttatcttacccaagatcagtaatggatatttccatattgaataatatgggtgctaagaaaggggaaattttgtttatacgaataaaagaagaatcagaaagcttaaagaataaattaatcggttcttgtacctatctatcattttagaagaatacatcactgaggttattatttaccatctgatgtacgcatttgaccaattgaaatttattaaatgtattccttggtaagttcctagttggacctcatacctttactaagtttcctttcttaatgtgttttttaagaggtgaggaaacatgcactaattgatggttactttgtttattttcatttatgtttttgacttggaacactgattagcacattatcattctgtagttccagctttactaatttgcttgctgtctgctgttctcttctctctattttagtctaatgcagcacatgctgttgatttactcaaaaaagttgctattgtagttctcagaacactttatcttttcattcggcagttgcaaaggaaacagagtttgagcttgggggtttcattcttgttatgcttgctgctgttatgtctggcttccggtggtgcatgactcaaattcttttgcaagtatgctttgtttgtttgattaaattgatattcaaaattacatgtagattcgtgtattcactgactcgctcttttttgtttgtgtttctttttttcttgggatggtatcttccttcttgtctacatgtttctttctgaaaccatgtatagaaagaatcctacggtatgtgctaaactttgctttatgaattatgaatctacatgctttttttttatgcatggtgcatttcaatgattattggatcatcacctctccttttgtctagagactattgtagtctatgtgctctttctgatatttagattaagcaaatgcttctatttggcatactaaactgtgtagtatttccatttgattttgcaggattaaaaaacccgctgaccctgatgagctatgtaactccagtgatggcagtggcaaccggtattctctcgttaatgctggatccatggaatgagtttagaaagaatgattacttcaataatccatggcatgtcactcgaagctctttgctgatgctccttggtggaactcttgcattttttatggtaagagttaacattgctgtcgtttcctgtttgtacatgagttcgtgagtgtttttcgtttgttttacttatttctaattattatttgggactgtaatgacagaagtgtagaccttccacttcatatattttgctgcttgtttattacaagttaaattgtttttaaatttgattttgaaacttggattactaagctctactgttgctacaggtgttaacagaatacattcttgtctcagtaactagtgctgttacagtgacaatagcaggcgttgtgaaggaggctgtcacaatattggtattaattgttcctcatcttgtttgatttacattgttgtcttgttcctctcagtaactaagctctcttttcctttttgtaatttttttatatcaacctacaattccactaaatatttatagcatacatagttcatgagaaatagaattagagggctggcacccttacatggatttaaatgatcaaatttgaaaagctagtgttacactacattgaatattgaactcataaacatgatttgaaatagctttttttttttttttcttttcctctgatcaatgttctacactgttaaacagtgcctcttagttttaccctattttatgtgtgctcaggttgcagtcatttatttcggtgatgagtttacttggctaaaaggagcaggcctattcacaatcatgattggtgttagtttattcaactggtacaagtaagttatcattcttgataagctttgatcacaactatttcttttttgtcattgtttttgtccgttaatctttatttgtcattggttaatcaagaacatttaacctattttaagtctccttttcaattttgattagcacctttcttcacatttgactctttcagtccatcaattttataattcagaccctacagaaaaaaataaataaacggaaagctgttatcagagtctattgcaggttttatattttcatttcagccaatacagtaatttaaaagtcgaatagagaaacaactgaaaaactcagaaaatgtccgcttttataacaactccgagaaacttttataacaacaactccgagaaacttttatgtttgctttctcttaacatgtctttcactaactcatactttagctagcttgttgagcttcatgtaggttccacacacacacatatttaacacttaattatgtttcatctttcttaaaatttatcatttatatgacaatggcccaccttaattaactgattttgaaagttgtagttctggctttataggtattttaacaactagagatcactgaatagttttctaatcatgaactttttttacacggaaagtattttagtaattatgatgtgcacttactgtttctgttatagcgaaatctgtcatgaaatcttcaacatgctgtttaactttgtgcttaatctatcaagtttggttctgttttatgtttttagatacaataaccttcagaagcatcatcacacaagtgaagacatggagtcttctacaactaatgttgctgcaaaatatgtcattcttgaggagatggatgagcaagaaaatggtagttgaaagccttattcatatgttcacctgagaaatctcaccttcaatgtaagcattacttttaactaaatggaatctatccgttttctttataaaattcattggaagtctcattttaaactgctcgtgcactattaatatatgcgacagtgcattataaagtactttcaactacatatttcagcccattgcattgatattacgcttaagaatgcaaatagaaagttcttcattcttccgataattatgactaagataattttttgttatcccaagaatttcaacttttttttttgtaattctttgttgttcattctatgattggtttacaggcagaatgataatggtcagtcaagtggattagtaatcacattttaatcaacatttgaatgtcacctattccttgcatattcttgtgtttctagtctaacccaaaaattggcatgtacaggttttcgcaaacaaacaaaaatttcgttattcaaatttgcacgttgacgaagatttacaggaagcagttttggttagtttcaattttatagccacatttgcatttatttcttcttctttttggggttttctaatcaggggttctgtcaaagcattggaatcaaaatctaccattgggctcttcacaatcaaacaagcttgttggtgaaaatcgactcattagtttgtacaagctccctggattccccatgtttttccccaatataatattctctctttgtagctaaaataggggccaaagattacaacttcaagttgaaatggtttgagtgctacttttgtctttggaattttatgccatcattttggatgtacataataaatgattttttttttttttttgataacaacataataaatgacttgagcttgtgttatccctaaagtaaaatgcttgccagggaatatattgacaatttatatatacctactcattacaataaattgttggttttcaaatgctgtgtcaactgatgttcttgtgattttgaagccacaagtattaatgataatgttaaatttaggtgaaatgtttattcaaaggttgacacattatttagaagataaggttgatgcagccaatcttcatggcaatgacataatccacaagatagttggaatatattattttatatagccacaaatagtagattaatattagaccataacaaattatgataaaagactaatatctctcatcagttcattaattgacattgaattttctcaaaaaaagtaacttcaatgagaaggtgctggtgaccctcaaatggcctttctctttcgattttgtcgctgagtgttgcggtggccctcttcacttcagggagggtatctgggctctagagtgttggttctcttcccctttgtttggatctcagtgtatgtcacgagtttctttttagtcgttctggttctggtgcacaattgcttgtgttgagttttcgaagttttgtagttgttgaagggtggacgtgcgttttaccccaaagggatgtgcttccctgtcccgtctattctgaccttaaatgggaaaccgagtatgctttgttctcgtcgaaagttcccattactcatttgcttgcgattgcttgttttgagctgtcccattggctactgccttttgttagggagaggcactttgaggccgttatttgcttgctttaggcctttttcatggggcttgtctctctagatgctcctatgtgagcttattgctcctttgtttcttggtgtggttggttgtaagttgagtcttcttcttgtgagatcgtgagatttgttcagctttgtctctgtctaacttgtaaggcgatgtccctcttttaataataaattaattttatttctcaaaaataaatacatacacaaataaaatttttgtgggtagacaaacattgacttttttgttctttgttgagaaaaataaaaattcatgttaataagtaaatctattacatgatgtaattgctcaaagagcataattaacaatatttggcaaatcatgtcgtttacaataataggaaagaaaatcctaataccttcaactaaaagactaataaactggaaattagcgatgatgcatcaaacaagcgcgaagaatgctagatctcaaattcatatgaacacgtgacaaatcacacctattaatggctatcagcccggctggactccaccagatctgaagtcaataaacggaacccgacataggcaaacacccaaattgtcgttaaatcgaccatcaaagagtcagaccacgtacgctgtcccaaaacacttacgcacaccaaaaagatctccatagaatagggacgaaacattatgcagctcggagatgccaaaggaatcaaggagatgcctgaccagagccacacctaaagccatagacggttggtgccttggttggagaaaaaagcaaacgacgactacaaaggtttaggatgaaactctaacaaactcctctcaaaagatcttgaagagaacatagattttgcttttggtatccaaaaagaactacattatctcttattgtagactattttagaagtttgattttagtgggaaaagaaaaatatagaaaattaagtgaggaaaaaaataaatttttaatgattgttattgaaaattttgttgaattatttttaactttatatatatatataatctttttttctatatgatatattagaagttggttttttttttttttattattatttcaacatttttttacttacatttttcaaaatttctttctccactaaaatttaatttccaaaattgactgcaaattatatgtgcggcaaaatatgtataaagaactcagtcactaataataccataaaccattttacttattatcaatcagtattgagatggaatcacgatagtactttctattttttttttcctttttcttctcttttccattataggaagtagtacctacatttcttttttctttttcattataggtattacatgaattttctttacacattatcattcatttaaaaaggaatagtattgcattggacaacatacattatccaacacctctttcaccacgatttgttaacacgataaaataatttagtgttggacatcttaaagtggcaaacaatacaacgacttaataataataataataatgaaaatgatatgaataattattagatgatgaataataaatttaaggtgaatgactttttcgatcaccatttttgaagttgaagtcatagggtaatggtgatctatgatctcgacatcgctcttcacgcacacaacctctgtcgtaatggttacttgaacgtcgtttcatgcaattgatgtgagtactttttgaattgcatccacgaatttgatcatttccaaatatcccataactaattaatgatgcatcaattgccaccacattacatacaataacaatcaatatgcttatcatacaaactacaattactttctttgaataaataataatacccatattaatatttttctatttatttttgctgtaatttttatatatatatgacatgagtatgctaatattagcttagctagagatttgttttgactaaaatagttataaggctatatttaattacttaatcttttttttttttgactaaaaatgaaaattttccttcttttactccttaccatcattagatcatattggttggtgtttttaaccccatgaaataggctgtacacaaaaccgaaacaaacctctaattttagactaaaagtataaatatacataaattatgtggggattgatatctcatagaatatccctgttacaatagctccttcgattgaatcaattggatttaattcaattgaaggaactatagtaatattgataataataaatacgtacttttcttgttgaaagatacgtacgtatttgatgatgagaaataatattattgcggttatgatgatgatggtgattatgatagttggatcaaaagcaagtagaaagatgaaggaaattgattatggagcaatagaacaagatgaattccataggtgttgcataaagcatgattacgaatcttgcaaaatgtttaaggaaattgctaaccattacaataggggttgcgaaactgtcgatcgatgtcgacaacaacaacattatcgtcaacgtcatattccattccaattctcacatttaactcctgtacccgcacccgctcccgcagccaactaactttttcttttcttttcatttttgcctatgatatatctactgccttattacaatgttatttcgtttttctttctatttttcaatcattgtaatgattttgaccgattaatacaagaatatacttattttttataagagtaaataacattttggattttgtattttgtaaaagttactaattggaccatctattttgttaagtgataaaatgaaccctgtatttttcaaaattgtacaa

SEQ ID NO: 42812 - DNA, 1455 bp, Cannabis sativa
atttcgatcctttattcatatatatgtttgtttaattccgcattttatatacacatacatatatttcagtttatacatataaattgtctaacacgagagacatattattggtacgtcatccttttctttaggaattgactccatgtgcctgcttttcacgagattgtactcatttttttaggcgaaatattcgcacaataacatgtattaaataatacaatttatattatattaaaatttattataatcatatttattaatataaaaacagtgttttttttatatttaatacaacacaaaatatactacctaccaaacgagctctatgtaatccttgtcaatgtgactctctaactctacgttatatctctactcgttctgtccactaaaagagcatagctaattggctattatataagattcaatacaagaagatactgctctcatcaactcactacagagtactttttatttttaacactcaatcaaatctctctaatatacacataataatgtatacatagtaaagaccaataatagacttccacttggccaaatagaaaaccgatcaagctagctgtagtcttgatgacatttcttgtcaataacagtgcaactttgtattaaggctaaaagattttgccaccaatttcttaatggatattaattaatattaaagatcagccaattatcttgatattcattgaccttaataatattatattaatttagcaatattattcaacatatatatcaatgaaatttagatacagattcatacttaccaaatgataaactgaagttagagcaattaacacacatacataaatatcatttacttgataaattaaaaaaacttcacttttatacaaataaatatatatatatatatacacaaatttatataaaaagtataatgatgacaaaattaacttctttctcttctagttgatctgtcatgtagttgtctggacgagacagttgagagcactagcaatacatttatataattttcaataaaaaatctaccacttctataaaaatcaatattaattaatacccaaattgcatgataatcatagctagctatagctggttttggattttgattcgaagacaaattcagggccatatatattttaatgggtgatgatgctttgttccccagcaaaagttataacatgatatgttgtattcatatatatatatatatatatgtatatgggtaggaccaaataataatagttataaggatttcttcgaacacactctgattaatgcagggcaatagagcctctctcggtggtgatgagaatcaatgccctctttatttagaaggatccatttatatggaccactttgtatatatcaaggtatattcaaattataatggcttttctatggatgatatatagtcacaaagtaatggtgggttaataaagccagagaatatat

SEQ ID NO: 42813 - DNA, 4197 bp, Cannabis sativa
ttttttttttttttttgtgcaaagatattttatttttagtttggggttatcaagtagtaggtgctatatggtcaacaaagaattttgttctcttttatttattttattgattattatttggtaaacttctttgtgaacacgcatttgtaggtggagctcatttcacttgaaagtgaaacaaaatctaccaatatgccacttagcaaatacaaccagtctccaataattaaaattaaaatcaataaataaataaaacgtttattatttttctttgtagataaaaacacatttctcttcttttctttcttatgatgcaacacctacaattaacaatataaaaattaccatttattattatttaatttatatctaatttacttacacatttgatcaataacaattaaatattccattttctttttcaagttctcagtagaccatatatatatatagtgtctcttcctcacagagaaattaaattccatttttttttcaacgttcttatttaatcatattatatttattgtccttcatttgtcctcgtaatataatattcatttccttttctatttttaaacaatcaaaaaaaatcaataacccaaaatatatatcttttagtacgaattttgaactacatagaaaaaattatatttctttccaaaactttcacttttgtgtgtcaatttttaatgattgtttatatattaaattatatactctacagattttgataattattaaattatgtccttcaaattttaatgtgtaccgaataatgctctctaaaattttatccatattagacttttactaaaattgaataaaagttgtcaaatccaataatatcaacagtttagagaaattttttaagaagtataatttagtatatgttaaagttcaaaaaataaaaattctaattaatttttgcaaaattcaaaaaaaaaaaccagttaacttgtaagtggatttttttttttaattatacgtacttactgtatcacataatggtacatattgatataaaaacacttaaaacaaataaatataaaaccttattcttccaacaaaaaaaatgtggcaatatgtttaaactttatattcctgctcacaaatattaaatttactgtggtgggactaataatgtacttttagaaagttcatgagtttgagtgataaaaataattgaaaaataaataataaaaattatataaaaatgagatgagatgaaaagttgatgtgttggactaaactaggtttgagacaaacagtagtgatgttttatgatctgtttggttactatcagaagatgacatgaaaggcctctctcaaccattaactattttgtttgctaagcattcatccaaatgtgggttttcattattttcttcaatttcatcaattattatttttaatgttattattcaattcatctaattaattgtacattaccaaccttatactctattattataattaatatacacacatctaactacacccatgaaccaactcaatatagtgggaaaaattaaaaaacaaccaaacaaatataagatgatcaccaatgggatgaccgttagttgctttaattctttgatgtttgactcttcatcaactatatattaaaaaatatatatgtatatatataatcctttctagaatgttataactagtttatttatataaattaatataaataataaccatgcattatatttacatgcaccaaaaacaagcaaaattaaaaagatgtttattattaataataatggtaaaaaggtacttctaatttgaatgtattctatcttcatgtactacgtatatatattctatataatcaataacaacatatgattttgatagaaattatgttaaaaattgtaaggattatttaaaattgaagacacttttttatatagatatagactttgtgttttcactttaattacatttcaatatgtgcaaaactccttgtttaaataatgattacatatataataaagggaaattatatataaacaaaataataaaaacaaataaataccctttttaaggctactattgtctaataattgagttgacaccacaaaaacataatattacaaactaaaacttaatttgtaattaattgaaaaataataatcgtcatttgattgtaagtttaaacagaaaaccaaccaataataagctaaccactatttcaagataattattagttactaattagaaagaaaaaaatgagaataataataaggttgtaacccttttaagggtcttaattaacactaattaatacctattactttatttggttgatcaaaatgatgaaaaaataaaacaacagcaacaactttatgtaacatgtaagaaattaacaaaatcagagaattaaggaataaaattaaaatcttagttataagagaatatgtaattaatattaatagagtaaatcttatgtgtgtgtatatatatattatatatatatatatatatatccacctaaccgggcaaaaacgacgtggtatcaatggaggttgtcagtctttataagggtgagattgtcagtcatacatgaatgcaacaaggccagaagacaaagattttaactaagaaaaagagagaaaaagagtgaaaataattaataatggactcttccataattcgacttattcttgtgtttctggcttgcctttcttcagctttggttgaatgtagagtccgaaactacaaattcgatgtaagttctaacatatatataaattagttttttttaaaaaagaaaaataatttattattagctattttatgacttgttataatttgattaatcaatcacaactctatgtttttggttatttcctcgaaaataaaaggattaatgaaagtagtgcttttaaataatattcatgttataaagttgaacttttactcttttttttttttaatttctttttgttaattaatttattcaaattacaaatacttcaacatcgattgtagccaataatgagtggtatttgatcagcttaaagaatttttagtagagttgaaatgattttttgaacgttgtagtacgtactatattataattatccaataactttttgcattgaaaaatcaataattgaatgattttttttccactacccaatatatatatatatatattatatacactaatgtgatttacaatcacacacaaatatataaatacaagaaaatattgtataataaaaagctatacatatattaaaaccaataagtaacaatataccatcttatatagaaaacttcaaaagattccaagacatcatataagagtttcctttttttttttttttttgaggaaataaatttgagcgttttttcttgttgagatatgagtatgattacagatatcatgattattgttaaaatttgaaactaggtatagtaacaggcaggtacaccatatataaaaaccaaaaaagcacgtctcaacgtgtattcgtaatgatatatatgcaatgaaattttatgccaatcaccaacttttcttttcttttgtcaaacttcatattattattattattattattattattaagtatatttatgttatgtgatcatgatatatttcaggtggtaatgaggaacaccagtagactatgttcatcaaaacaaatcgtgaccgttaatgggaaattccctggccccacactgtacgctagagaagatgacaatgttcttgtcagggtcgttaatcacgtcaaatataacgttagcatccactggtacgtacgtaacacctaacacatatacatacacgcatatatattgtagtcatagttaactctgttgcactattttgagaaatttatacacttgtattcgaaacagtttttcaatttattttttgccgtgtacagtaagatattttcagaatttttatttaaactctagttttcaggattttttaacccaaaaacttaccaaaacaaaaatggttgtaacatcataattataacacttgtatgaattaatataacataaactagtagaatagaaaagactaccttacatataatccgaatatttagttactatagatcaattattagttcaccatgcatctatcttattacattatttatttaatttaatttaatttaattttgatatgtataatgtgtaaaggcatggagttagacaactccg

SEQ ID NO: 42814 - DNA, 831 bp, Cannabis sativa
aaaaaaaacaaaaataaatatttaaattcattgcttaatggaatgatttcttctaaaaactgtgcacgagtacacgagtaaaataagatgtttgaacgtgtacacacgcgcctaaatagaacgccaggtataaaattaagaacatgcccagaatcgccccaattagtggcctcgcaatttacttataaaaaacttaaattaaattagtggaaatactgtttcaaaaaaaaaatagtgaaaatgttcgattaattaaaaatttaaaaggaaagagaaaagggtttatattgtaaaatatgccatatcatatggcctcattcccaaggggatcgtcattcgccagtgccacgctcaaatctttaatattatttatgaagagaaaaaaaaataaaaaaaatagagaaagtggtatgccgacgtcgaaagcagcttagtctactagcaatttggctttagaacacaccacccacttccacttctttttttcagcacaaaatatctttttcttttctcttctcttctctgtttcacgatgtgagaaatattttctttcttcggagtaacactttctagaggttataatatttctctttatccctttacaattttaattgaatcggcacttgtaagttggaattggactctgttggaatttcttcgtcctcacctctattctaaaaaaattctctttgtttttctgttttttgtttctcatctctatttcagtggacatataatattaacatatgtatatattattgttttctgtacataactgaagtagaggtttgttatggataattattatttctggttaaaactttggcaggt

SEQ ID NO: 42815 - DNA, 4175 bp, Cannabis sativa
ttttgtacataattctcaataaaatatcatatgactatcaatataattaagatatttttttattttcatatttcaaagcatttttactgaaatacatgaagcaacttattaaatcataacccaaatttacaaagtaacccacgaaataaccataagagcaacctaaagcgtaaaaataaaattatttaaattatttattatttttgtattaaatttaacataatttttttgaggtaagttgaaaaataccacttatattaattaattaatcaaatttacctctaattttatattttaattgaaacatacattttttttatatatattgtacctaaaataccctaacataagagacagatggagagtatcttgaagtgacatgacagagataatggtacaatataatattaaaaaaaaaaaaaagtaaagtaaaaatgatagattttaaaaaagaatgtgaaaataaaagatgacaatataaaaagtgtatagaatagaatgtaatgtaatttttttttttttttgatataataaccaatttattgctgagaaatttaacataaactttaaattataaaatttaatttttagaaaatggatataattttctttgaaagggaaaatcatatcaatatagtttggaaaagaaaaggataaaatataaatttaattatcttttatttttatgatataaccgactttatcgactttatttatttatttatttacttatttatttttattttaatataaatttcatagccattaacactaaaaacctcatcagagttcgtaaaacaatacttttcgattcaagctcaaaaattttctccgaagagaagagaagccatggcgactgcatcaggttcgtttcaaatctctttcttctattctagtcttcttttcattcctctattttgtttaaattttcgatttggatatcgatgtttagggtttccattaggccttagatttgtgcaatttgattgaattaaattttagggttagggttagaaatctcgaatctgaatttaactaaatggagctgctttcgagtatgtttacataattagagactataacagctttaggtttatttatcaattgggattgttggggttgcagtggcattcaaatctagagaagatcatagaaagcaaattgaattggaagaagctcgtaaagcggggcttgctcctgctgaagttgatgaagatggaaaagagattaatcctcatattcctcagtatatgtcctctgcaccttggtatctcaactcagagagacctgtaagttatctctttttagttcgatttttgaaccaaatattatgtgatatgatttctcaatgcttaaagtttgtttttttgttttgtttttaatcagagtttaaaacatcaaaggaagtggaaatctgatccaaattatactaaatcttggtatgatagaggtgccaagattttccaagctgataaataccgaaaaggagcatgtcaaaagtaggtggaatgtgtaatgtgtttgattcaaagtttgaggctagtttgtgtttatttattctcatggttttgacttcgaacaaattgattgatttctttgtttgatgcagttgtggtgctatgacacacgatgcaaaagcttgtatggacagaccccgcaaagtaggagcgaagtggacgaacaagcatattgcacctgatgaaaaagtagagacctttgagcttgattatgatggaaaacgtgatcgttggaatggatatgatgcgtcgacctattctcttgtcattgagagatatgaagcgagggatgaagctcgaaggaagtttctgaaagagcagcaatttaaaaaattggagaagaataataatgcagatggtgatggtgagggaggtgacggtgagggaggggatagtgatgaagatgttgatgaagatagggttgatgaagccaaagttgatgagtccaaacagatggactttgcgaaagttgaaaagcgtgtgcggactactggtggtggaagcacaggaactgtcaggtatggtttaatttaaagcaccatcattttaattgacttgcacaatgttggagtttttgttgcgtgtaatgtcatatattaatgttgctatctgttttgtttctgcaaggaatttgcgtattcgcgaggacacagcaaagtatcttcttaatcttgatgttaactctgcacattacgatcccaagacccgttctatgcgtgaggatcctcttccagatgcagacccgaacgaaaagttctacttagtatgtgccttgcatttaaaatttagttttgtttgtggaactattgtgtgttttgttttgttttgtttcttatcaattacttgtaaatttgtagggtgataaccaatatagaaatagtggccaagcattggagttcaaggaaatgaacattcattcttgggaagcatttgacaagggacaggatattcatatgcaagcggctccctcccaagccgagctgctttacaagaactaccaggtcataaaagagaaactgaagtcccaaacaaaggacaccatcttggaaaaatatggcaatgcagctaccgaggaagaaattcctagggaacttttactggggcaaagcgagaaggaagtggagtatgatcgtgctggtaggatcatcaagggacaggtaagagttgctcaacaattcactttctccgatttctgttttcaacatcatctcaatagcttccaactgttatgttcttttctgtttttataggagatggcccttccgaaaagcaagtatgaagaagatgtttacattaacaaccacacaactgtttggggttcatggtggaaggatcatcagtggggttacaagtgctgcaagcaggtgattcgaaacagctattgtactggtgctgctggtatcgaagctgccgaggctgcttcagatctcatgaaggctaacattgcccgaaaagaagccaatgaaggtaagaagcccgctgctatatagtttgacaattatcttatgttagttctttattgttatactctgtaactgtattattatttacatgtaaacagagccacctgcgccagttgaggataaaaaggttgctacttggggaaccgatatcccagatgatttagtcttggacgagaaattactcgccaaatctcttaagaaggttagttgaacttgttgttttgatcccaaagttggatttttcttgtattcaattcaaatcaaattctgaattcaaattttcggttttggaatctttccaggaggatgaaaggaggaaagaagagagagacgaaagaaagcgcaagtacaatgtcaaatggaatgatgaggtaattttcttttcttttaggaatacatacaaatgcaaatcgagtttagttagtttacacgactctgacgattcgtttttcggttttgatgaaatttcaggtgactcaggaagacatggaggcatacagaatgaagagagtacaccatgatgatccaatgaaggatttcctgtgatgtgttagaataactatatgatataatagcatttggcaattggcaaatggcaccccaactcggatttctttcttctttttttttctttgtatttttaaaattaattttactatattgtatgtacatattcctctgttgctcttatagaatttgcaacttggttgttagttaaatctgacaatatcaaaaacaaattatatatctatattttcatttgaaagaacagttaagagtacaatcataataatcatcatagaatagtagtgatatatgtataagatatcaagattttggttcgttttaatctatttttgatcgtattataatcttgtaattttattacatgtatatgagcactctcatcaaacaaaactctgcaaagacaaaaaagagtaatgaaagaataaaaaaaataatgagaaaaaaagaagctattttaccttctattgagaatgctagacttatcttacatataacatttgcataatataaactatagaacatggttgttaagaattcaatgaaatttcaagtagcctaattgtgatagctgtccattaagataaagagaatacattacatttatatatttattttttgaaatgtagatacactagacaattaattatactagtttgaagaaattttt

SEQ ID NO: 42816 - DNA, 5535 bp, Cannabis sativa
  modified_base (444)..(447): a, c, t, g, unknown or other
tagcatatacaatggtaggctatacgaaaaaagtaaactaataatgaaaatttatttcaatatgccaaaataaactaataagtttatttgacatatatcagtatagacatatctgattatatgatttttggtctgatcattacctatttatttaaaattgataattttatcaaaagtagccaattggtattttattgaaatcataactaattggtcccaaaaaaaatatcttatttgtaatgatttaaaagttatttgtaactttatactttatttagctaatcaaaatgcatatattaatttacatttaaaaaatatgagtgacttaaacatttatgatatatatttttttaaaatatcgtttactaaaatggtagcttactagatgacagttcattattttcaaaaataaatttgaaagttactcaaatgtattaatataannnnaataattaattgattattaaagtgcatatatgtaagttttagaggtaaccaaaatgtatctcaaattataaaatataatagtaatatttttttacgaaaaagttacttattagtttattatgaacatcataagtagctaatatattacttttaaaatgcaggaaaattaaaaaaagaatatttgagattagttttattcatgcatattatttcgaaattaaagtattttataatgacgtgatgagatattattgtaattgagatttatttaaattattttatattttacgtgtatttttaaaaaaatccctattattattattatatataaaaaaatgacaatatttattgtcacgtgcgtaaatatggcgggaaaggtgatcgcgtgtaaccaataatttattatcactttaaattttcttcatcgtccccgccctttttagggtttcagattctcagttccatttccattttttttcttattttggaagagaaaactaatcttaatgggcaataaagttacagatgaactcgtatccaccgtccgatcaatcgtgggctccgattactccgacatggacgtaatcagagccctccacatggccaacaacgacctcacggcggccatcaacataatcttcgacaccccaaattttaaatccaaaggaattttaggggttcagaggaatcctcaaattcccaatcaaaattcgagatcagaaactcgacccgttagtgttagcagtgtgaattcgaaggaaaatggtggtggcgggaacaagaatttttctttgagaggaaatttggggattcagaggaatcctcaagtttccattcaatattcgagatcagtaactcgacctgttactgctagttgtgtgaaatcgaaggaaaatggtggtggcggggaaaagaatttttctttgaggactgacggcaatggtgccaactttcccactaagttcgacggtgaggaaccggaagcccaatatgaatgctctcctgagagttctcttgaggaaaaatggtggcttgtgggttgtggcgaagtggcagggttgtctacatgcaaaggaagtagaatcaagcctggtgatgaagtggatttcacatttccattgaagggttttgctagttcgccttcgccgggcaaggctttaggtaggggtcggaatgcagcagccgcttgttcagagattgtgaggttttcaaccaaaaattcaggagaggtaatggggaaataaaaagatggttttcttaatgttttggctttattatatgaatttgggttgatttagtttcttatctattattgtagattggtagaatacctaatgaatgggctcggtgtctctttccacttgtgagggataagaaggttagagttctgggtttttgtaaacacacacctgaagtgttatgtattatggacaccattcatttgtcaataaggtattctctttaatccaaagtttacttagttaaatgggcttgatatggtgtgttttatataaatgttgttgaccagttgacttatctatgttttgtgttcgattagtgtctacatcgatagttccatgttccataagcaacatgatacttcacttaaggcagctagcagttctgccgacgaatcagtggttcatcctctcccgacattatttcatttgctgggtctagctccatttaagaaggtgatggttctttgacatgtttgtcattattaaaaatcggcttgctttttatatgagaattagttatattacaatgcattagcattgtttctttatgaggtgctaaggatagtttcaacttttttacgactcttaaataggcagaatttacccctgatgacttatactcaaggaagcgaccattagacttgaaggtacaaacataatcatttgaatttctctaataatattaaagtggaagatgagtagtagtattacctaaacagggatgttctggatttcaggcctcaactttacttacgcggaagcttaagaatccttctgcaaatgaaaatgaaggagaagatgaggaacctatttcagatgctgatttggagaatattgttggtgttggaaacagttcggagttagaggtattggcattttgcaagaatattttacattagtggaattttctccatccacggcttctaaatttccaaatggattgctggtttgtaggaaatggaacccgctgatacacttcagtgtgaacttcggccttaccaaaaacaggctctttattggatgacccagttagaaaggctagaaaagggacgatgtacggatggagaaggaacaactcttcatccttgttgggaagcatatcatcttgcagacaagtgagttagttttcttatatattatatgtttatatgcatatataagtatatttaaatccttacaaatttgatatatagcatggtgtttatgaatacaggagaggacaagttgtttatttgaatgcattttcgggtgatgctactacacaatttccaagcactctacaaatggctagaggaggagtatgttttgaaagaaaactcagaaataaagtctaattgcatttacttttatcactttcgtatgtactgatttaaaatgcattttgaagattctggcagatgctatgggattgggaaagaccattatgaccataagtctcctccttgctcattcagaaagatcatttgttagccaaccttctggtgaaggtagtgaagttgggaatagttcaagctcgccaaacctcccaaagagaacagcaaaacttcccggggttgataagctgacaacgcaaaagaccacacttatgaatggtgggagtttgattatatgtcctatgactctgttagggcagtggaaggtacttttttcattctggtgccattttttcaatatcagttatctattttctatatcctaacatatacgtttttacaggcagagatagaaactcatgtaaaacccggatctttatctgtttatgttcattatggacaaagtagaccaaaggatgcgacattcttaactcaaagtgatgtagtgatcacaacatatggagtattagcttcagaattttccgcagaggtaattctgttatttagatgtttttcttgtcacattatatgatacctttcttaaacagaaggtgaatgactgcaattttttttttggtagaatactgaggaaagtgggggcctttactcagttcggtggtttagagtggttcttgatgaggcacatacaataaaatcttccaagagccagatttctatggctactgctgctttagttgcagattgtcggtggtgtcttactggcacccctattcaggtgagttgtgggaaatgatgaacatagtttttttcttttaaatttggaaaactgttttattagcttatagtaaagtctgggtttggttaaatatgaattggtgtagatacagttttctttttaacattttttgcatccactgcgttggtctagctattatttagtatactcgtgccatcttttgccctgtacttgaagtttgtgtttctgtacataacaaagaagttttaatattgacataaatgcgggtgttatgcattatttatcagaaaccaaattgtgatcaatctggtgcttctttgttttccattttgattattattgtcacagaacaaactagaggatctttacagtcttcttcggtttttgagggtggaaccatggggtaactgggcatggtaagttatgtgttcttaagatcttggtaatcaagcccaattactagacataacaattttttttttgacacgttcttatataatataggtggaataaactcattcagaaacctttcgaagagggagatgaaagggggttgaaattggttcaatctatcctaaagagaatcatgctacggagaacaaagtttagcacagatcgcaatggcaagtaagttgatgaagatcatggtatgcaaatttattattctattgtagcccatgttactaaggactttttgcttgttgcagactgattttagtcctaccaccagctgatattcaggtgatttactgtgaactcacagaagctgaaaaagatttctatgaggccctttttaaaagatccaaggtatatctctctataagaatgcaattatcaaaatatgatgtgcccttggatttattatcatttttggatattaggcatattgtccaatgcttgacaacttaagttttttgatgtaataggtgaagtttgatcagtttgttgagcaaggacgggtacttcataattacgcttccatattggagttacttttacgtcttcgtcaatgttgtgatcatccctttcttgtgatgaggttctattcttttctctcttttatactggtttcagattttgtagttatgatgtaattggtttgatatcttgcttttatcttttatctatttatccagtcgaggtgatacacaagaattttctgatttgcgtaaactggctaaacggtttcttaaaggaagtaataagaattctgaagaaggagaagacaaagatctgccttccaaggcttttgtacaagaggttttagaagagttgcgtaagggggaagagggagagtgcccaatttgtctcgaagcatttgaagatgcagttttgacaccttgtgctcatcgcctatgtcgtgaatgtttgttggcaagttggcgaaatgctacttctgggctatgtcctgtttgtaggtatcttcaagagatgttcttctttcaaatatggattttgatgtcaaattacccaaatttatttatgtaattattatactgtccttatattggaaaatgtaatattttacaagttccacgatttaacctattgctcctttcataggaagattgttagcaaacaagatcttataaccgccccaactgaaaatcgattcaaggttgatattgataaaaactgggtggaatcaacaaaagttgctgttctgttacgtgagcttgaggctcttcgcttgtcaggctctaagagcattgtgtttagccaatggactgctttcctggatttgttacagattcct

SEQ ID NO: 42817 - DNA, 2052 bp, Cannabis sativa
tccattgtacacataacccgaaatcatagaattccatgaaagtctagttctggttagcatcttatgaaatatataactagctgaattgatatcaccaagcttggaatacattgaaagaagagctgtcatcacagaaacttgattgcttaacccttgtttaatagctaaagcatgaatagattcaccaaacaacaagctactcagatttgcacatgaaggaataacagatacaaaagtgattagattaggttgtttttcgtcgcgaagtgctgaccgaaacataacaaaggcttccattggtgattccatctgtgtgtaagcagagatcatagcattccaaacagtaatattcttctgtagaacaacagaatcaaacaagtttctagcattacataaatcattgttaccaacatacattgaaataaaagcagcaactaaaaaatcattgctgaaatatccaaatttcacagcaaaacaatgcaaagatttaccaatttcggtccaaccgaggcgagtacaaacaggaaccatacaagccaaagtactcaaattcggcttcaaacccgccacgaaaacccccctgaaaacctcaacagcttcactatcaaaaccgtttaacgaataacccgaaatcaacgcattcgaacacaccaaatctggttcagacattttatcaaatacatcacgagcactcttcacaaaccctacttttgcataaaaatcaaccaaacaagtctgaataacactattctccacaaacccatttctcaaaacaacacaatgaagttcttttccaaccctaatttcattcatagccgtacaagctttaatcacagatggaaaagtgaaatcatcaaaagaacaattcaacaaacgacaatggtgaaacacacccaatacgtcgtcgtataaaccgtaatggcttaaacttctaatcatcaagttctggaaactgagtctagggttttcgattcttctaaacacagataaagctaaatcagatgaacccaaatgaaaacaagaccttaaaaactcacccggaaaatggttgtgagtcttattaagaccatgaacgttgagaagagaataaagagatttcaaatgatgggtattgttgcagagcttaaggagaccatgaaagtcaaagacttgacgaggaattgccattttcttctcatacattcgttcatggctattcgaagaagaacgttaatggtagttatttcagttagtaaaggttagttattacttttatattataagaaaaataatattacaaattaaatttttgcataaaaaaagataatttttaaagttaaaaataacgggcgtttaaaaaataaaaagaaagtttttaaaaataataatttaaaattttaaagcattaggattagaattttttttttttgacaaagtagttagaatcactcatgaatttacgatgtatatgtctgtcacgagcgctggaatctcctcgaaccaagatagctcatcgtctaactgtagagcatgctttgccaaaccatgggccgctaaattctcagagcgagtcatataggacaaaactgtccctgaaaatttagacaataaaactataacatcttcaaacaacgctcatagctcgttgaaatacatcttcccgttgctgatagccgtcatcaaagctaacgaatctgaataaactgcatgaattggaagaccacacatatgagtccaattaagaccaaccaatagggcaaaagtttcagccggtaacactaaaattccacctgaaaaaacattagaaaatcagaaaaattttaattagaaaattattttaatccgatcaaaatcaatcaaaacccaaaaattaaacaactagaccccctataaaatactaaaactagccaaagggaataccctttggctagtagcaacttaactcttttatttcactttataatcatcttagaattactatcccttgattattaagcattaatggcccatttatttcagaatgcttcccaaaatagaaaaaatcaaatattccaattcattattaatgtcccc

SEQ ID NO: 42818 - DNA, 3800 bp, Cannabis sativa
gttatgatattgggctttattccacccaattccagtagaagtagtcttgtagtactaaagaatattttattattaaactcaagacatatcaatatcaaatagctatgcagatacactcttaaatacatcaagactggaatcatacatcatcacaaaaggagtcccacttgatagttggtactgtaaactgattgatatggtagcagaggttttgttctgttatagcaggctttcatatatggaaatctatccagtccttgcacagattcaccataatatctcacaaattgtatctttacttgtgacaatatcaccaacgatctcaaaaattagaaaatatatatggacaatatcccatatcattctcttaagccagatatattgaaaacacaggggcctccctcatacaactgaaattcttcgaattcgaaactagtcattgtttctgaacaagatgctcaacatctcctaattccacttcacttccttgaaactcgtacttttcctgaaaaagcagctcaatctgctctaatgatttccctttggtttctgggacaagggtgtggacaaacacaacagaaagagcggaaatagcagagaagataaagaatgtccctccaattgaaatggccctggaaacagaaaggaaggacatggcaacaatcccactgctcactctatttccaactgctccaagggcggaggcttgagctcgtagctttagaggaaagatttcggatgttaaaacccagcagacaggaccaattcccacagaaaagaaagctacatttccacaaactgataagatagccaatgcaataccaatctctcctttcccaagaaaagtaagtgagaagcctaaactgaataaacaagtggtcattcctatagtgctaatatagagtaatggttttctacctactttgtcaatgaaaatgatagcaaacaatatgaagatagtctttgtcactcccacagcaacagttgcagccagtagctttgagttaccctcaattccagctcctttgaaaatttcagggctataatacacagtggcatctattcctgttatctgttggaaacattgaattccaaaaccagtgaccagcattcggcgaactgcaggagaaggccttaaaagttcgcaccagactgctttctcttgcgacttgtcagcattgccacttccagctgctaatagaatttcagcaagtttttcctccacctcactttcaatctcattagttttcaacagcacggatcttgcttcgtcaactcggttcttcatgactaaccaccttggagactcagggattacaaaaagagcgaaaccgataaagacagaaggcagaattcccacagcaagcattatcctccagtttatatgtgctgggagtcctgaaaatgcataatttgagacatagccaagtaaaattcctagatttataaaaatctctgggaatgaggtgagtgagcctctggagacagttggtgatatctcagcaatgtagacaggagaaatcatgactcccaaaccaattccaaccccagccatgagtctacctatcatcagtatttggaatgaaggagcaaatgtcatcactgctgcacctaattgaaagataacagcagctaatcccattgtccactttcttccaataacatcagatgttttacctccagctaaactaccaaaaagtgatataatgcttaaaattccaacaagtacttcttgttgtacttctgtaatttttaaatcttcctgtatgaataagattgctccactcatcacacctacatctgtaattttttggaaaatgaaaactttagtgttaattgatggcaaaactttaatacaatgttcctataataacagaatgatataattatgaccaaactagtgaacatgattacatgagctaaaacttctttcaaatatcccagatctcttactattactaatgcatattcacatacctcttacctctcatgccttgtcccaaagtaaaacaatggtcaagtgctttcaaaatgtgattaactcaattagtatttttgtagatttttattaaaaagggctaaagttagtagactgagctccaaaatccaatcatattggttggtatcaattaatgatattttcaaaagcacggaataaggatattagtttatctttctccaccaacactcaaccaaaaaacaaaggggaagataaaaataaaaataaaattgagaatacaatatacacatatctcacggaatgaaacgtaatcaagcttaattacatagaaaaacagaaacagaaacaaatgaacaaaataaaatcataccataaccaaggagaacattgttaagagaagcaaaaacagcacaggcaaagacatatttcctgatgttacgtcctctttcttcttgataatgattatgagaagggtcatcatcatgatcatctgagagctcagaatccattctcttgtatttgttctttgtccccagcgaaatactagacaaccccatctctccatgcccattttcttggacaccaaccatccccatctttcttttccctctcacaaactcttcttgttcctaaaaaacaacaaactaagcagacccagaagcctgtttgactatttagagcctgagattgaattcatagtttgaggtttttagatctaaattagagcagagaagaaggagactcagcaagtggggtattttattttaatctaatttttatcaagcaagggagaactacttgacataatttacatgtgttaaagactaacaatactgtggacccccatggccttgaccttttactttattaagctaaaatggagctttcgaggttacagctgtgaaggtctctgtgaaagaaaaaaatatataggatttttagcagttttcaaatagccaattggcttttacaaatttgttcttccttcaatcttccatatttgtggctatttcttaccatttgtttgtgttagtaaatacaataatattgtccaataaaaaaggagtttgtctcgaagtacgtagcactgtacatgtggttatttgcttgtgtctcacgtgggtgtgagttcatttttgctttaattttaacttcttaactatttataaagtgttgttatggatattttaagataagcaatgtatgtatcttgaagaaatacacaaatgatattgataataaaaacaaaacattttgatagaaacaagataaatggattgtgaagtgctttaggaagtaaaataaagttgagaaatggtaaaggaaattcacaatacctattatttgatgtgtaaataatgatgtaatttaatattaagttttcaatattttattttaataaaaattataaaaaatcgctaactgtaactttttgtccgtagtagaaactacaaacttaattttcaaactaagaaaagaaaaagagagagaaaaaaaaaagatacacattcatgatagataaaatggaaacttaaaattgataaaattttaaatgcatgatgtgttttctttgtgttgattattctacatgtaaatgaaatgaccccaaactcattcaaaattattaagcaaatattaaaggtgaaagtttacgtgactcacactcactttgaatagattcaaaatgttaattacatataacatgactttgactttgaccttttgaagagatatgtaacaacaaccacaaccaacatttttcttattatttatttagggtaatttaattaaaatgcatttattaaaaagttttttttttttttttaattttaaccaaaaa

SEQ ID NO: 42819 - DNA, 15584 bp, Cannabis sativa
  modified_base (51)..(54): a, c, t, g, unknown or other
caaggctaaggttgagcaaccgtgagagcgagcagatggagattgtacatnnnngggcggttaggcctggagcgtacagtctttggggcagtagggcttattttgtgtagtcactaggcgataaacttttgtaactcgcactttgaaatggttgtaaatattttgtaaaacgagatcccggtttaatataagtatattattttagggtttataattaattaaataaagttttaattaatcacgattttcaataaactcgttgattagcaacgagctgcacagataagttaaaaatcacgttaacacgcctaaactagtagggttttacaacaaaaagataaatcaagttgtcaaaactaaataaaaaatattgtaatacaaaaacatattgagaagttaattttattttacttattgtaattaggtcaatgtttggttatttttctatggctttgtaattatctttttattgttttatagttattttcatgttgtttgttaagttgttatacaattattttttagttgtcttagttgtttttgagttatttttctattttattgaaatacggtatttttataattttaaaactttaacacagtattttataaacttggtacagtaaaagttaaaaatctctgggtcccaatatttttgtaaactttctcaaattttacaatatttttgtaagttcttttttatctatctcggccagatggaacaaccgaccctcataatataaaaacgaaagatttattttagttagatggcaaaattaagaatcaaaactcaaattttcctaatacctatatatacataactgcaaactcatgcacacggagttggcttatataaggcaaaaacaagctgaaaaattatttgaaatgaatgtagtgatggcttaggtttctacacaaacaaaaaaataaaagttaaaatctattatgtcacaacatgccgtaattaagcaaaaagactaatggagctaagtatatcagctgtacagagatgttcaagccgagccccagatgtttttacttctattttcaagactaaatacacacaaaagagcacaaaaacgtacccttttcctattgggtggctaatcaaacacttacatgctgcaccatctacaattacacaacagagagaggccaacatgtatacatggagagaggttgttgtaaacttcaaaccagctttctcgaataaatggactcagtaattagaaaatataatccaatcaaatatccatccaactcttttgcctgactcaggcttcagcttgtttcgagtcattttcagccactttagatgatgaacattgctgctcgttggcagatgaaccgggctgtgtcggtttcttgaattgcaccaagatcatggtcatgttatcacacccctcaccattgactgttgacggtgccaagcatctgtcaagcactttctcacatactgcagagagcttgctttcctgcattcatttaatgataattcggaaatattcacataaatattaaaagaacgaacttattcacatttgaaatattaagagtcttaaattgctttaataaaaagtagcttgtcaggattctgagattgaagtctggtttattcactgacgttagattaagagagggagtgaaatcagctgcatttttgtaatgcatagggaaaaatattataattaaaagtttttttgctagtgcaggtacaccactcatttcttctatatgttgcctccaaataacagaaagaagagttgagtatagactaacttgatttctatgttgagcactggattctagaataacttaccaactgaagctgttcatgaataagatctacaagttgttggcttgtcaagcaatccctggaagcaattaacaaacgcactagtcattaattgtattattttcttgaaacttaacttccggtcgggatcatcttttatctttcatattgttgtgagcatcaattgtattttaaatgatttcagaactttcaagttccaacatagccatagccaacaaagggacaccatcaaacttaaacttcacaatcagcgccaaagttctagtagagtgtgagactaaagctaaatttaaagaaagagagaacagcacacaccagataccatcacaggcaagcaccaggaattcatcatcatcacatagctcgacctaactcaacatcaagaattaaaatattaaaaccagaggaaagatttcataaacagcatatttgattaaaatgtgtacatgtatacatactgtgtttatatctgggctggcagttacaatttgcttttcagcaggcaaaaatttgttctgcttgaattccatatcccctgaagtttatagagaaaataatcagagcatgaagacaaaggaagaatatgcttccactgcagatatatatctactaaagggtgtgtacttgcggtcacttaaatttgctagcacgcatgtatatgccttaagtggcatggtgatgcatacctatagctcttgcaagatttaaagagccattaacccgaccagcatggatgaaaccaccagctttcaaaattctttccttctcaacctctagatctggtttgtgatctctagataaattgtaagcctgaaattaagaagcggaattcaaggaacaaagaatcatatcaaactaaatgtctacacgatgaacattaatttaatagacacctatagagtggtaaagtgggaaactgagagaataaatgtagtagagggtacacggttaattgtggataattgtagtaacacggtagtatacatgtatatatatatataaagaaagctaagcacatgttgatgttgattttgtatagatttgctctagggagatttagtctctctaatacttcattattctagtgtgttcttatcgttttgtatattctatgacattccagatctgcctggttcttctcattgtcgtgtactttcatacgctcattagcttagctttgggtatatcaagtgggaatggagccaacgatctttggtgctgatagcaacttccaatgtactcttaacacgacaaacgtcaagatttgacagaggggaagctgccaattggattgttcgggccaagcaatatttttccacacagaaaatgactgataacgacagttgcattagaaacacattcgctaattggaaaatcactatggacagataatttgggcggaactgactagtttggtgcatgataccgtatgttaacactatcaagtactttagaatttattctttgttaatgttttgtagtttgttttacttaaatttaattgtgttttgttgtttggagtcattggagcaagcaaatgaaatgcaagaaaaattgaggaacaaagaaaaaaacgattgcaaaatcagcgttcagcaacgcaaaggctgtcttttgtcgtgacgccaatagagtttgtgaaattagcagctaagcttcgcaacgagcagtgttgatttaagcttgaaataatgtttcactcattttgctttgattacttggaaaagagcgagaagaaacaattttagtacttaacaacttttggtgatgagagagtggtactcaacactttattacttattgtgataacgtgcacttgcgctgtttaaaacatgcataagtttttagcattgttgccaagaatcagacccgggtcattggtgcattgggctggttcattgatggtattaaggaatagcttaagaattctgaagaaaacgtcaggtcaaggattaaattaagccgccaatctaaggttttgttctataatttccttgtttaattttttgctttgttaaaaaaatggaaacaaaagtaccaaaaaaaaccatttcaagcttaggcgtcatgacaagttcacctaaaggcgccgtgacatcaaaatacgaaccagcattatagtgtttgatgccacgaagacctggcaaaaattgctaagctttccaagttaatggctaagcgttgtgacactaaccttgcaggtcacaatatcatcatgctttctaaaagaaaacagggcttcatttcccaaccaaaccaccacaagcacctttgtgcgcacatcttcagtttgggtacacaatgccgccaactgtcccaccatctcatgcgcatcaaagcaagcaggaaactagcgatggtcgtatcctcgttcaggtcaatcattctcctctcttgttacctttaattctcttttctacttctgtacattgagggaaatgcacctttatatatcatgtcgtttcctaaaatttattacacatacacatttaaggaatttagcaggattgttgaggaaagtttatgaagcaatattctcgctattgtagcatttgcttgatctttcactatatacattatggaatctttaaggcatgtttgttgaacgagttaattgtttgtttttagttttgtttgcttgagaccagcaaaccgctaagcttggggaattcgatgctgtgtattaacactataatacctaagaaattattgattgttaataattttgtagtgttaatacaatcaataattttagaacaagaaaaagtcatatgcaagaaacattgaggacaaaagaagaaatctagtgcaaaatcaatattttgcgtcgcgaccactgtcttatgtgtcgcagcaacaacagagtttgtgaagtcagcagctacgcgtagcgacagttggtgtcagcattgcaactcagagagaaaaaaaaacataaaaattaacttgccttatttgcttacttttctgtggaggtttacggagaggggaaaaggtcctaacactggagaaagaataggaatttagaatgtctccagttgaaggtttatcatacctatctgggtagttcttattacattgtgattcttcttgggtttatgttaatttgatcatacatggatagtgtggctgtaatcagtctattgcaacagctacgattatactagattcacacatacttcatgacacaatggaacttcttgagttagctgaaaatgaattttcacttcacaactccaaaactatactataggtcaacaaggtggttaaacagacatcaatattggattggtctttcgacaaaaagttgactcgctgtttacatcacaaagagaagatactgtaatcttgacattatccagcagcccggataattcaatgtatttgatttgtgtgttctcatcactttgtttattcaatgacaaattcctgatcagcctagttatttctattgcctttctactttaattttttcttggtggattatagttgagagagattgagattaaggaaatttcaaactcaagtatttaaagaggttgagattaccctaaaaataatcttaaaagtaggacccacttaataataaacccttcactaaaattataccaaacagaaatttagttctacgttctcattcccaagaacccgaactcccataccaaacacctcaatatatttgcctattacctttgctattgttttgaggaccctagttgagtagttggtgtgtatcataatcagctaacgaccaccttactaatttggaatacaaagcttaaggtaactgaaaacatatgtcgagtcgaccaatcaaataaaataagatgtgcttaataaaataatagcaaagataacatgagaaaaagaaagaaaaaaagaaatactacctgccccttccttgatatgacgcaacgagaatcacccgcatttgcaacaacaagttggttgtttcgaataattgcaacacaggctgtgctcccagaagttggaccgctaaaatcagaatgaggcccctacaacggaattatgtataagataatgaacttcaaaagagaaaataaggttcaagaaaaagtgcttcagatgagacagttttcatattagataaactagcccaggatagggttgaaccccagacctctgattcacaatacacccagacaaccacttgagctataccaatgagatataaatcaaatgtgaccacatgtgttaaataagtaaataatttattatcatcttagctgtaggaatgaatcagtaaatgatcttatcacccaaagaaccgttaattccagcgagaaaaatgctttaacagaaagctaatagaaattgcaagtaaatatatttctcctctcaataaaccaagggaccaagttttttttttttttttttttttgaaaaagcgaccaagttgcaaaaaagaacatcctagtgtactaagtcatttatgacaaagctaataacaaagatgctcatttacaactgaaaatgagaagtccaaaagcataccagtactgatgactgatacgtctgttgtttttatctaatgtaaacaagaacaatctcaaagttttctaagaaaacagaaactactaaagaatgaaatccagaatatcaatctttacatatacaaaagatatgttaaaagaatgtaatctgtcagatcaaagttatgaactatacttttagaatggaggtgtgaggttgtgtgaatttgaagattatggattcctttttagatatatagtgtaaatgttaaagttacatagatgactgtatgaaaattggggattgtaacagcctattttaaagtactacaaagttgctaaaacatttttttccagtttcgtttaggaaggaaatcgaatttggaacaaagaggtgtgaaactgaaatgttaaaaaaaaaatcaaaattgctataacatataacattcataactttgaaacctacctcctcaaaggcccaatcatcaacttgatcatttgtatcactgctactgctccttggagaccaaataagcccttctatcatgccagtaaatctgtttatcttatctcccaaaatagctaactctctccatcccctttgtccacgcatcatttcatccattctgcacatttattacacaaatttaacaaaccggaagaaatgtaaaactaattctgaaataaaaattatcaatcactgaagaggtcctttattgttgattttttttccaatagataacaatggaagggaaaaatgtataaaacaatgcatttgacaccttggttgacagaaatccagtaatcccactttagaaaggtacaaaatttcaaaagcataggaagtgaaacaaatttaacatactaaattttgaaatgacaatgtaaatgtagtacacaaggcttctaagagaacttctatcgactttggggcttgacctcaaccaatgataactgttactctacaagattgggaagcttttaacaaagtaaaaaagtttttcatcatagtcaatggtattctagtcagaaaataaaagatatataaagcagaacacaagaagaatacatttgttgattggagtttgattcacatagataattggtacgtaatcctaaacctataaagcattattttaatatctgcaacaatatcaactaattagaaatgctgatgataaaccaaaagaaaagaataagagacctgaaaaatgatttttgaacagaagttcctatatctccaccagtgtatgcgtcattcttcagaacctgccgatgaagaaacttcgcacagaacttagcaaccaccttacctgagatttcaatggactgaagtcaatgcatagtacaaattaaatagcggcaataggtaggtttcatcaatagaagactggagtcaatcttcaaaatactgtgaattgtggcctaagaggtttaaagttgataagcaagtcaagaattattttccaatgacaatgacattttgcaataccttgtgagtaccaagaattatttttcaactcctactgacaaaatttgaagaacggctattgggtttccagttcaagacatgttacgcctcaaatatacctaacatgcccaacacattcaagcacaagaatagaccacaagtaattaagaagctcttgctgagttgtatacatagttattttgttaattctagtaggagagagacctagtattttagtggtcaatctctctgagaatatgattgctgtattttaattggggaggagtaatattgtggagacatccaagtgtctcggagacttggactttgtaactctggcttttcttaaaaaatcaatgagaaccctaatagcagaaattatttaggattgatttttgataggcctcccctcacatacatgtatcctcgtaaatacccaggtgacaataaaaatgacatgtcagcagcagggaattaattagtcaagggaagaaaatcggtatatttgctgagtttgtccaccaccatgaagacagtatcccagcccccaaatcaaagtcatccctcaattaaattcatggaatgtcagaatcaaatcccataagcttcgtaatccacttttgatatactcatttcatactctattaatttgtacatagaagaatgcgtcaacccaagagataaggacgacatttagtgacagcaaagacaatagccatgtgttccatttcatagatgaattttaaacatgagttttttgacaagggaaaattgaggaaatctttgtatgatctcatgtaatctcctcgagctaggtatgatcactttactaatatttaaaaaggttttgttattctcaatgtcaaagtgatcacacattgtttgtaaaacaatctaaaaaggggaagcaggctattacaattgaataagttgataatataataatgacacgagatcatgaatagaaaataagtcaggttaaacaatttctttttaaagaatttaaagtcaaagacttaggaatctcaaatatttcctattgttaaagatgaaaagagaattctttctcattagttttattgaaaggagtggtaaatttatacacaaaactaagtatctaccttaggaaagtagaattaagccaattgacaactaatttcccaagtacaatcggtcgaaacaagtctgttgtattgggctttctgaaagaaaagatgaggaagcgtatacaaagttggaatggtaaactcttgtcacgtgctagtaaggacgtcctggttcgtaatgtagctcaaagtcttccaacttttgttatgagcgtttttcttttgcctacgggaacgtgtcataatttggaacaactaatggctaatttttggtggaagttatctaggaattcccgtcaaggaatttcgtggatgagttgggagaggatggcatgtagtaaggaggttgggttgggggattgggtttccgctctcttcatgatttcaatttggctatgttgggtaaacaagcttggaagttcctgaccaaccctgattcgttggtttctcgagtgtacaaagctcggtactttaaaaatgagaactttcttttggcagaactcggtaataatctaagttatatttggagaagtcttgttgcggtaaaagatttgattcgtaagggagcgcggaagggaattggtaagggagaggagacacttttatttgatgctccgtagcttccaaatgggtcaatcccgagtcaaagtagtttggatcctggtttgcctaatgaacaggttagtagtcgtttgtggtgggtgagaaaacttgggatgttgatgttgtcaaagatttgtttgatgaggaagtggcggtcaatatttttggtattcccctttctaattcggttactaaggattactggtattgggggtttgactcttctggcgagtatatagttaagagtgtgtttaaatcatcacagacaaattgtgagggtggtgtggacggggaggttgtggcattttggaataagttttggcaattaaaacttcctccaaaggcaaaaaattgtgtatggagggtggttagtgggtgtcttcctacgagagttcagttgaagactaaacatgtctctttgttgtgttctatttgtcatggggcaggtgaatcaattttgcactgtttagttgcctatgatttttcacagaattgttggcaggtagcgggtttggttatgattccagttgatgcagggtcgtttggagactggtttcttcatttgttctcacgactgggtgaggaacaaagtgttcaggcagtgatgttggtttgggcaatttggttcacacgaaatcaactcttgtggaagggtaagaaaagtcgggtgaagttcgtagtcaatttggctcgtatcactcttgatcagtggagaaaagcttacgaaagaagtttgtttcctgcgtttgacacttgatatcttccgggtgttagtattatcaaatttgattgtctggtattggtacaaactgttagaaatttgaatgttttgtcatccacttttggtggtgtcgttaatgattgtaaacaacttttatctttttttagtgatgtttctttacgttttgtcaaacagtcagctaatcgggctactcatcttacggttagaacagcttctttatatgctgatcgtattttttcagagtgtaatctcccttttaatgttgttgatattgttgaggccaagttggtgtagttgaatgaaatttgcagttcaaaaaaaaacacctaggaacgaaaattgctcaatccaagaaggcattagggtctctcaaagaacatactctcttgatcttctaaaagaaattggcatgttaggctgtaaaaccaactgatacttctacggtactaagtctaggtctaggttagacccaagagctgaaaaatgtacctttctaggctatcctccaaataaaaaagggtaataatcctattactaaacatcttaaccaaataatcttctcattaccctttggaaaggatttcgtgcctgaactaagaaccccaatgccaaatacatctcatacaatcaccatccgaaacctatagagaatttactacaaaaaatccagaatttggtgcacctagaaacattcacgaagcattaggtgaaccgagttggaaattggtagtgcttgaaaaaatgaatgttttgaaaagaatgggacttgtgagattgtagaattaccgagacaaaaaatataggatgtgcaaatgggtgtttacgataaaaagcaaagttgatggaagattgaaatgtatggctaagggatttacccaaatacatagaatatacaatcaagaaacatttgctcatgttgcaaaaattaactctattcgattgttgttgtcgctagcagtcgattctaattggcctttacaccaattagatgtaaaaacaaccttttaatggtgatctagaagaggaattgtacatgaatcctccaccaggcttcgaagaaaacttttttcttggagattttcgaatcaattgacaaatctttgagatttgatcaaatatcaagagtgcaaatctgtagagatttaaagatattttttggtataaatagacatttctggtgtaaatataagctgatttcctacattgaattagattattctttccttttttactttctttgtaaatgctataaagcctacattgtatcaatagttttaatatacataaaacagtcatacgacttttattcttactatttccagtggagttggaaaagtttgcaaaggaaatgtctttagatagacctaaacagtcccctagaacatggtttgagcactttggtaaaatgttaaagtgttatgggcacgctcaaagtcaagttgatcacactatattctaccaacactcaaagaaaggaatgatggtcattctaattgtgtacgtagatcatattgtgctaacttgggatgatcttcgtgaattagaaaggctggagggaaaacttggtcaagaatttgaaaccaaagacttggtgtactaaaatactttcttggaattgaatttgcaatatccaaagcagcatgcattttcgtaagtaagctaagcataagtacgtgcttgatttgcatagtgagacaattatgataggctgcaaatatgccgaaacgcctattgaacacaatgttaaatttcaactcatagaagtggaaaatgtgaaggatcaggagtgttatcaaagattagttgggagactgatttatctatcacatacacgatcagacatagcattctttgtgagcatggttactagttttagcattcactgagacttaaacattttgaagttgtctacaaattctaaaatatctaaagggaacacctaggaagcgtctcttgtttaagtcactagaacatctagaaattatatagatgttgattgggtaggaagcatggtagaccgaagatctaactcaaactattgctcatttgtttgtggtaatttagttacacggcaaatcaagaagcataatgtaatggctagaagcaacagtgctaaatctgagcttagggttgtggctcacgacatgtgagagattttatggataagaagattacttaaggatataaagttatcacaatcatctcctatgaaattgtactgcatgcaatcacaattgctcacattgcagtgcttcatgattgcacaaagcatgtcgaggtggataacattttattaaggagaagatagagaatggactagtgcgcatgtcttacatacctatgggagaacaagtagtcgatatcttcacaaaagaagtttacaaaaaaatgtttgattttctaaatagagagttggttatggagatttctttcagcaacttgagggagagtgtaggaatgatttttgtgaggttataacacaggtattatgtatattgtttcagtaattttaggaaagtagttaataggaattatctacagtctttattccacgatttatttccctatataaggaactccgtattagtttaaatatactattagtgtgaagaaataaaatatcaaaaagaaaacccaaggactacaggctacaacttgggaactcgtgaatcaataaggaagaacaacgacaaccagtgccactggaggatttatgggtccgttgagctttgacagtgactaaatgtttcgtttatgtcctaccttgagctggtcaaaggttatgagctggatggacaaggttcttggtttggttggtagattctggaatggagcttgactcacagtctgaatactactcagattaggattccttgcatagttgtgttgttagagaagagacggtcattttgtcagtaatcattgaatctacaacttaagctacttaggggaactaccaaatacaacagattttcctgaatttcaccttgaggaaaaggtgaatgtttgggctgagggtaatgttaggcctcaactatgcgtaacatgcctaacaaattcaagcacaagaatagaccacaagtaattagaagttgctgctgagttgcattttcctaattggttgattgcatttttaattagttgaggaagatactttgttaaatcctagtaggagagagacctagtatatataggttcatttctccgagtttgccatctgattattgtatttaaatttgggaagagtaataagtgtctttgaagacttggaacattgtaactatttatataaataaatatatatatatatatatttataagtcaatgagaaccctaatagcagaattgtttcaagggttgatttactgtatttgatatttagtgtgtgccacatgtctgcccatacagcacaactaaaaagacacccttactcagaaacatgtgacagactatcataatacattctatggagcaaactgccatcaagaatcactgagtcagaaaggccatccaacaatatgcataaacaaatactaataaaattggtaatccaacaaagatagtggcaacccatcctcccaattcttacctccatgaccatcataaaccccaaagaaggaagtggacgcatccagatcaggataagcggcatgctaaacaaaaaaaaaataaaatcacagtaacttaagaataatctttgacaagataaaagtcacagaatgagacttgccagtacacaaactgaaagcgggcttgtcaatagaagtgaagattatttaaaactttaaatatcagaaaatggatcaatttctgatcagttctaatttagaaagaaaagattttattaattactcacagcatcttccatggatgcgcgccacccttgcattgatgataacccgtatcttagccgatcattcccaccatcttcagagagcttatcagttttgggagtactgaggtaagtacccattttctattcaaaataaacaaggcatgaactatcagaaaggaagaaagaaagaaaaaatatgtatgtatgtatatatctagatttttcaataatcaaatctcaaacttcaaattaaagaaaaatgttgaatacatcggaatcggttagtatgaaaaatcatcaaacaaaataagcagaacagaaccttcaccaacaaagaaaaaacccataaaatatcaaacgggatcagctcaatcaaaggttaaaaaaaaaggttcacgagatttaagcggaaacctgagtcagattaagaaattttaattcatacatatacatcaatcaatatcaagttaaacacatacattgtagaagaatcgagctaccaatttccatttttgatgaagaaaataaatcgcatacttataagcaaacaaaaaagtgaagaaacgaaaattactaacaaagacccagaagctaactttacatttccatgaagaaattaaatttaaacaaaaaatatgaattttaaaaagacatttaagattcacttacatgccaggtttattcgattgtagtgagcagaaaaatcagaacccagatgataaatatattctgacggaatctgaaagaaagagaagcaggaattggttgaaattaatcaaatggaaaaatgaaaggccgtgaaagagaaagaagaatgagtgaagagaagaacgagactttgtggatggaatgttgatcttagtaagaagcagctttggaaattccaactaactgtttggacttttttcctcttacccacccacgtagactgtctaattctaattctgctaccactaagtctttttcacttcttttattatttctttttctaatttgatttaacaatattttaattttctataaaagaaatttattgttacagtgtaggtaggaagacaaaatctcccactaatttcgtttccttgaagtataaagcactcacgatttaggggtgttcattgtatcaaattcaaatttttttaaatctattcagatccgatctaattatatattagaaattagattttaccatctaatctgatccaattaattttcatcattaaatcaatccaacatccattaaatattagattgaatcggttctatccattggatgtatttcatatatatttatttgtttaatttaggtttatccaatattttaaacctaattattttttggatcagatcgaatccatccaatattttaggtctagtatgtattgaattggaccggatccatccaatccaagaaaaaaaaaagagtaaaattttaatattaattttcagatatacatatagatttgacgtataataatataaaatctaattactcatccaaactaaaagaaaatacta

SEQ ID NO: 42820 - DNA, 993 bp, Cannabis sativa
caaaagcctaatctaataataatcaagaaaaatcacattaattaaagaacacaaaaatgtagaatccaaatccaaaataagtacagaataaaatcacacttataagttgtcaacttgtatgtacactagtaatgagaactcaagtattatcattaatgaatattcaaattcatcatcaatatgctaatataatatttatatatataatgtagtttagttttaaggataatgaattcaataaagaactcaaacatgaaaaattaaaagctaaatgaaatgaaagtttaggttatatgtcaagttatagagacatatgaatcacatctctggacatgttcctttccaagatgacaaatcacatgtttagaaaagagaatttcatgcttttggatgagattagatgagatcccatatcaagtaacttctaattagctctttggtaatttacaattatattaatttgctaattaaaattttgaaagggacacaaaacatttttaatatgtatccacaaaataatggtttataatatttataacaatccctacaattgtttgataatataattaataatttgttatcacaagaacatttttgagtagttgcatgtgaattgaatattaatataaaaattaattagttttattaaataaaaatatttttattttaaaataatgtcaatatagaatatactcttatcttttatgttatgttattaagaaccaccatctattaaaataatataatattttatatgacattgtcctacccctattgtgattattattcatagcaattaattaattaattaattagtttgctttagaatttacaatgcttttttgggttgcatcgaaaaagttaaagctaaaaatcccttatgggtagggttttgtggattaaaccccattagtacatatgggtgtctaaatttcttccaagtggcttgttttcaagaccaatgttttttgtggacccaaaaaacactagtat

SEQ ID NO: 42821 - DNA, 2993 bp, Cannabis sativa
gactactgactgtcacattgatcaagggacattcttgattttaatgagcttttgatgaaccttttctttgacaaagtaaagattcaattctatgtgctttgtttgagtatgtagaactagattgagcgtacgcataattgtgctaaggttgtcacaccagatgacaggaggtttgggaaactaattttgtaatttagcaaacagggaatgcagctaagaaatttctgcaactgtaatggcaaggcttctgtattctacctctactcgacttggaaacaatatattgtttcttacattgccaggtgataaggttgcctccaagataaaccacaaaaccagaagtagatctttaatcatctagactcgcaacctagttagcatcacgaaaactcaaaattagaaggccttgtaagttgcaaaccataatctaacgtagcaccaacatatttcaagattcttgcaatccaatgaacttgtaagggattttgcataaactggcatactttatttacactatatggtactagagagcccccacaataaatttgtaaggataggaattttcaacgggttcactatcataagcagataattttagaccaatagtcattggtgttgcagaagacttagcaccttgcatcttagctttgcatagagatcctttacactcttagactatgatagatgcataccctcagaggtgtaggatacctttatttcaagaaaataattgagttttcctaagtctttgagagaaaattgatcattcagagccttaatcacttgagagatggtatccttattactgccagtgatcaggatatcatcaacatccaccaataccaatattattaatgaatgagtatgttgaattaataatgagtggtctacgttggaagaggagaagccaaaggaaagaagaaaatgttgcaacttctcaaaccaaactctgggagcctactttagtccatataaagccttgcgaagcttgcatacaaggtgtggagctgttttgtgttcaaatccacactactacaaaaaaagttttttaattgcttcaatttttaagtgacatataaagaatttgcgacagttggtgtacctagaataaacatcaacaaaactaatatagtacctatatccattaaaaaaaaatctactatatattattattattggaaatattacaattgttcattacaaatatgactgtattttagttgaatgacctaatatattatgccacaaagagaattgagacataggtacattagaacagacatgaaaacaatgaatgttagagttataggtcaatgtagcaatagaattaaaaggagtgacatttgaatttgagttagaagatggtagagattgacactgatcaaacttatagaagcctctatcaatactatatcaactaaaaaaaatcttcatagtgaccttgtctttcacataatagtgatcaggattaactcaaagaaaacatgatcatccttagcaaatttagagacactaacaagattttttgttatgttcggaacatgaagaagattattaagataaagagtttgggaagtgaagggagaaacaagaatagtttcaccgacgtgttgaatgtgcaaacctgagccatttctcatttagatttggtctgagccttggtagtctcgagtggtggcaagattgttaacattagatggtaagtgatgtgtggctcctgagtcagggtaccaactattgtcactcacagttttaggagtagcaagcactgcatatctacaactgaaatagaggcattaaaaccttgaaatgattcaagatttattaatgacttatcaaatcgataaaaacattgcttaacagtgtgtccaagcttgtgataaagctggtactgggtttttggagtggagtagcttcaaccaccacgataaccaccacagggagcttgaggagcataggattgaggataaggtgatggagggcatgttgtagccactgtattgactaaatctgtagtatccaccatagtttggaggaggagaaaaagatcaccattgtgataagaaggtgttagaggtggtggagaggaatgattaggctgatttggagcaggcttggtctgagttgcaaaattagcttcgggttttaagatatccaactccagatcttgagtttcattttgcgcttcataagccactaactgagattcaacctcaataacagaataagtgtcattttgagttgatagagatgtgataaaaataaagtaatggcaaggtaggccattaaagatcgcttcaatgtgatcttgaggaggcagaacatgactgattgaggcaagagaacatacaaggtgcttaatttgaagaagataatcattgaggttgccagcaagatgagtgcgatgaagctgcgtgcaaaataggctgatcttggctcgattttgagcttaataataatactttttaagagtggaccagatctaagctattgcaaccaatcatgtgagtgagaatatattcgaacatggagggtaagagccaaaaaacgagaagactatcataaatgttaaattcaagaaattcatcactaacacgaccagcatgttcatctttagtagtgagaaattttggtgggataaagaaatttaagtaaatgattgcctttaatggcagcatagacttgatgacgatgacgccaagggagaaagttatttttgtcaagttttactaaaagagagtttgttttcggtaacgagtttttgatattagtggttggttgagacgaagctgagtctaccatggaagatgaagacaaagaatcttgaaggtgactaatatcactgagagaaaacaaagtcaaagtaaataaattagtgtgattttgtattaatgatcttgatcaatttatactgattggtaacttttatatacacaacttttgatgtaaaaaaaaaaaaacagtattcaacaaaaactctaactttttattat

SEQ ID NO: 42822 - DNA, 4225 bp, Cannabis sativa
  modified_base (44)..(63): a, c, t, g, unknown or other
aaattttattccattccattcttattcctattcccattctcatnnnnnnnnnnnnnnnnnnnntcctcccaaccaaacgcctcctattttgttaacttagcttaagacacaagaaaaacaaaaaacacaacactgcatacaatacaacctaaaccaagaacaaattaacaccctctacattcaattattgatgtgtttttttttgtgttatacatttgtttgcagattccttcgtctccaaatagaagccttcttcaactttgttcttcttagagttccaacaacacaaggagtttcactccaactccaagaagtttcacttgaaggaatcataaacttttgcagacaaccaacattcataatcgaaatctacgaaaactatgattgcgatccactctgtcgaaacatcttcgaagacatcggaaaattactctgcaaacactcatttccagtaacaagtcctctaacttccttaaagattcaagcttttgaaggtttaatgattataatccataacatagctgacaacatagatagacaatatgacaatgatgatgataatgataatgattcaagaacactttttgagccatacccagttgagatttcagagtttagacccttttgggaagataaaccaagaaatgattcaatcaattgggttgattttttaaggtttagaaaagctcagaagagaaagttactagttactagttaccattttaattgtgatgagaagaaaggtttggagtatttacagctttctaaattgtcccctgatcctcatgatccaaaggctttagctttcttttttagatacactcctggattggataagagcatggttggtgattatcttggtgatcctgaaagttttcatcttcaagttttgaaggaattcactgaaacttttgagttttcaagtatgattcttgatcatgctcttagaacttatctcgaaacgtttcggttgcccggtgagtctcagaagattactagaattcttgaagctttttctgatagattttatgaacaacagacttctgatatttttgctagtaaagatgctgtctttattttgtgttattctcttataatgcttaatactgatcaacataatcctcaagtgaagaaaaagatgacagaggaagagtttattaggaataatagagctattaatggtggtaaagatcttcctaaggagtatttatctgaactattcaactcaatttcaaacaatgctattactatctttggtcaatctggtcaaattgttgaaatgaatccaagtaggtggattgagcttataaacaggtcaagaattattcaaccttataagttaagtaattttgatgatgataagagaattggtagagacatgtttggtagtattgcagggccatctgtctctacattatgcgcgtttttcgagcatggtgatgaagaagaaatcctccatgaatgtgttgaaggtttgttttcaatagctagaatagctcaatatggattagtagagacccttgatgagcttcttgcttctttttcaaaattcactactcttttgaacccttatgcctctgctgaagagacccttttcgcctttagtcatgatttgaagcctaagatagcaacacttgcagttttcactattgcaaataactttggtaactctattagaggtggttggaagaacattgttgattgtttgttaaagctcaaaagacttaaacttcttccccaatctgtcattgaattcgatgctgctaatttcggtactacatcatcagattctcaagctacatcagaacaaggcctctctactccaaatgattctaaagttgtaaatgttagcagattctctcattttctatcattggaaagtatggaagattcactttcacttggtgtgagtgaatttgagcaaaatcttaagattattaaacaatgtagaattggtaacatcttcagcaagacttcaaacttgcctgaagatgctttgatcaatctcgggcggtctctaatcttttcggctgcagggaaaggacagaagtttagtacaccagttgatgaagaagaaacagttggtttctgttgggatctaatcattgccattacattggcaaacttacataggttccaaaccttttggcatgcttttaatgatcatctccttgcagttgctcaattccctaccttttcgcctgtcccattcgctgaaaaaggcattgtaggcctcttcaaagtttgcctaaagctacttggaacataccaacaagaaaaaacccctgaggagatgattttcaagtctataaacttaatgtggaaacttgaaaaggaaatacttgacacttgttgtgagttcataacaaaatctgttaacaagattttaactgagtttcccgcgaatttgaagactcaactcggttggaaatctgttctacacttgttgtcaatcacaggtagacaacctgaaacttatgatcaagctgttgagactttgatcatgttgatatcagatggaactcatatctcaaaaatgaattatacttattgtattgactctgcttttagctttcttgctcttagaaacagtccattggagaagaacataatgattttggatctattggcaagcacagttactcaattagtccaatggtacaaaacacagtgcttagagctctcaaatagtaacaatttcagcgcgacaagtaacgcgagtaactcttcattcgaggaaaatttgagagctcctagctcattgaacttcttcatgagtttgttcatcaaactaggcgaagcgctgagaaaaacaagcttagctcgacgagaagagataagaaatgctgcagttatggctcttcagaaaagctttatgcttgctgaagagctcgagtttaccccgaacaactgcattaactgcttcaatcttgtgatctttgctatggtggatgatttgcacgaaaagatgttcgagtattcgaggagggaaaatgctgagagggaaactagaagcatggaaggaactttaacaattgcaatggaacttttgtgtgagatcttcttgaagttgatgacacagatttcgaatagtcctggttttaggacattttggttaggtgttttgaggagaatggatacttatatgaaagctgatttaggtgagtatggtgtgtctaagttacctggtgttgttcctgacttgttgagaaaaatgattactgagatgaaggagaatgggattttggttcagaaagaagatgatgatctttgggagattacttatattcaaatacaatggatagctccttccattaaagatgagctttttcctgaagaaagcatctgattcgggttttcgatacaatcaaatagaaagctccaacgaattaggatttcactattgagccaggtcatttcggggcaagcagatcatttatgatgaagaaaatggacttaaacagaatgattcgaaattcttgcaaagtgaaaccatgaagtaccagacacgagatagatctttcaaagaacaaggctttatttataattgtaaggaaaaaaaacaaccactttgaatgctagtttctttttttttttttaatatattaatggagtacaataattaaggttgattgtagtccctagagttcgtatagaattgagaattgtaatttgttttaattctagaaatcgaaaaatgaaatttgttttcgaaggaagttcagtttctattcccgaaactgttagaaaagaaaagtcattgttctttctttttgatcgaattattagaagtttcatgaaactaagataaagaatcatatgttaatgctaattaaaattaaagttctttctttagcttaattatcggttagaagatttcgtttcttctttaacataaaactagagactagtaacatgaacaacttcattccaaagaaaatagatttcaacataaatcaacttacaaacaatatttaatcacatatatataatatattgtagtgacatatattcaggtggtttgaatgaacatgtatgcttttgtgatatgagtttgttataagtagacagagcatgtgtggctaagcaagcttagattccaatcccaaatggtttttggggttgtgcatgtgctaattaagactatgtacatccaaatttaatttccattcatgttatatttatataatatagtatgtatttatatcattttaattaatgtagt

SEQ ID NO: 42823 - DNA, 3162 bp, Cannabis sativa
tatattaataattcattgatggtgttcccacgttccttgaatcatcacttacaactcacttgtggatatttgttttgtttatgtatgaaatgctgcaaaagtaataagcagtgtaaatatagcaatggcagagagtctattaatatcccaattagctgaggcagttgtatctcaagcagtaggaagactcagtgagctaataatcaacgaaggtgcatcgttgagcagtgtgaaggcagatgtggagaggctacgagatgagctacatcgaatgcactgcttctttgaagatgcagatcgcaggccacaccaccaagacaagcgccttcgccattggatatcagaacttagaggtgttgctaatgatgttgaggatgttattgagatgttcatctccaatgtctcctcttcttgcctccaattcttctatctccgcagactcaggagccaaatcaattccatcaaaactaagatggaagatatctttaaaagctcccaaacttaccggattgaatctagtagtcgtagtagtagtggtagaagagttgaagggactagtagttctgtttctgagctacagcggcgtctgaggagatcttgtccagatgacaatgatgatgatgattatgttgtgagcatggagcatagtgtgaaggctttgaaagatgagttgatcatgttgaagaaggaagatgatgatgatcaattgtccatagtttctgtggttggcatgggtggattaggtaagaccactcttgctaagttggtttataaaagtaatgatgttaaacaacactttgattgttgtgcttgggttttcatatgccaacaatatgtttctaaggatattttgtatgaaatcttagttcaaattgataggggtagtgatagagagaaaataaggaatttgaatgagaatgagatgagtgataggcttaagagtgagttaaaagggaagaggtatcttgtggttcttgatgatatttggagaattgaggcttgggattgtatcaaaagagctttccctttaggaaatagaagtagtaaagtgcttttcactactcgaaacaaagaattagcattgtctgttaatccatgtagctctccaattgagccctcttttttaacatttgaagagagctggcaagtacttgtacaaaggcaagcttttcggagaagtggttttggactagaatttgagatgttgggtaaggacatggtgaaaaaatgcggaggactgcctctagcaattgttgttcttggagggctgttgagaacaagaagttcacttgaagaatggaaagaggttcagaaagatgttaactcacacttgaataagctccaatcacatcaagagtatgaaggtgtgaatggcattttagccttgagctactatgatctaccttactacttgaaaccatgttttttgtatttgggaagctttccagaagacagagatatagagaaaaagacattgattcggttatggattgcagagggatttgtacaaaaaccgaaaagagaagaggcaaatgaggaaacattggaaaatgtatgtgaacaatacttgagagagcttacaaataggtgcatgattcaagtgagcaaaaggaacaattcaggagtgggagtgaaaacataccgagtacatgatcttatgcgagacttgtgcgtgtctaaggcgaaagaagagaacttttttcaggtcattcaacatcaaaatgagagtaacatgtcaggggagggtggttcttcaactcatcatggtgctaaaacaatcttttcacggaaaattgttcttcatgttgggtgtgatctcgatttgtgtaaagttcaactccgtctccattcccttttatgtttcgacaatgggcattttcttgtgagtagcttaagaaagaagactttcatgttcttaagaacactgatacttggaagcacttctttgggagataacaactttaagattctgaaacaaatctgcacactcatacacttaaggtaccttgggctgcaaaaatccaataatttgcacaaattgccaaaatgcattgccaacttgcgtagcttgcacactttggatcttcgatatagcaatgtcaaaatgctacctacatcaatatcaagactgacacgtctgacacatcttatgagtgataaacctttaatgctcatggacaaagagtcaggtaacaagtttcttaattttgctgttttaagtgttagtcctgctaaaccgactccaccaaccaatccggcacagcctaccactcctatgctcataagggatgtcttaatcttcaaatatgatgttcttctccaacttactaatcttcaagagctaaaaatgctaattagaagcaaagaagaagctacaaaggtgctagaatcggccatcataaaaggcggtagaattcgatccttggatcttgacatggtgtttcatggacatgtacttcaaaatcaactagcaccaccaccaccaatgccttttccaagtctaaaatcactctctaaatgctaccttctcaataaactacgtctaagggggccaatagaaaaagattctttgcaatttctgtccacaagcctagtcaaattgactttggaacatacatgtattcaacaagaccctatggcagtactggaacaactaccaaatttaaagcttctacagttgcattctttttcttatattggttccaaattggtttgctctgccaatggctttcctaaactagagactcttcggctttgtcacttgcaaagactgaaagagtgggaaatagagaaagattccatgcaatgcctgaagagattagagcttgaacaacttctgaaactgaagatgattcctgatggcttgaaattcattactactcttaggcaattagatgttatagaaatgacagagatttttgaagaaaggattaaagtgagtgaaggacttgaaggggaagattacaacaaagtgcgccacattccctccatctcaactagaagactttattaagaatagctgcaactttattctcatcattaaattgttgctcagtctcatctcaactcaaaccagtatcataatataaattacaatgctatcttttctttaaatagagctatccttatccaacgcattcaagttattattattattattat

SEQ ID NO: 42824 - DNA, 7379 bp, Cannabis sativa
  modified_base (5590)..(5595): a, c, t, g, unknown or other
tattaaataaaaataaaaagtcatccatgaatttctcataaactaagaatttcaattatataggcacactttgtatagaatagatacatttttagttttgtccgtgggtttttttttttctttttcaaatctgaaagaattttaagtaaaacgatgcatctacgataaatttcataaaaacatcacaagaatgtcgttctcaaaaattaagttttcaaagacaattgttatagcattgtaaatgcatcatttggatgcatagccttttgttttgatctcaaacatcaagttttcaaagaatcattgttgcgtcattttggcacaaataaattttgatgaaagtatcgcatgggctttttttttcacttcaaatataagtttttgatataccatgatcaggctatcgttttgacttcaaaaatcaatttttcatgtaagcttcataagagcattgttttagcttcaaaaatcaagatttcatgcaagcatgtcaatagcatcatttataactttaaaaaacatgttttcaaaagaacatcactgtcatgggtgaagctacgcatgttaaataataataaggttagcaattccattcctacactcattcatgtattccaaacactactttagtataataataaagatctttttaaaatttaaagaggtcacaagttaacaatactccatatcttcatttatatttttgaaaactaaaatatatgaaccacctagcaactatgtgcaaagtgaaaatgtaaaataacattgaataaaaattactttaatacaattatgtattattttacattttattatatttaattttataattaaaattttaaaagtcttcacataatataaaaatatgtaagcgccctaccaaattttatttctaatttcatccctgatcactgtagtatcgcaagtgcatcattttgactgccaaaatcaagttttcatagtagccctagcatcacaagagaattgtaggagcattgctttgttcaaaacttgtcaacttttaggtctgaaaaaaaaatgctaacaaaacaaaacaaaacaaaacgtatacacaattatttgacaatcataaattagtgtatttagtctttattgagttaaaataagattttcaatcattaaaacataagacaaaaatcataggtgcccatgggtgcttcagtggtggaacaatagggataggtgcatttcccaataatttggggaaaaacataacatgctccatatttagatcaccagcttaccttaccaataagaaataaaaactaaaaagcaagaaagttcacttggttgtctggatgtattgagttgtaacaataaaaactctactatggtacatgataagttttacatcaaagaatgactaagaagcctattcgaatgcacttatacattaaaatgacacagtaaatcttttacaatatattggtgttatgttcatcctctaaaagggaaacgccttcaattctcaactctttccatagatatataaataacatacataactgcaataaggcagaaacggcagtaaaaataataatacaaaatgctattaagtgttacagttgtagacgcaccttttatttttttctccttgtttctgaatgtaccatggttagaggaagttattatgaaagaatacttcttctcaagacagatggatcacccgtgtggtaagcagactctgcttttgtgtgggaagtgctatatttcaaatatttccagaaattggtatatggatttgttgagtcacgttctgatgcaagcaatccttttggagagtgagctccaccaagtagagggaaggataccgcagtgtgtaataagatatataataaatcctaagtatgccgtggtgccaaagcagaccgcaaaaccaaacaagactcccttaacttcagaaatgaaaaagtctagcaacagatacccattgatgactattaccagtccagccaccgtccatgccaccctctgcaacaaatatcaacagagaaagtaagaaaagaaagttgaccactgctctcttttgtggaaaataaaatatatgaatgattgattacatgcttacaatccgactatggaattgcaggagcactaaactattgcacagaaattaattagcctcttgctataatatggtgtacaagcatgcttttatactcagtggcaggcagagcgcaacgaataatagaatgggaaatcacaatgtttatcaacttgattaatcagagacaacatatatcattgaactgaacaaaccacaaatttcagcacaggatataccacaagtgatctgtctaatccttatgctttcatgatacaagaatatgtagtatgttataaatgtgaatgctactcagaaactaaatcaagaaatgctaaattataaagagtgaaagatctaaagcctggagttcccaacgtaaaacaaaatcaatagaaaattataatatgaactacccacgtaaacaatttacctcaaggacaggcccaatcttaaagactcccatcacctgctcctttgctaccaaggtaagaagaggaataagggcaaatggaatctgaatagactgaaggacattaagccattcattcaaaacatccaaagaagcttcagatgtattaaatataactgctacaacaatggttggaataatagcaaaactcctggtgatcaatgctctcatccacttctttaaacggaggttaagaaaaccacccataataaactgcccagcataagtgccggttattgtgctactctgtccagctgccaacaatccaattccccatatataaagaattggaaggaggcccccaccatacttatcctgaagatactgacctgcgtttactagtcctatactgtctgcttgtttggtgccatagaatcccttagcaaacacagatgtcacgaacaaattgatcatgaaagaaatgaaaagagcgacagatgactcgatagagtagtagttcagtgcctcttgaactttgcttttcttgtggggatcaacatttctagactgcaccaaagcagagtgtagaaatacattgtgaggcattataacgcaaccaacaactccaacagcctgccgaatagtttttgagccaagtctaggaaccaacagacctgtaaataataaaagatttagtaactgacattgagtttctttgaatatattaaaagagaaacagaaactgacagaacttaccgataataagttgttttccactgggttttgcgtcagcaaacatccaagcaaatgatagacccattgttgcaatgagaactgcaaacacagcttctaacttcctcactccatagttctcaagaaataaaaagatgaaactgtgcacacatgtaacagaaacaacagttaaaatcataactaaatgctcgcatttatcaacattttttttccaatttacaagtctatgtcaacaggggaggagaagagaacgaccaaaaggaaaaagaaaaatgaaacaattggtgcatgctcagtgcccaggcagttgtcactatattcaaaaactaacctacaagttctttctaagacgaacaaaaacgttagaaggttcaaaaagcaatctttttcaccgtcagcctcatctaattgggagtagggcctcatcggtttaagatggctttagcattaatggccgtaaagtctaacttctatagtaaagctttatattgccacctaaaaacaaaaatgtgataaacctgtacatctcaaaacggaaacaaagagcatggaatattaaaggtttaattcaataaattacagaacttggaatccaataaaatattacaaagcagaataatcaaccaaatcgacaacctcacttcacatcacgagacagtagcattttcgaaattagttttttttttttttttctaaagtgagattaattaagtccaaggaatttaggcgaaaagaaagtgtaactgaaaccatgaattattaaaacaaaatgtaaagaataccaaccaatccgaagcagtaatgatgactccagcccaaagaggcaaaaccccatgactaagaatctgaatagcaatggcactcccaatcacctcctgaatatcagctccaatcaatgccacctccgccatgaaccaaagaaccaatctggcccaattcggatactcgtcccggcaaagctccgccaagtgtcggcccgtggcgacaccaactcttgctgacaacaactggatcatgaggcccataatcgttgcccacatcaagagccagagcaatgagtacccagcaatggctccagcctggagatctccttccaggttgcctggatccaagaaggctatgctcatcaagaaccctggcccagtaaacaaccatagcttcttccacgagaacggtgggacgacacaggaatcaatggcctccggtgaattcaaatcgacaattaagatcttctctcgctcctcaaaagcaacttcttcttcgtcatcctcgtccggcgaatataatgacttgggaggcgatgaagttgactgggatcgtaataatcgatttgcttcctcatcttttccatcttccattggaatagagctcatcgagtagccgccgcaatacttgttggccaccgaaatattctctagatatcagggattcaataccggcgaattcggtgggtggtggagtagtgtagatattcccgagagatgatgaggaaaaaaagctcacacagacttgtccaccgagatgggtgtgcgcgtgcgagggagtttccgtgtcctgtacttgtatgctttttcgtatatttactttttcatttttcattttttccttttttaaactttttcctatcatccaaatcacaaaacacaacatacattcatagaccagtaaaaaaaaaaaaacacacccacacaaacatagaaccggaggaattttccaccaataagtcaacaacttagctaaaaaaagaaagtatacaaagttagagattgagccgctacaagtaatacgatttgctaagatcgagttacctcaaaaaaatttgataaaacaatttgagacaaaattaaactttactactagctaaacaaacaacttaaacaaccttaataaaaacaccacctacacaatagatagatataaaaaaaaaggatagcatacttatatgataatattatatactatgaaaaaataattattttgactgcagatctcaattaatttgtatgggaaatttaatttttttttatgcatgatttcaaggttaatttgtttagaagacttaaactataggtaattgttagaatagccttattttacctaaatcccaaaattacccctctcaaaatctcacacctattctctctacttccctctattctctctattcgtcccaacccaaccatccaaccccagccaaaaccccaaacgccagccacacacgcacagaggagacccactggcccacggcgctcccccaccgacccacgacgcaccaccgaagcaccaccaccttttttttatttttttattaattttgattgtgattttagtgttaaagatagattttgttagatttaagnnnnnntttaggttttagaatctcagatctgtaattttgggcaaggtccgatgtaggtctgatggggtccgatagggtcgaatgaaactgtgagtttgtgaggtaggaatgtaggtccaatggggggtccgatgggtccgatatagggtctgatgggggggtctgatgggtccgattgtgtaaatgaggttgatataaatggaaggtattttagagatatcataaaagttgtatcctacaaatattagttattatgtgtttaggggaaaaattttaaccaaatgtatgtaagcataaaaaatcaaattttctatttgtatttgttggaaccatttatttttttgttcattcttaatttattttcggcctttcgcccctttctctatttctaatatcctacaaatattagttattatgtgtttccgtgtcctgtatttgtatgctttttcgtatatttacttttttattatatttttttttcttatcatccaaatcacaaaacacaacatacatcatataacagtaaaaaaataaaataaaataaaacacccactcaacaaacatagaaccggaggaattttccgcccataagtcaactccttggctaaaaaaagtatacagagttagagattgagccgctacaagcaatacgatttgcataaggtcgagttacctcaaaaaattttgataaaacaatttgagacaaaattgagctttactagctaaacaaacaacttaaacaaccttaagaaaaagaaaaaaaaaaaaaaacttaataaaaacaccacctacacaatagatacatatagaaaaaagaatagcatacttatatgataataatatatactatgaagaaataattgttttgaccgcagatctcagttaatttgtatttgttggaactatttatttttgttcattcttaattcttttcagcctttgacgctccttactctatttctacttctttttatcattctcttttattcttagttgtcaaccttaagtgcattacatatctttacatcattacatgtctcatttatcctctcttgagtgttcatattctatattctcttcctttcaagaaaatctctcatattggccgagatgtataagtcatccgtcagatatgtgtaactcatctcatttgagatccgtcagatgtataagttatcctattcgaaatcattatgtcatccgtaagagataagttagtcattccgtctaagatatgtaagtcatacgtccgaaatatacgaatcatcttatttgagatatgtgattcgatttgtttgagatatgtgaattatatgtcggagagatgttagtcatccaatccgatatatataagtcatctcgtccgaaatatgtgagtcatcttgtttaaaatatgtaaatcatctatttaacaagatctaagatgttcgagatatgtgagtcatcctatttaaaatatgtaaatcatctatttaagaagatctaagatataactctttgttggtataaaccccctcattccatgttcactgtaaaaaccaaaatttaaaaagagattacaaatagtaaaaaaatattccctaggtggccttcgacctctaatatacctaggcaaaacacttaagttagttacaaagttttttaaccactttgtaactaactctcatgtttttctgcattcctctataacacatataaataccaaatcagtacaacaacagagataacatcagatcagtacaccacaaaaatacagcaacaaaattagaactgaacaacaaaaccaaggg

SEQ ID NO: 42825 - DNA, 2326 bp, Cannabis sativa
  modified_base (397)..(402): a, c, t, g, unknown or other
taaatttcgtgtcatgtcgaacccgtaaaattttatgtcgtgttcgctaatattttgaatgaaagatcctaattgtaactgtttaagaaaacacaaagtccgatttatttttttaaaaagatataaaaaatcttttaattttttatattcataaaatctatatacaaaagatccttttaattatttaaattagtaattcatcaaaaacaaagacaatataaatcctttaaaaatctatattgattaatgtggtaacaaaggagtctcgatatgcaagatcaaacagaaaacaaattataagaacaataattaggacaaagtttaggattgaatcaaaacatacacaaaaaaaaaatttatagtataggacacgatttaaaaccgtcgcctatacccnnnnnnaggcgacggttttaaaccgtcaggaagtctacattagcgacggtttttaaccgtcgcctattttgcctattttgcgacggtcgtatataggcgacggttaaaaacgtcaggaaaaaaattaattacttttctttgatttgataattgtacactaaaatagtaaaaaaaaaacctccataaaatgattataatttttgtttaaaatagacaaatatttgccataaaaatacttaaaactatgtcatagagataaaattaaaacacttaaaactatgttacatagacaaggattaattgctatattaaaaatcgaattacagtaacaaaatacaatcccaatcaagccatttatgtccaaaaaaactcagcagatcttaccagagaaaaaaaaataacctttgatagctatagatttaagaaaaaaatctattattattttttttgtaatacctttctactaaaaaaaaagttattggatgattaaaaatctaaaactctccaacattatgttgcaaattcttttaatttaattgtgtgaaagcaaaaaagcaggctaggccgaatgaatattaaatattatttatgtattctatatgttttttttttgtttgtttgtttggattgaaataatttagtcattggtggtttaagaatattaatattcaatacatttgatctgttataattatatgtatattttaattaatttgctgtagtcataggccgattgggatacaaggttatccaatgaaagatattgaatttatgagaagataatctctaattacaatattattgtcatatagctagttagggtttgttaagaaaaatatttatatatatatatatatattagctatttattttaaaattaagaatttgtttctaattagcaagttaaaacaaattgttgtggaacttcttgttcatgatgagaatcaagccaactcagcattagttataagcggaggcttagtcttaaggtataacgattaagataaaattaaattttggggctatatatacaatttaattattattaaaataatagttataatattttagtataacggtaaagtttcttaaaaatattaagagttatctttcataggtgcacattaaatattttttaaaaaaataaaaaggtagaggttgagaattgagtttttgatctcttaacttaaagtaagattttttaccactacactaaataatgtttgttatattttttttattatttaatattttatctatatactaataatttatttttttacaattttggaatattcctgagtgttcgggagtccgaggctcacgcctgactcacctaccctcagagtcgaccctaaagacaaataaacatcaaaacaagcatgataactctacttactaaataataccttgttgagatgcactactaaagttctataaaataccattccaatatggtgcgattcgtactgaatttgttagtcacatttccccgtgtggtcctaatatttttgtgctaaaatgatttgagaattatggttataatattctcttgtatcttgtgcatttgtgccagttataattatgcctaacggctgccttttactgtgtgtaaatttatttctctaaatgaaagtatccaacttcattaattattgagttgagaattatattcattatttatctttcattctttcttaaatttatcttggtatcagagcaatgcaaggtctacgtccattgctaatcttggaaatgatggccaacaacttgctatcattgctgcatcccaaacaacaagctctcctgtatataactctactatatattacgggcaatattattattaattagtagcaataatagccaatctcatctccataacccctaatctcagcaacactttagcacatttaaccaatattttttt

SEQ ID NO: 42826 - DNA, 1527 bp, Cannabis sativa
  modified_base (516)..(523): a, c, t, g, unknown or other
attaaatgtatacaaattaaaacataagagggtttcgccgtaaaattactcttcattttatagctttaatactcaaatatctaaagcaatgtagcattcgattttgaagatgagaaacttcctctacttgagtttacctaaatatactaattttcttcttctagggaagtagaggaggactggttactacttactgcaacaacaacacagctttcatgacagactcgattattataaagaaccatgctaagtatgagcagagctatgtgtacatgtttccacaaagagtaatttgcagtataaatatctactctgtaagtacctaatcgttaaatattatcattatcctcgtgtcattttttattagtatatttaaactaatttttttcaaaaaataataagttaatgatgtggactaattaaagattgtcacgtggcaatttacttaattaacatttaacagttaggtaccaacagaagttctaaattaaaacttaggtattattaccgctaaannnnnnnnttaggtatttatttgcaaccgaaagttaaacttaagtatttatactgcaaattaaatgataatagacagggttgaggatgattgaggacttacggatctagaagttctttgcgaaaaggagaaccatcagtcaacaaagtgtaaatcaaagctccaagcattacacatcctaaagcactgaaaaatactcttgcagtaacaacagagtgtttcgccttcgtttctacatcgttcctatatgattgagaattcgaagacttattcatggcattaacaacaacaacaacaacaaaaattgattcaacataaattattgaagtaagaaacaaagcttcttacttgttagaatggcgcaacaagacatgataaataggatctgtattagcttcttgaggtgagagcttgaatagttgaataagaatataggtacttaaaacagggctgaaataataacaacatcaatttttagaaacaaacaattacataacagggtatgaactttgaagaacaattcaaaataaagcttttgaccaaaaatggcaaccaagatagattgattcttcttgaataaaaaaaactagttttatccaaatgaactgagtgaataaatttaaggagtttttatattatatactactgaaattttcaatttttttctttttaatgtggggcaaaaaatttttcaaaaataatatgcaatgtgttaagttttcactattgtttcacgattgttttttagttgttcattttaattgttctgttttattgttttacggttgttttataaagggtaaatatcatttcaaatcctgtgttttacaaaagttatcaatcgaatcctctgttttgttagatgataaaatgcaccttgtatttttcaaaatattataaataagactctgaccttaatttttgacaactttttttttaaatataatcaacttaaaaatacaaaccgatatagaaaatataaacagttttctcataacacttttagatcggat

SEQ ID NO: 42827 - DNA, 5739 bp, Cannabis sativa
tgcctccttgcacttgctcttagatccataacactacgcatttaagaccgagataaacccaaatctctttggatagggttccccatgttctgggaaaatccttaaaaaagaaatattatccctcactaaataacatgtcattttcaataagaaaattacctctacatttttttctggaggaatttcagccaaaaaaagaaaaaaaacctctatattttactgtttcaaaattaaagaatatttaaaactttcaattaaagactttatcacaaattataattaaattctttcaaaagtcaaaataagagcatataaaaaattaagcgaaaaccatatttaattgtactcaaaattattgatagaataacaataactgatttttaaatttgtaaaaactaatatatcaagtgatcacttttagaagtgttgcttagaaaaaaaaaaaaggaaagaggaaaagttaagaagtgttggaagaaataatttttaagtatcgcgagcctttcttttaaaaggatttttgaatcttatgattattttggtaaaagtttacaaaaacaaaaatatggttgtttttagatagaaaaaaatatttaggctaattagaatttttacccttcgaactttgacatgtactaaatcatgttctttgaacttttaaggtcgttaaaagtgtctgaactattattgagattgttggatttaagaacttttgttcagaggaaacatgatttagtacatgtaaaagttcgaagggcatgatttgttagatatcaaaatctgagcaacatggttcagtacataaacaatcactaaaataataaaattgaataaaattagacaaaagtccttaaatctataagctcaataattcaggaaaaatttttaacagttaaaaaaaatttaaaaaacataatttactacatgttaaaattttgagaataaaaattcaaattaacattttatggggtggtattaactattacctaatgaaaaaaaaaaaaaaaaaaagtgatatcgtaacgacgccgtttatgcgttcctaattctcagtcagggactaaagcagttgggactctgtcctgacttggggtttatgaaaagcgcgccgcttcttcaactcaatctctctccctcttttttctccctttgtctgaatctctcgtaacaattctgtccatttttaaaatctttctttactaagaaactctattctttcccatcaacactccaaattttcaatattgattttttttctctttccataataactttttcttgttcttcgttgaacttttaaatttcaagatacccctccctctggatttcgattcccatttcttttttaatatacgatcctaacatcgaaaaaggaaaatcaaagaataaagattcgattccccattttttgaaatagtgactgcaagtactctttttattagggtttgcagaaaagctatagctttgtggattttgtagtggttgtacgataactaatacaacagtagcacaaaattttgatataatgagaacgagagtggttgtgtttccagttagaggtaaaaattggtgttttgccacgtctattcagcctttggcttccgaatcagaatctgctactaccctaactccttctacaattaaagatctcttcaaaaagctttctttttccactcccaagcccttagcctccaatgcagaactccttgtcgattttgttgctaacaaggtcatttcttttctgccctttgtgttttctttcctatgtttttataataatttttcactctattaatttgatcttcttggttggtttagatgaataaagcttggatggttctggagaatgcgcctcaagggactttaaagaacaagatacatgggtaaaaatctgtagttattcaaatgtatgtactattatggatctagcaatgatattgtgctgaccattttaacttgcattgacttagaatggggttgcgtctcttagctggggtaaagccatctgagatgtttttgaagtctatacctaaagaggtcacaactgtcgaagtcacctacccttcaaggtttatttcttgcattgcctaaaaatcccctttttcttctaatttttgtcgtgtggaaaataaatttaggctatgtttggatcttgcattttaccactgaaacaatttatgtgggagaaaaaatagagaaaaatagtggaacttgctttatacatttacaatttttctaaattttatactacatttaaatttaaatttttctgaattttgaattcaaacacgagaaaagaaaatctttctgaattcatttttttcccgggctaatgttgcaaagggacactgtagattgaagaagattctgataaagctgtcttaattggtgctcttagagtgctggtgtattatcttttagttatttcatgtcttgttgttcattgaattggttatgacaatgttgcagtttaaatccacggcttgttcgccgaaggctaagacatattgcccaaaggtaaattcttcccgattcgtataaagttagataattttcaggttatacaaacttactttattgacattatacaaaccatatgaatacaggggaactattattcacaagaaatacttttatggctcggtatcgctgcttccattgacaagtgctttcactgtaagtatgttcaaacttcaaagtcctggttgcctcttcttattcttttcttttttctcttctattttcaattgtatacttttggaagcatctgctcttgtatgctgaattttcttcaaacacttagtgaaattaagtatattctgattcttacttagtgctatctctgatcttcttgcagatcttaccactacctaacgttccattcttctgggttttgttccgcacttactctcattggcgtgcactccaggtatttaatgttattagacatggaaaaacatgaagcatgtttagttgagattttttcctaagctatagaatgttactactgcttcttgtaaaatgctattcaagagttctatattcatctatagtttgaatcatgtgcggaatgaggattgatgttatctgttatataatgtcattagggtattataatctatgtgagatatcatacaagtgtgatcctctgtttatgttgtacccttacttaactgttttggttagctttgcccccaatcattgatgtatgtatcatacatgccattgggcttttcctagtaatgtttggcggcctttccatgcactaaaactcgcctatttaattttctgtttggtttgtctatattgatgttacagggaagtgaacagctccttcagttagtctcagatagatctcagatgttgagtatcacctctgttgatggagaggacaagtctaatgagcatgctacaaaatggtcacataactctccatgggtcagttgctctttttatgatccctaatgtttacaactgaatcatattcgcttagtatttcaagactgaaaaggggacaaacctattgaaactttccacaaaaggagcccttgaaattgaaacagatcgatgcacgctcacttgactttgatatcatttcttatgttatggattaatttggggttgcacattaatgcttggtttcttaaatttattaggtgttgcggccatcaaaggaacttgaagaacttgttcaacgtgattatggtgatgatgggctaagtaaatctgctatttcaaatatttgcatcaagtttgatttgaatccaaatgatgttctaaagtacagggattcaatgtagtttacttcgttgccattttaaatgttcattttctttttctcttttcttataaagacttgtggataattgtgatatggatggttagtacgtagtgtttaaaaaataataagaaggtaactaagggtcaaaagaccgaagttggagatggagaaacttttgtggtttgatgtttaaatttgggctgaggtaaagagagagttggaaacgatttggtgatttctggtcgtttgattcggaccaacgataataatttgatcaagagtgaaaaccaaacggagaatagctagagtaaaatttcccactcaaattcactatctttttaatccatgtttgtggtttaacttaatctaacttgataaagaaggtgtaagattgatgatctaaatcaggttttttaacaggatcttcatctgagtcaggttttgccttaaaagaaaaaaaaaccccttcagaatgaaacgacaaactttttcttggaggggataacaagaaataaaggacttacattcagaaaatatgtatattcattgaaatgtctaaagttatgaatattatgactaaattgatgagttgaattgaggctgaagtctacctaacaaacttaaatgtggcattgtggctagctaggtgagtaagtaattcctaaataatttattgagttagatcattgagtatgaatttgggcgtcccattgtaggtggatgacccacctcaaacgattttggcgaacatttttgggcagtgttggagtggtcattcatagttacaccggagagaagagttacatctagtagcactcttattttattctatatttctgatcagaaaacaaaactccataattatatttgaaagttaaattttagtgagaagaaaaaattaagaaaaataaagcgaacaaaaagtgtaaagaacaaaaaaaatattaattttttgtgtttgatataaaaatatttgttgaatcaaatctttttgtgttagaatttaagtgtataattgaggtgcatgagattctatctcaaaactaattacttatgagataagtaatttatgcatcttatttattctattttatttccacacattagtaatgtgacactctataacactcccaaaatggtagctattctttgttcaccattttagacagctcgattacaagttgttcttttttatctcactattcgcgaattaccagtgactcttttggctctatttttcagatcgttttttctgtttatctttttgactcactatccccgaatcacaagtgatttttttgactatattttttgtatcaattttttagatttttggtggcttttttttggctcacttttttttttttaatcggatcgttagaggtttttgtttttattctaataccatgttacaatttaaaagtgtatacttaaggtgcatgtgatttcatctcaaaatcaaatagtttaggatgaagctagaaataaaatcaataactatttatgggacgttgccttatagttatactaaatatcattatcatgttgtataatagcaatgcttatttttatattacgtaaatttcaacatttaaaataatacataattatattcaaataacttttagtttaataacattttacattaattgctagatttaaattctaacagtcatgcaaaaaaataaaagtataaagttttaaacttgtgactactttaaattttaaatataattttatcactacacaaaataataatataattttaaatataaacttcaaataacttagaattgagtaaaattttaaataaagtgattgccctatttcaatttcatgtagcttcgtccattcctccaaaaaaaaaaaaactatgaaaatgcaaccttcccgtaaatatgttgtttaattggaattgggatgatttaaattgaaataaaaacgatataaaataataa

SEQ ID NO: 42828 - DNA, 13373 bp, Cannabis sativa
  modified_base (37)..(46): a, c, t, g, unknown or other
aaaaaaaatttgagcccctgggctgggtgggccctannnnnnnnnntagcccgcctatgcctagggccgggcctgtatcagagtcatgcaccctcgagtaggactgacaaagggtgtattgttaggatttcacattgactacataataactacttgggcactctcgtgtcttaggctagttttcgggagtgagttctacccaagtggttgtatcatatacccaaaagaaaaatgctaattaattcccatgttttttaactttcaacagaagattcaaacctacagatgttccaagcagtgtttcaaaagttgcaccagaattctgcacagtttatgttattgctaaaggaaagatctcctctgttcgctctgctatggcgccagcaccttcgagatcgaattctcgtaacaacattaaccatatacctcatcatgttcctcacaatgtacctcaacatcccagaagtatgtttctcgaaaatcgagcattgttgtaaggtgtcttctttcttttcccatttcatttttttttctctttttctcattgcttggttgatactgatgcagctcctgagagatcacatcataacaatcatggcaatcatagcaaccatggcaattataacactctttaccatcaaccagatgaaatggaaatgaggtaataattataggaaaaatctatagtacacctcaaaatgagtgtttcaatacaccctctacaagttttggcatttaggagagcttttaaacttttattttttcataattctgttcgtatatttttcgagaattctgaatagtttataatgttgaaaataagcttcaaatgttttgttgcacggttgactaattcttctgcactgtaaattattttgaattttctgtaaatttacctacaccgatcatgaaaaaattacactaaaaatctcttctatataccgaaatagatagagaatgtaccgaaagattaagaaagaacattgttttctctttgcaaaattacatcattaaaaggtctattttcactaacaaatctctcttatatgaaatgatgaaacaggtcacccttcacaagaggcaaacattcaatgaacaagtcatatgaactctcacaagacactgacatatcctatgtgacaagtggaagaccaagtatagatcgtttgtttccttcaatccatgacacaagtgatcaacaaggaaatagtcccagattctcaactagttctgactttgatgttctcaggaatttttcatcatctttatcaggacacaagtctattgacttgagctcttctcattatgaattctctaatcattccaatgaaagtggaaattcgaattcatctcagaacatggtaacaacaacaacaacaacagattaaacagtaatgatgatccaaactaagtgttttagtactaactttcttgatgcttattaggatgatgttgaagctgagatgaaaaggttgagattagagcttaaacaaacaatggatatgtatagtaccgcgtgtaaggaggcgctctcagcgaataagaaggtattaatctgcatatctatctaggattgttcgtacaatttgtaatccgtggttctaaattctaaccaattcaaactaaaccatttgagactggaccaaatgaatttagtgtctataatttggtttctttagtttggtcatagttctagaattcgtgcttgtggtttaaaccaaaccaaatcacttaattttgtatgtatacttaatatatttgatatttaagaaccatcctagttataatattgatattgacttaatattgttttaagaatattataaactttcaaaattaacaaaatttagtaaaaaaaatcatacaaatcaatctattcttaaggggattactgtgatttggtttgagcatttaattagtctggttcggttttgaacttttaaaaaactgtaatactggtttggttcgaaaaaatgaaaatccagaccaaactaaattattgaacaccctatctatctatggaatgttttcattgttggagagagatttatggatgttttcacaataggcacatgagcttcaccgatggaaaatggaagaagaacagaaactagaagaggcgcgactagctgaggaggctgcattggctcttgcagagaaggaaaaagcaaagtgtaaggcagccattgaggcagccgaagctgctcaaaggcttgctgaattggaagcacagaagagaattcatgctgaaatgaaagctcaaagagaagctgatgagaggaagagagcgcttggggccttgtctagtggagaaataaggtatagaagatacaccattgatgagattgaagtagcaacacaagatttcgctgaatctcgcaagattggagaaggaggctatggaccagtgtatagaggtgaattggatcataccccggttgctataaagattcttcgtccagatgcagctcaaggaagatcccagtttcaacaagaggttagctttaattttttttgatgaattaaatcacaccaaacacagcatttatccaaattctgaattaaatcattccctttatttgtactaactatttgatcacattgcaggttgaagtactaagctgcataagacatcctaacatggtactccttcttggagcttgtcccgagtttggttgtcttgtgtatgagtacatggctcatggaagcttagaagaccgcctctttcgaagaggtaacaccccaattctttcatggcaatgtaggtttagaatcgctgcagagattggcaccggtctcttgtttctccatcagacaaaacccgaacctcttgttcatcgcgaccttaaacctgcaaacattttgctagaccgaaactatgttagcaagattagtgatgtaggcctagcaagacttgttcctccatcagtagctgattctgtgactcaataccgaatgacagcaacagcaggaacattttgttacattgatcctgagtatcaacaaaccggtatgcttggtattaagtcagacatttactcattcggggtcttgcttctacaattaataacagcaaaaccaccaatgggattgactcatcacatggaaagagctattgacaaaggtacttttgaagaaatgcttgaccctgctgttactaattggcctatggaagaggcattcaaattcgccaaactagctcttaagtgtgctgaaatgagaagaaaagacagaccagatcttggcaaaattgtgttacctgaacttaacagaatgagagaattagctgaagagaatatgcctgctgatgggactggctatataccagcttcacattcccctaaccgtggcccgagttcatctccatcacaggtgagctagaaagattcaagcttcttcttcattcattcttgtattgttcttctgagattggtctttcctttttggcttttcaggatgtcatgagtgatcatatgcaacgaaattcggggtacgaaagctcaagaagcctttctagtacatcatcttctacagagaaataactagagcttaaagacattgaaatttactggcttacatggttcttgaaggtcattacattgtctatataaatatatataaatatcaattaacaaggaaaaaattagcttaatattggtcagaacagcaatcttatgaacttggcaagtgtaacctttttttttctcattttataatgaatgcagataaagaaagtcatattaatttgtgtcacagaattgaaattgtttaacaagatttcttttttaaatactaagcttcagatctttatttattcaaatgagaaacaagctcaaacaagaccatacaaacaaagagttcatcattaacttcctcctcataatatatagagaagtagaagttaatatatagatagcaacaagagtaagaagagatcagaagctttttagatagagatactgttgggaattcctttggctgcaataccaatttcgccattaggaatgagaagattgtatgggaacttaacaagcccatacctgttcttcaatgttgcatcattgttcctcttaacaattccatcttcaatttcagaaagtctccttccaaatctctcaaaggcctgcaaaggttcagcttctgctgtccatttttcttctctttcgccaagatagacttcatcagaagcatgcttagacaagacctcaataatggaaatctcaactaagctctgcagctcagaagtgatggttctcaagaaagccttctcgggatttgttttaagctcttcatattcacgagtaccctcttcaggcatgagtcgcctacttattgtgggacggtttggaatgtaccctccataaggatattgcccgaaattgacagctgcatgaagagcagaagtagtccatatagctgtggtgcatgtctcaactaactcttcgcgagtctgcatgctcggccaccatgacttgtcttttaagtcaccatgaccgacctctctgagctccttccaccatgcttggagttctttgtcgttttgaacaatttcatcacttttgtagtagaaagaacagtactcttgaacccaatttttcattgcagcccatatttcgagtccatcaacagcatatggataatcctctatcagtaggcgaacgccatgtggtgaacttggatcctcaactgccacccccctaaagcataacaacaaaatattaagtttcctgttttctgatttaaactcttaacaactcatttgaaagaatgaataatacctcttgattagatcagctgggtgtgcttgttcagctaaattccaattcttataagcagctgaagatatttccatggaatattttccagggaaaaccactgactcaataataccacctccattaacaagaagttgcctagcaagtgcattgatattcatggtgtcgcgaaagtgagggtgcaacagcttgtgaattgggtgtaaaacactaagctgtcggtttgttgctagcacgaatggctcagctactgcatgagtattcaacctgaaattcgaaacaatattcagaacaatctcaaaacataaaccaaagtcatatgaactagtttctttatgacagagatataccaatgactaacaagttggtgatgaccatagtcattaacagtgacataagctttagcaagttgccaaatggtactttcaacgccttgctcggctggtgtacaaattttgctaacagcacctaaagcatcgccatttggatgtggtaagcttagttcaattgccaatggcttcaaagtaccatcattggttaggaacaaaagtgttctggtggcataaatctttgatgaagttgtatcattgactcgcctcacgaatggcatgaaactatcatggtgatccaatatgtacagcttgttttgctcaagtgcctaatcaaacacaagactttagtcatcaatgccatatgtagttgagaaagaaaaacaaagatatataggaagattttgatcacctcattcactgataaaccatccaagttgttgattatgtgtgattcagtgatgttactagtttgattgccatagattgaagggtcaagtttgcttgttggtggaaattcctgtagttaaattacaagtaagataatcaaaaatgaatcttaaaatactttgaagatctttataggaaagaaaaagttagtacttggagacgacgaatgacaacagggttaactccagccaacatttctcttccaaactcctcatctgtcatccatgctgccttgtcctctgctcaaaaccaatggaagtagattttaacaatcaacatcattacatgtttatctatggtatcgattctcattcatttatttacttaatttcgtaatgagaaaaactagtggaacccacataaagtaaggagaaaggaaagtaaaagggtcccaaatgaaaaaactacaaataaaaagtaattacattttctaccgatgacaatttagtcatgttaaagcattctgattacctttccgaccagtttagtaagcagcataataaaatattgttttttactattttattattaaactcgttcattttttcggctgattattccgattttgattacctttaatcacatggggcatgggatatttgagaaatctggtaccatcagctcgaaagaggtctttcaatgtttccaaaggtacatttttgcttattgtctcaaacactgtaagtggtagaggaaaaccaccttcatacaaactgagtacatctttgaagctatcaaactcagctggggttctgtcaaataatgactcaatggcaggtttaatgattaaagcaactgatttcaatgtgttaacaaggaaatctgacatcttcaaatgaccaaaccgttcatctcttggaatgtaaaagttcaaattcagaagatcaatgtccctactctcactgttgggatctgtgaaacacacaataatcacattaaactaaaacatgaacaacagaagaaaccattgtaaattcatacatgtgtttaaaaactctagagcaaaatatacttcagaatgtaaaattgttaattatttaatagagagctcgtaaattactaacgttcaaagttaagaaagaatatttaatctcttataattcggggggcaagtgacaaagttcagtgggcaaaaatctaactaacctgtcttggttggtggtcttccagttcttcctctacgaggataagggtactcactagtccctccaagaattggtctgacatgcttttcgcccttgtctggattacccaaatcattgtagaaatcatagtcatagattctatcaccatccttacgttctcctgttccatttcctctgaggtaaaccagttcttgttctctataccagatcaatggggctggtgtttgatgaggaagatatgtctgtatataaacaccaccaagttcatcaaatttcttttctttgagtaattttatcaaacacccaataaacaaaattaaaaaactaaatacataaataggatttgtcctccctttcaactattctttgtttcaaaaattcttcttaaaccataaaaatcattgcaaattcaattatattctattgggttaaggacggttattaagagttagtctcacattatgaatttaaattgtgatatataagatgaatgggctacttcttctattgccaattggttttgagatggaaccccattcatcttattcctggtatcagagccacttgtccaaacagatactagtcccattgccaattggttttaagatggagccacattcatcttatctccaaattctaacacaggttaagctcgtgcctaggatccactaaacccgagagagatattgttaaactagattttgttttgattatcttaaaaatgttaaatactctcatactacaactatacctgttagacataattacataagaaaattgtttaaaaaatgagcagaacataactgaagggacatatatgtaacaatttttataattcggaaaaaaatatgagactaaaaaatcatatttagtaccttgttcctgaagaaaacacgatgatagttgtagtgattagcagggtaaacccaagaattacaaacaaaatgaacttggccttgatcaggaacatcttcaagagtaagagacttaagaaagaactcagtagtgtgattgttgttaatgacaaaagcctcaggaacaccaaatccttcttccaattcaaaatgaacactataagctgattccccagctaacaatggaaaaagggttagtatatttgtccaattctccaagtatgattcttttccaagcttccctttcagctcattacctaccaataaagaaaaaacacaacttttaatgtcacttctctgcaaaacaactttcacaaaatgttataaaaagaaaaacaaaacattattttgtcaaacaccctataagcatatgatcaactactactactactacatgaatagtcgattttcaataggctgaaataaattgtttcaaaatttactatgtgttccaaaagtgattgcaattgagtaaatactgtattattttgggggatttttgtttttatagtataaattagtaaaaatataatattttttaatgagaatttttttaaaaaaaattaaaaaaaatatagaaaaaaaaaaacaggtatctggttacccttttatggtaattggtatccctcttgctactcttattgattttctcatatttttcaacttttctttaattttcctatatctttatttgatttgaacaaaaataaaaagtataaaaactcataaaatttgtaatttcctcataatattaaggaatatttgcggcgaaacttccttaacatttacaattgttacatatatgaccctaattaaaaaaaaaatagcggtaaaagtactttatcttataattttattgtagtcgtatcatttttcggccatcaagtatcaacttgaaacacgtgacgacatattattggaccacttattaaataagctaaagaaatatgtcgccgcgtgttttagctgacacttaacgggcttaattgatacttaacaactaaaaaattgtaccattgcaacaaaaccgtaagataaagtacttttgccgctacttttttttattaaggtcatatgtgtaacaatcgcaaaaaaggttttgtcacaaatatccctaatatgaatcgcataaagtctttagttagcatatttagtaaatatgacaaaattaattatgtgtggtatttttaaaattttttaatacaacagtttcgcattaaaaattatttgttaatttcacttgctaattataaaaaataatttttcaaaacgaatggatcgaatcgaaacggattgtattagaaaatagattatatgtatatatatgtatgtataaatgaactaaccagtgtgagtttgaacagagctaatgagttgaagagaaactctttgacccaacaattcactcaaaggatcaataataccattcctcatgtcattgaaatccaacacatttttcttcatcaaaaccacattccctttaatcttcttattaccaccaaagattgagggaggcttcactatcccaaacatttttgcttaatttgatgatcaaaatatataaatatatatatatataaatatataaatataatggaatagagagaagaaataataaggttttgtttggtttgtgtgatcaagttagtgtgatcatgcaatgtatttatagtcaaaattttgtgcttgcaaataatttcaatagtgattattttaattattatatgtaataataatacatatgaaatgtaattcaattgtattaactagtagtatctactaataattaataacttataataagtgtgttttaaatgtgatttaattagtaggtagagtagatagatagataaaacaaaaggatgatgatgttgatgatgaatgttttttgaaataaacactcatctttgttttttcaaaatgaatattttaggaaaaataataggttgggaatgaggtgtactagatgtggcttaataaatccatacataaaatgtctctttttaatttttctttttagagttttatattcacacccaaaaaatatatataatatgattcattttagatttttattttgcataaaattgatgtatatttaatttatacttactttttttttcttataacattctataaagatgcatatgtaaaataaatttattttaaatgttaagaaagaaattatatgaaattgagtaaaaataattataaatgatttaaaaataaaaatatttaaattaagatgtaaaagagaaattaatttaagttaattttttttaatattggggtgttaatttaagatgaaattacactacatacctcttttaatttgatgtctttaatttttaccctctcttttaaaatctattatatttacttttttttttcaattattctaccaattttactcttatcactttacgataattttcattcatttttaatcaaaattttgctctaactttctcacaaacctacacatctatctacaaataatataaatatattatgtttgaaattatgctttagtcatatgagtgtgcaaggataatttgtatataatactcataaaaagaggtatttatgaattaaatttaatttagaggtaaatttggttaatgcattaaaaaaaatgagtaatcttcaacttgttccttaatttaatatgtataatttttttattttttgaaataccataaaagtctattgagaaatttacaaatttatatccaccataaaaatattaacattagctaagttaatttgttactaattcagtaagtgttaatatttggatagacacttgttctaaatttttaagtactcttactgtaataattgattttaattaatgtcaatctttctttcaaaagtatataataagtggtggccaaattctcttatcttttaatttttatacacttaattttttttgtggtaaaatcccattgagagtttacttattattacaaatttgaggcgtcagttaaatattaattgaatgacgtacacttgtatatatgtaaaactaaaattttaaagtcaatacagtaataatttaattggtatttaacggtgatatacaactgacacctcaaatttacaaaaaaaataaaaattaaacataaaaaattttgccacaaaaataaaaataaaaatattaaataaaaaaatttcactacaaccaacccacatatatatatatatatatatatattaaattaagcacaaatattacttaacaccactacgtggtgatatcttgcaaagaatttacaattctgtataataattattacaattttattaatataaatcgactaattaatcaaatagtttttaaacaagagaatacattttttatataaaattctatacttaattatataaataatactataaacatataagagggtgggttcaacatataaacatgtaagcaccaatttctctaactataatttacatatgtattaattaatgaagagtgggtgggtagatttggcggtgagtattaatttcaatgttgcattattagattaattttttattttgttttaattttttaaaaagggttgaattattggatatagaaaatctaatctaaatatattatgaaggttttttattttattttttggtattattttatgttaggtgtcacatctttgaataataaaaacaaaaaagtatagtgtcatttctcatgtcaagataatgtaaattctttctttttgctctatataacaatgacatgtaatagtgataataattaagaaataagaataattttaataattaggtttcacgtgttaatatatttattaaaaataaataaaaattatttcttatctatctacctcaggcaaatagtttattaattaataagttagagatcacatgatgatatgaattattttattgatttatgaattatggtaattttgttataatttctagtcaaataattacctaaattaacattcacagttttgaaaatttgtatcatgtaatatttatgtgtgtatttaaatacaagtgtatatatgaattgtcaataaataaatataaaaaactataattgtctatttcaaataaaaattatacatagttttataaattttaaatatttattttcatgggacttaattgttttttttttttttttgttaatagacatggcacttaattgttataaacataattttttaaggtatattgttagtatttatacataatattaggttatcgttacgtgtatattgcacgtatatttattttttatttttattatatgtatttttataattttttaaattaaaaaaaactaattaattttttaattttgtttttatttttaattgggcaatctggcaacatccatctctcacttggtgatcccatatccaggatgataaaatggagctaactaccaaaggtgatccctcgacccattaatcgtgtcttatttttttgaagtctctaacttggggattgcgactcttgacctgtctgatcatacatcactctctgggatcatagtgtggttatcttcccgcaggctctctctgagaaggcccaaagatgtaacgttgttattccaattggttctagaatgggtttacccttttgggcctccactgcgggagccacatttcatattaggaaaatgcgaacaacacaaaccaaatcgatccacttataaaccaaatcgtggcaatttaggcttctctaagaatcgagcatttccattcatcggactttaaagcttaaaaaatgtcactatcttattcatgagaaatgttaaaatatattagtagtgcctagtattacctatggtgccatatcgttattagagtaattaagtatccacataaatataattaaataactattatgaaatatcgacaaccatttacgagacgcagggctaggcccgtgcctatggcctacacgttctgagggcccaaaataaaaaataaaaggtctcattaggcttttattaagtaacataagtgtattgtaaacaataaatattcatagcttagttggttggagtgcatgacacattactcaatggtgtgggtttgagtcccataacactctattccaatatatttttttatatatttttgaaagtgaagaccccaaaatttaaatggccttaggcccatatattctcagggttggccttaacaggatgccacatctaagtagtgctaggtataacgtgttggctaagatggcacgatacaatctaagtgatgcccatgaagttgccaagtggtggtcaagtagtggcacatgctggtggcatatcaatgcttagtatgtacgacaaaggtatttttatatacctcttcaatattgtctagatttttatgggacttggtatccgccacttgggtctaagaatacaatggcacaatctgacttgaagaactctaaaaattggtatatggtgatgatcatatgtctacagaataaaaatcatgtatgttcctggtagaaggctaaaagcttagaatgctccttaaagagggagaacctggtgtcaactctccaccacccccagacacattggtgctaagtgagttactactagttagtgggactagtagaacagacatacgaggaccatgaggggacttgtatgtctccatgaattggattactcatggacattatcaggtcgatttggtagtgcgtctagagataccactaagaggttagttggtatgtttatactggcttttt

SEQ ID NO: 42829 - DNA, 1361 bp, Cannabis sativa
gcttgcaagatctgcacccaccggccgccggggtcggcgttccttgctcgccactccgccacattctctccgtatcactgtttcgactcggcttgtcggctcgttccgcatccgaagcctagccaatgtaagcggactcgattgcacagtccatgccgatatgactattcgtacgccgatgggtccaccacaaatgggttcttctcgaaagaaacgacgacgttgaggaccagctctgggaaacagaccagggtcccgggcttgtccttcggatgctcttttcgggtttcgggcccggctttctcgggcgggaactttgatggagctcaaggagtaatgggcttgggccgtgggcccatatcgttctcaacccaactaggtcgacgatttgggaataagttctcgtattgtttaatggattacactatagcacccgcacccaccagctatcttatgataggaggcgcacaaaacgacgtcatttcggaaatgagctttacacctttgctaattaaccccttatcgcctactttttactatattgggatcaagaacgtgttcgtagacgggttgaaattaccaataagcccatccgtctggtctattgacgaacttggtaacggtggcactgttattgactcgggtaccacgttgagtttcctagctgaacctgcttaccgtttggttttagcggcgtttaaacgtcgagttaagttaccgagttctgctcagccgaatctgggtttcgatctctgtgtgaacgtttcgggcgtgtcgagactgagtctgcccaaactgagtttccaactcgttgggaagtcggtagtgttctcgccacctcaaagcaactacttcattgaagcggcggacagtgtccattgcctggcgattcaacccgttgaattggactcgggattttccgtgttagggaatctaatgcaacaggggttcttcttcgagttcgacaaggacagatcgcgactcgggtttacgcgccatggatgcgcccgaccttgaaaattaaacggagctgtgactctgtcagaaactttttttttttttctttttaatcgataaatgtttttaagtaaattattttttgaacactgtgtgggttttgtttgtttagtttgaacaaagttccatattggccaggcaaaaagaataattgacgagagattatatataacaacttttccttttaatttaattaaatcattaaatagtcaaatttggcccctttttttctttaattttttacaaatctaatatatttgaagttagaatgaactaataatttctaaaaaaaattttggaacaatgaacaaaggattttttttgtcatcaaaaataaaaaagat

SEQ ID NO: 42830 - DNA, 5728 bp, Cannabis sativa
gcgcacaaagacttagcaaatgtttacaagttatctgatccacgtgtcccctctcgactggcccacgtattttgggcgaattctggagcaacaacttttattataaatatctccattagaccccttaggttaaagtaaattatatgctagacttaagtagagagtgcgtgtatattgagcaacccactcaaaaaagtggatatatattaatatataatataaaaatattttgattaataaatacaaaaaataaatatttttcaacttatctttaaatgaggataatattatattggggatatggaagataaagaaaaacaaattaatagatacaagtattattgattagtacttgagagagatttatagtgggtataattcctaatttgatcaaacttatggtattgctgcattattatttaaaaagttgaaaaatgttcaaaatttaccaagacagcatccaataagacatgcagcctgattaatctacttcttaaaaattctctatcattagcaatggtactgttctgctcaaccacacaatgatttaatattcatgaatgtatggaaaaaaaaaatacatcaaaactttagtaacacctttctcactcaacaacagttaattttttactcagagaactctgtattctaattgttccctccagaaaaaccaataaggaatcaattctctctattccgaaccccatctttatcgaaaccgacgccatagggcattttgaaagacaaataaaatataccaggaatcaagttgaatcatttttaaggtcgccaccaagtagatcatcatcataagaaaccggcatccttaacctctcatggacagacactgttttcttctcatcatttgcgggctcacttcgattcttcacttccaccatgactggcgaaccatccgaaatatttatttcggatgttgtcttgttcaaggagacatcgggaatgctttgagacgagctacctttcccttcctctgtttcttgtcttatatttggttttggttgcttgaattgcttctgcagaaggacaaagaatcttgttaagaactagtaaatgaaaacaagacaaaaattttggctgccactttcaagaaatatggtatgtgagaaaaaatttggattctaatttagatttggatgactgagtcaaatactaaagaatgtggaaacctttcgcttgatcgcgatactagaatgtttcacatggaatattcccaagtgtgctccgaatgtggtagtaaggttcaattttaaaatgattatgtttcttaaacaagaaatgccaatcgcataaagataatacaagtaatcaagcattaattttacattctttaatatgaatatgtatgtcgtcctaatatgaatatgaatattagttcactatttcagatttaacgcacctcaaactctttcgctttgttcattatctctttgtaggcttttggttctcgcgttttaaggatgctccataatatgccaccacctgttcgatatcgtctgccatcagaagtcatctgacctccacaagcctggactgcttccacctacaatattttcttatacatatcaaaaagattattccaactactttcagattgggagataaacaagtaacccgttcttctgattgataacagaaacaagatgatttcatgaaaacattccccctacatctctacaatctaattaattaaagagacatacaatcagaaatgcttctgctaaccatccttgtcataacacaaaatcatgggcatccaaattttcgaccgaatacaattcttgaactgaaaagttttcctatgtctgccttttctctacctatttattattgtctcgtgagaactagatcagtacgagttttcacagtcaaaatgtggacactggcatcctaaagagaaccaacactcgttgttaaccatgcatgtttaaaaattaaaattaagtttatttaattggctaataaaattacccgcataaaatgttagcaacatacagaaaaagcaaacgatgaagattcggccagggaacatcaaagcacatagcacaggacttgaaggagcaaaatagcttttacatctacaatagaaatctgcaagtgatgggaaacattgttgagcatcagaaattatgaatcgttgtggctactagagtggataaatattttgagctcccctgctggttcaaaatcaagaacaaccagtttctcaccttcacttagaagggctaactataccatgaatatctaaaccaaatggggaaataaagagattaaggagtagacagaaggctagggaggtcagataaaccttaaagggcaatgcagttccaagttcataatccgtctaacgggtaagaagattgatacagcaacaagaaagagtctttgacagagcatgaagaaagaagacaaagagatagattaccagtttcaagagagttctgtgaatagcaatgcaaggtatataaaatcccactaaagacaaccatttttttatagattttctatgaaaaacaatatgctatatttttacatcaattgagcatagtctacagataggactgcgaaacatgataaagacaagttgctgaaataaaccttaaacactattggtatccgatatgaatttaaaacacaatgcatgaagaagaactccatacctctttgatgagatcgcataatgcggagaccccaagacatccaactgccgtataaaccatgtacgatttcttctctttcaaacgcctacatgtatctaacacaaatctgcaaaagacagagacttattttcacaacattttccgaattgagtaactgtttgatatgaaaatcccaaaccttgtttacctgtttatatctgtgacattaggagctccacctgccctttttcgcttattcttcttcttgttagcccttcgcctgcgcgttttactctgagaatcttggttggtttcattggtttgactttgatccaaatgactgtgtgaattttgttcaacaagttctccttcttccacatcaaccatttcaacatcatcttcaaagatatcatcttcttcgtgtaaggtatctaatatgctttcaactccttccatttgttggattgaaactgcaagtattgacacaaaatttgggtcgtaggatttaagcttttaagggtttgttttgtgtgtgagtattgcttaaataccataatcattcatatgtttttctcaccaacaataaatttcactgaaacatttaatcaaacacctaaactacataaccaaaaatcaatactccacaaacaatttagttcaaacaactaactgggcatcaaaaacattcttctaaacgcaggaaaagattctaatttagagagaaaaagagcaagaaagcaatacacaaggaaattaaactacattggaactcaacaattaaaggtaaacaaaacaatagaatagaatagtatcaatataggaagaaagcaaaagaagactgagatgataataataccttggttggaaggatgagttggagttgcgaaggaaagagagagaagagtgtgtggtctgactctgtaatcttcttcttcttcttctgtatgaaatctactttttatttagggcttttaggtttatcaatgacttttattttatttgcttgcttatgtagttttctaaagtatttcattattttaaaattatatgacctaatacttacgtaattattaaattcttttttttaaaagaaaaaatacaattctaattaatacaaatccctttttaatgtattttagctaaattttaactaaaatttgagaatcattattttttattattgctctctttatttaagttagtattgtgtcgtgttcaaatttatattttttcatgctaatatgttgcgaattttcttatgataatttcaatgtccaaactcatttggtgcacaaaattaaaatgaacaattttattaaagtgtctccaactcgaagggtactctccattttttagccaaaaaactaaaatagataatcaatttcattctcttcagttgggagatagtgttgttagttgggttttttcgattttcaataaggctacacatgcctttgcgaggtggggtctgtctcacccttgcaatggtgcgttgtgtttctgggaggtaagtccccatgtgttccctaaactctttgttttggtttaataaagttttggtttttagcaaaaaaaaaaaaaaaataaataaaaaataattattattgttccaatcatatgctcaacacttaagttaagatttgattattttaatagtattttatattttgaatttattatataaatttatttaataaaattataaaaacattaaaaaaaagtttagcaagaaaagtagggagcttccttcattctctcttatagggagtcattttttgtatagttggtactcattttttaagttggggagtgtgtttaaagagcatagttggaaatattctagtatatagttatactggatgattgagtttttttagagagagaaaaatagaaatttttattagaagacaataatccattatatgataatataatataaagcataatcaacaagatagataaattatgtcatactaataggaataaaaatcctaatagcacattcaactaaaatactaataaactgccaatgttgaagcattaaaaagtacaaaaaatgctaaatctccaatcaaaatgaacatgtgacaaattacatctattaatgaccataagtcaaagatctttcaataaaaattaggtgataacaaccacattattcaatgaaggaaataaccaaacgaccaaccatgacaataacaatcgtaacatataatcgcaccacaaaccatagcaataactttcaaatctaagcttttccaatttttcattttttcaccttcaaaaaaagtacttcacattagattatttttttctccaattaattatctgctaaacttaatttgactaagtacaatttataaacaccaataaaaatgtcaaaagatttaaaaaaaccacacacgtgacttaaaatttacaaagaaattaagtctaaaagctcaaaagataactcttattcaagagttatcaatttgtcatacttttagggcttattgcatgttgtatctttcgtacttgtcgtttcgtgtcatgtttaaacacatattttttcgttcggtgtcatgccaatttgtatagtaccgtgcagtattgtgtccaaactcatatttaatcgtgtttatgcctcccgggctcatactaatttcctgacgtgtcaaagaatattcgatcatgtattaacaacacttctacatacacgattatatacattatttggaataaataagatttttccttatcaaaaaaaaaaaaaagattaaataaagttttgtctcctaaatttttttcatttgcaaaaatcctcccaaactatgcaaattgtcataattatcttatttcagttatattattctcattttttattacaaattgcttatgtggctatgagttacaagtataattgtagtacaatggcttatttaataactttaagctaactaaaatttagtattgtcattaaacatataaataatgggctattttcaaaaatatgggaaaaattattaaggttatgataaatatggcataaaaagtaaataccactaaatatggcattatctaaccaatca

SEQ ID NO: 42831 - DNA, 4830 bp, Cannabis sativa
tgcgaaaaataaaacgggaaacaaataaatgaataaaataaaaattaaaagaaaaaggtgttaacaatacactatttttctttttaaatcaggatagagaaaggacagttccaagcttcgtaacaagctacaacagtagactgtcagaaagtgaatcaaacctgaagtacagatatgaacacttcctcttagcctaactttagaaatgtagctctttttataaagataaagaaattatggtctagacagcacaaagagaatacatatttcaagctaaccaggaatgatgaagcctaatttcttgtaataaaggttaaattaataatataaggtgtggccacattcatcataaaatactcaaaactccactactgctatattataaataagctaacttgatcaaaaacaatgtaaataatatctcaatgaccaactgatatgtgatggtgcctcaggacaatgtggaaaactaggatcttaacttcattattgctgtgctagtttagatagcatttgctttttctggtcataaaacaatgaagatgcaatgcattttacattttacatctgtcaaattaaaataatgtaatttaagaaaaatgtattagacaaacaaactgcaaaaataacaagagacacttcaaataataataccatatccagaagcttctggagcgatcttctgcaaataaatcagagggtcctcaaactcctcttttgttggataatatataggacactcaggaattttttcagtccattccagatcacttgtgtcaaacttatccaccttccgcttcgaaataacatccttcccacttaaaggaccatttgatccagaaaaaacatctgcattgccatgtaatctaacaccgcaagatgctgaagatcttaatgcatctcctccacttcgagccattgtactgctgatagtttctgccttcatacgctgaagccttttgcgcttcagaaactccaacccatttctgacctcctttgataaacaaacccttccctccacctgtcaaacaagtttacatgggacaatcagtacataaagataaaaacatgaaacattatacacatgcaaatctaacattgagtataaatagacaaataagaaatgatattacaaaacccttacctatttcaaaatattacttaattcaaaaaattaataataataaatcaagaaaccaatgacatgaatagacccatctccatgccaattgaaaaaaaaaagagcgtaagaaggcttctataaaaataaacagattgcagttatatctaagcgcttccttttccgcttgaagaccttagatccttaggctgtctttgtacgggaataattttcaccttctactttataacatgaattacgaaggccacgcacaattacaaatgtccatggtgaaagaagataatctaccataaacaaccacagcaccaccaacacaaatcaaatcaataccaaagctccctagagcaaacgggacccaaaaaaaatttataattgcggggtaaaataatttacaacagaaagtgtcggttttatccaattttcaataaagcatagagaaataaatcttcagcttaaaaaataaacatataataatcataaaaataagggaaaaaattaatcaagctcagccgtattcaacaaaaacatgcagtcaaacttaaaaggagtcttcgtcaaaattattactactcaaattccgaggctacaatagcctggatttattaaagcgaagatcaggaaataaaattagttactttgtttggatccttttcacatataatcaaatattaaacttatccaaataaattcaaatatttcctaaacagaaccaattgcaggcctaaacctataaacattttataaaatgcatatttcagaagttcctcccgatagtaatcacggattcccagaatgaaatcgacgaaataataagacgataatatattagacctatcaaaatagggaacaaccggatatgtacgcatacacaagtatatgtgtgcgctcccgcataatattaggaattaaaatgtattaaaaaataaacaaaagcaatgtatatgaaccaagaccatgaaactaaatcctgatgaaaacaaagacgaaaagaaaattaagaaacaaatagttataaaaacagaaaaggatgaaagacctaccatctcattccgaagtcgccttcctgacgactccgtctttgctaactttgccggaaaatagagcgaggaaaaaaaataaacgaaaaagaacaaggtagaagaaaccgaatccgaatccagaacaccaaaccctagatcacgatcccaaccacgagcgagactccaacggagactaggctccccacattctcacaaaacgccgaaaccaccaaagaaaggactcagcctcagagatccggagctttctcccacaaaccctacagaaccaacgagaaacacgggagccaaccgaatatatggagccagcacttctccggcagagccagatgcgcttcgccggtgatagagcagtttgccgggggaaggaagaggttttccggcaaggagatgagagaggaaaaaaataaaaataaaaaaggagggagagaacagtagaaagggaaggagagagaatgaaggcttagaaaaccgaaaaagggtatatgagaggataatttatagttttatagttaatttaatatatttctattaaatgtatttttaaattttaactgctttttccactttttgtgtcaaagaaattaatttattaattgtttaatcgaaatagaaggtatgtaaaaagaagtggttgttgttaggtggttcaaccaaacgattgccggccaaaaccgcgtttctctctttcctatcgcgtttcgctggttttggaagtttacccgttactaaatgactaacttaccctgaggagaattgaaaaatccttttgtcttacgcaagggtattatagtccattaattataacgatgtttcctaagagttccgtttccactttcctgttttggggtcagagaaaaaataagagaaggtgtcaggaaaagatggaattattcacgtgcgttaaatcgcatcattttgcatctgcgagtgtcgaatcgcaccgtccacgtggaggccttcttggatcaaaacggtctacagaaagcaaagaacccgatccgaaaatcagcctccgcgtctatattcgtaattgaaactgatgacttgcacaggattattcctacctactcacagttagttacgcctattcactggaatgacgatattaaaccttaaatcgttacaccttttacataatgtgcaagggcagtatcgcctttcaataaatttccatatgcgaggcactactaaaaactaaaaagtcacttcctacaatgtaagcgaaccaactactctcgtgagtcgtggtaaagtccaaacgacaagtaggagtagaaggagaaaacacgtggcgacgtatcaatgagctacgagtacacgtggctgtggatgaagctgcggcgtctgggaagttgtgtgttactgtgggtggtgccagagtcgaaatagctggcggttacagcaggtattaccctcccatatgaccggctccagccttttcccttttctccaatctccacttcatttcacgaacctctaatagtactaatataattaaatttttaaaaaacaaatttttctgaaaaaatcaccgtggttctcggtatccagtaagctagcttcggcttcttatccctctaataaatgctataatgtattaaagtttctctctcttaatcttattggttagtttcagccctttgcttttgttacgcggaggttggcctaatcattagttttctacagtcagcgaagacgaagctatagaattttttttttaagaaaataacatttctattgtttagacatctgtacgtaaggagtcgttggcggcttggctggtgcagaccgagtcaacgattcacactagtcttcagcttagaagctcggctggcttactttagccggcttagtttttcttcggtcgtttacttttcttgaacgaaaatattttggccgaatttcttgacaagaaatgacaaaagatgccttttctgaaaaaaattaaaaatgagtgtttctttcttttcttttcttttcttttttccctcgaagtaacttcggcaataaatgatcctatcccatcacggaatttactcaatcaaactgtaccatacgaagcctagcctacccacgcgcgtacgataattgtatgcactcgctggcttttggtttggaatttggacaatttgttagggtgatgagggtacttttggaatttcactggggttcctgagagaaaaagtagagtttgagggttttgttcgggagacgaagtgaagggagagcaagattgtcttctggaaagttctccaattgacgaaaatgccttaagctatagaaaatcacgtaaatgccttttgccgttttgatgagcgtatgtaacatttcgtagtacaaggcatatctttctttggaccaggaaataaatttggtattattttttactttctgcggttggttgttattttctaaaagtaatggtgtcatttggtaatacttttttaatctgttttctgttttttaaaattaaaaaagtaaaaatatttctcaaaaatatgttttataaatttgatgagagtatgtaacatgttcgtagtacaaagcatatctttctttggaccaggaaataaacttggtattattttttactttttgtgtttggttgatgatttctaaaaataatgtaacacttttttaatcagtttt

SEQ ID NO: 42832 - DNA, 2663 bp, Cannabis sativa
cacccttataatcaatgatcgtttcatagctccgttaattaacagagtagaatatcgataattattgaccaagtccaaattcattcgttgtatacctactcaatatagcatctgcatgttctttaaccactttccaagccgttgccacgtggcactcctccgtcagactagcaccaactgcgaaccggatcaagtatataccatctacaaccgaatgggtcaaatagatccgacccgacccgttaatagaatccatcagcttcgtattaatctcgttgatggtcaacgctttttcagcgccgctgttcctcctcgccgtcgttccgttaatctcggaaagtacggactttgtagttatagccttgggagatattctgaaacaaacgttagcaaagtatctaggaacgacaatctcaaacctgtcgtcggagacaacattggcttcgaacatcttcgccattttcacgtggcttcggagaaacccacgtagcttttccacaccgtaagatcggagaaccatccacagtttcagggaacggaatcttctgctgagagctaactgccaatctttgtagtcaacgacttgctttgactcggtggctttgttcttcagatactcaggatcggtggtcaacgatttggtcaacgcactggggtctttgacccaaaggcaacagcaatccaaggtggtgaagaaccatttgtgagcattgaagctgaatgagttagctccttcgactccgtcgatgaaatgacggaactcagggcatatgcagatactacctgcatatgccgcgtctacgtggacccacattccgtaatcctttgcaacgttgcaaagcggtccaagtgggtccactgcagtagttgaggttgttccgatagtagctagaaggaagatggggacgagcccatcttccatgtcagctactatcgttttacgtaaaacctcgggtgacatagaaaaggcagaggacaacgttgttggtatgatgcgaaagttgttcatgttgatcccagcaatctgagcagctttcttgaaagcgcaatgagtttggtcagaacaataaacggaaagttttccgatattctctttcccaatcttattcagtgtcctatcacgagcagccacgagggtacacaagatagcctcgcaggtggttccttgcaagactccaccgccatttcccgagaagagaaatgacttaggaagtcttaacatatcaccaagccaatccatgacgatactctccagctcagtagcagctggagaggacatccagttaaaaccaacaacattaaatccagtggctagcatttcgccgagaaagccagcaatgctgccactggatggaaagtaggcgtagtagttaggactttgccagtgagttatgccagggacaatatggtcttttacgtcactcatgatagtctcaatagactcaggataataaggtgcagatttagggagtcttttcttgagataaccgggttcaacttggctcaaaacggggtatttctcaatgtttttgtagtaatcagctatgaaatcgatcatcatgtggccttggcgcctgaactcttcagggtccattgggttagtcatgtcatttgaggaagagatggtgttgttcatttggtaatcgaagtcgcctaggcttcccatactaaaaataagtggagttgtttggtgagataaaatgaaaaaaatgaataaatgaaataaacaaagagaaagagagagagaaaaggttaggtgggttgttgttggcttttttgtgaaagaataataaaagagtgaaagagatagagagaacaagattggttgtatttgtctttctcttgatcttttagatttgagagaaaagactatatattgatattgttctctctttctttttttctttttggatgaggaaaatgggttgaggatatagagtatatatatatgtggcgtagtgggatttttgggggtaggcaggaattggaaatttcatgagagtccttgttttacgcgtggtgagttttgggacttataatgggatatgaacaggtgtataagttgacataattgaacacggacacaaattcagaaatattatattaataataatattactaaaccatttttttaatacctattaatgatcatcacctaccatagtttatatatacatgtgactttgaagtcaaaaaaaaaactaagggtgacatcatgcatggagtttaacttatatatgtaaatatatataaaaacagaattatggtatatatgcaatttaagttatgcatccacaacaaaaattggcaaaagtaaaacacttgagtccaaactaaactacttggtccaacccaatagcaataacaaaaacaccctaagtttgagttaccacttagattattctcaatgagggttaattatgaaaattataatgtcctacttgtttaagcgcgctacaatattttcaaaattactgtatcaacatttactaatcaaaaggctttaaggaaaaaaatgtgatttatttaaacttttaaaaataaaatattttgactttaataaacatatttattacaatttttgggaacctgtatttaaactttttaaaaacataatatgcaaaaggtgtcgctcaacaattacaaaatataagtctatgtcg

SEQ ID NO: 42833 - DNA, 5947 bp, Cannabis sativa
  modified_base (5577)..(5582): a, c, t, g, unknown or other
taaaatagtatttaccctatattttttgttgtatgataaataaattttattgtatagtataacattttattttaaatcatgcatgcttagtttgtatttattatatataaaggtgatatgtaatattgtaggtatgatataattactttatggttctatataattttgttaatatggcatatacaactttttaataatgttatattattttgttatatttttatatggatatatatgttttttttttttttaacaaagatgggtatatatgttttgttataggatatatgatgcttgttgtatatagtaaatcatttatttaagatggtatttattttttattttattatatatactgattatacataaattttttgatataatatacatattttaatagtgatatgtataattttattagcatgatatatatattttttaagtattaatttagtattattataatttttttgtgatatacaattttattattacagtatattaatttttaacaatacgatacattaactactcttgtatatatttaattctaatatatttatttatttttattacaatctaatactaaaaaagtttatataacttaaattgataaaaaattaatatgtagtaaatatatttttgataatttttattaattaatttattatattttatcgttttgttaattttttttttttacaaaaataaacatttattaactaaatttttaaatttaaaattgcatctcaacacagccctttttattatgtataataaatgaaacttggctttcgatttttttttttttttttgattactatggagaagccggattacttgtcccagcagactcccaattttgtccatatctcgccatctgatttgtattttattaccaattcactgacttttctaatggtttgactttgccgtttattgactaaaagattaaaaactagggacgagcaaggacagcttttaacgagaccaaaatctctagagacatatagatcttatatttcaattggtaataaccaatcagatcaacacactctatttaacgaggttttacacatatttattgcattacttatttaacgataaaattggatcaaatgtgatcgaaggataagttagaagatattattaataagtacgatgtaaaagaagataattattctattaaataagagaaataaataattgacttgttaagacaatcattttgactgagcaaaaacacttttggctggttcttcatgaaaccgtacgttaatcaacgctctttttattgcccaacttggttgaaatttctacgaaggatgcctacgaaaataagagcactacattagactcgggccctcctattttgtcatgaacacgtgcacgtgtatataaagacagcctccttacaaagcaaagcaaaatctcatctcggttattttcattttagtttataacattctcttttttgtttatgttaagtttttttctgcaagaaaacgatccaaccaattgttaaactgattgctagtgatattgattagataccatacggttcattttcttgcaaaagttgtacgaatctacaaagggcgttgttttattgtttatatgaatttatacattacttgttaaaaaagcgccaaaaatgaagttcgggaaggaatttacgagccaaatggtgccggaatggcaagaagcatacatggactataattttctgaaaaccattttgaaagatatccaaaatatgagacagaaaaacaagccaccgccagcagcgatggggcttaatcggaggccaaccctttacagagcctttagtggtctgatgaacagacagttcagcacgcgccggtactcgccaacgtcgagcaccatcccgggaaacgacattgaaagtcaagccattctggttaactcaaccagagaagatggctcccatggttaccatacaacgtttctcatggcatcagaggaaggaggagagtacgagctggtatacttccggaggctggacgaggagtttaacaaggtggacaagttttataagtctaaagtggaggaggtgatgaaggaagcttctatgctcaacaagcaaatggatgctttgatagctttccgaattaaagttgagaatccccccggcttgttcgacagatctgtggagatgactcgtctggcttctgatattgcttcttcggctgcagttttggcagccaccactcctagaaacattcgagctagtagtaagtttgaatattgttatgacatgatatcatatatagccagcaaacactagttatttatagtttaattatgataattgatttatcccccctttttttgttgttgtggtgtaacaggaaaagttaatgtcatggatgcaatcgaagaggcaggatcaaacaaccttcaggagccttctgaagaaaatagtggagacgatgaaaaagatgagaaagagaagaggagtgcaaacattgtgaaccaaagagttgaagctcagacaccaaggaatgttaggagaactagaccagctccgttggaaattctagatcatgtgacaatgaatcaaacgcaggagactcctcgttccaccattaaaggcgttctcaaggttcctaagcagacagagctgaccttcaacagggaaaatcttagaaaagttgaagaacaacttaagaaagctttcgttgagttttaccagaagcttagacttctaaagagttttaggtaataaaaagagataactttagtactttactttgctggattgtgttagtgtcttctcttttagcagagaggctaacttgttttactatgaactttctcagcttcttgaataccttggcattctcaaagatcatgaagaagtatgataaggtaatttgctatatcaagaataatatacatttcttttgaacctaaaaatgtgttcacttttgcagcaataactttacttatattttgaattgtctctcacttttgcagattacttcaagagatgcatcaaaatcttacatgaaaacggtggaccagtcataccttggcagttctgatgaggtgagaattaatagactgtattaagtcacagagctagtgtcaagcttaaactatgtagctgcaatttgttctttagttttatcatattatctaatactaataatacttttgtgtacaggttaccaagcttatggagagggtagaagctacatatatcaagcatttctccaatgcaaaccgcagtaaagggatgtccatcttaaggccaaaagcgaaaagagaaacgcacagaatatcatttacgactggtaagacttcaatactgttgtttattttcagttacactttactttctttgtatacatatactgactatattttaatggacaattctttcaggtttcttttttggctgcacagttgctctcatattagcccttattttgatcattcgtactcgaaaaatcatggaccagccagggagagctcagtacatggaaatcatgtttcccttatacatgtaagtttatctcgtggattaattttttattttctttcttcaagtaaccaaaaatctattcatttcttaattattgaaatctttttttactgcaggttctttgcgtttattgtgttgcacatggttatgtatgctgggaatgtgttcttttggaggaaatacagagttaactaccccttcatttttgggttcaaaccaggaacagaattaggctacagagatgttatgcttccagccttcgttttatctgctttagcactcggctgtgttctttcaaatcttgacatgcaaatggacccaagaactctagattacaaagctctaactgagcttctcccacttctgttgcttgtggtaagcactaatttctttacagctctactaaatcatataaataaaaatgatggttttgaaaaactagatttttttttctgcaggttgttactgtgattatgatatgccctttgaacattgtctatcgctcaagtcgatactttttcctcacctgcttgttccacggactccttgctcctctctacaaggtaggaataatatttactgtataattttttttttctctaagacttacaaagagaattactaaatatgtgtaacctttgctatattattacaggtaacactcccagatttcttcttggctgatcagttaacgagccaagttcaagctttgagaagtatccaattttacatttgctactacggttggggtgactacaaacacagagaaacaacttgcaaagacaacagtgtatacaaaatttttctttttcttgttgctgctgtcccatacatgtctcgcctgcttcaggtaaacttgctctttctcttttctttaatttctcacttaattttttttttttattattatgaaattatactgaacattagcaatttatttattttcttcagtgccttcgtcgtttgtacgaagagaaggacccaatgcaaggttacaatggtattaaatacttcttgacaatcgtggctgtaagtgtcagaacagctcttagtctcaaccaggcatctgttagttggaaagttgctgcttgggtattctcagtcttggcggccattgtttcaacttactgggacttggtcttcgactggggccttcttcagcgtaactctaagaatcgatggttgagagacaagcttttggtcccacacaacagtgtatattttgtagctattgtaagttaaattaaactaaatacagtagtttttaaatattttaatcctaaaaattcattttttaactgttactgaacgatgttacgtacatatttgattgttgcagggcatgaatgtcttgcttagatttgcttggctgcaaactgtgctcaatttcaaagtcaatttcttgcatagacaaaccttaatagccattgttgctttgctggagatcgtccgtcgtggcatttggaatttctttaggtaattaacaagaactcacacatataaaaaaatattgttgtagaaagagtaactgagtttgtcatttattaacatatataaaattagacactttagtaaatgggttttgtgttatatatcaggttggagaatgagcatttgaacaacgtgggcaagtacagggcattcaaatctgtaccattaccattcaactatgatgaagacgaggacaaagatgagtagagcgttccacaagtccggcaaggatcgagactaacgcaattcaaatcatctacttgtctgcgactacaaatgggtcctcaagattttgtctacactttccattgtaccattccaatgtatttcttttagactggagtccaactccgattatccaactactattctttcattatttttcccacctgtccttagttaggaaatttcaaattcttgaatttacattacactctttattggaaaaaaaaaaaaaaaaaagaaaaaagggttccattaaactcaggttggccactcagttaaaatgggttatcggcaaatttttttttttttttgagcttttactataaaagataaataatatttttaaaaannnnnnaaaaaatatgtatatttttaaaaaagtgttttctctatttagtctcctaaaatgagtaggtcataggcgcggccttagcccgcctatacgtagggccggcccaaattacacttttattcattaaagtaggaaaatttacatggtacactaacttttaccttttttttacaaaaatattgtcaggcggtattttttactttttttctatgtatttttataaattttatactgtagtatagtatgtttattcttttatttgttttagtgttgttttacggttatttttcataatttatttttttaacgtcgatttcagtgttcttgctccatcttgttggaaataatgattattttctaggtgttct

SEQ ID NO: 42834 - DNA, 4849 bp, Cannabis sativa
aattgatcaaaattttcagttggacatgacatgccccaaaacaaagccattgccactcacaaggcatcattaagtccatgttttatccatgaagccaaaactcattaagcatgaagcaataattagctttaccttggttacagtctcgagaaacatgccagggcgaactggaagcggctttcttcccgacacactcgcctggtaataagtcattcgagtcaataagaataataaccataattaagtatgtctaacaaattttacattttaattgatacattacaatacaggagttctcagactcacccttcccctgagtccacctgaaaactgcccattagttgtatgttcctcatcagagccagcagtctcagcaccttcgtcttttccttgcatcacattttttatcatctcctgaacagctctccctggttttaaagcaaccaattttgttaagaagttcacctgcatggaaaatagctttaatcatgggaataccataatagccagagtcataatgccttacaggccaaaaacccaactaggtaatgttaggaaatgctttaaaggccttaagatgcaaaagtacatacctctgcttctggaagagtacttaaaccgcggtcatttctctcgtctaatatgccccctcccatcatattccgagcttcctctctaattaaaactagtcttgcaagcaattttcgatccggaacaaaaggtcgtgtttccattgtcttcaaaagaattgatgaacttggaatcaatacaggagaaagtaaacaatcccgcaaacacacacccacaccaacaacaaaaaatactgtagggagaaaggggaacactcaatcttaatgcccggaccaagaacttcaacaacagtgtcaattgcagctatgtcaaaacctctatcttctatcctattgtaggcccgcataatatgatttaatggaacacacaataaggaaacaaagggaatctgctctatcccaaccacactaagttctataaagatctataatgctttaaaattatcatgaatgacaaatatagcaactgtccagcacttggccaaagaatccaaatttctccaatttctactcatatatgttgacagtatttgcttcactaacttctgtaagtaaattttgctataatgtcacaacaaaatttctggccatcaggattattcctatgatttagtatatttgaattattcaatacaatgtgcagtataatgtgaagcaggtgttttattagtaattacctccagtaagtcatcagcttgattagcaatttcattcagatttgcagcaggaatatgaactttagttccatttttactcttaaacacaccaccgccagcagctactcttcgtaataattcctgtctgctctctttctgaggagttctacacagcagtcctactacttgaacctacaaaaaaaagaagtaatagtttcattataactgatgaatttaattgaccataactgctgacaacatatcaccatattaaagggaaggaaacatgaaattcgttccaagtaatagttcttacttgcgggggagacttttttgttagatgggataatactgtctcctttatcacttccagtagtgacttgcgctgaccaaaacagatcaagaaccagataaataagctaacatcataaatttctacatcatttagtcattctagtggtaataaaccaaaagttgtgtactccaaaaacatcattaccaacaagaagcgtaaatcactacaaaaacttgtgcatatacctgtcctttccaacctccaccaacccaaaactaacaaccaaacaaaaacatgtgcaatctagaaaccatagaaatgcaagagcgaataagagcacttaaaacaataggtatcaatcaagaaaagctgacttaaaattctagaggtcattgtgtttgtgttagaatcagaatatcctagccaaaaaataagttccatattacggaaaacagaaagatgcaacatagaaagctgaaatagaaccttatcatcttggtcattttcagcaagttggatcatgtagtccaaagccatcataaaaccagattccatctcatcaactctctttcctatgaccccttgtgcagccagctccacagccacctcttcagatgcctcgtccatgttcatatcttccaactgtagtcgcgcacatacacacacaagcaagcatacaaactaaatttattgcagtaaaaaatacaaatcagattcattaaattcttaataatattaatggtgactggaaatgaagctattatataattattatatcagttgcatatatatacagcttgtagctagagtacacaataactaacctatccaacttgtataaaaggagaataagtgagagagtgacaacaataatatctactaacaataagcaccaaatgtggggacattcggtcaagtgattgactcggatgtatctcttgttagcatacatagttagttagctgttaatgttatctgtcttaggtagcttgagggtaacttggtagagttttttttgcttaactttaaataaataaaggctttgctgctcaacaatttctatggtgttgagcctttcccttattcattttcaccatctcttaattattaacatctctatcacaatgttccaatgcaccagaccagctcaaaaagagcatcaaagtccagctaaaatgaaatcagaaatgtaataactaaatttcatagaatgttactcagccaattgaaccaaccgtgcacaattataagaggtcactcacaccagataaaacagaaactgatggcgttaattggcatacttataattgtttgaataatcttaaaacacaatgggcaatcaaaaaaattgtttgattaatcatatatagaattgataaaacacaaaacacaatctttccatagtacaactttcttccattatcaaggaattaaaaaaaagatagaaactttaagtgaatgaaataataaaaacaagagagagagagagagagagagagagagagagagctcacaaggataatcatctcttcgagaacagaagtgacttgttctccacctttgagcagagcttcacactctgaggggtcaaatttcttagtcccacgatctcgggggaccttacctctgtcttgcggatctaattcttcatctgggtaacctcctccgacttcataagtggcggcagaggccacaaacggtgccttcttcttcaattgtttcggtcgccattgtaggcgtaggtagcgctgcttgtggtgggggtgcgttgaaattgaagagcagtagaagggtaatgggaacagagttggataagaagtggggttgtagagagatggtggaactgagtaggaaattgtggggaagacgatggtggtgatctgcaacatttccgggtggcttcaattttcggggttttggatgggttttgtgtcaccggtagatgaaacagatggggttttgttacttttgtttgtagtttgtacaccaaaatgatgaaacggtgtgtcgtttaaaatttgaaaaattatgaaaggtgtaatagtaacactttttctaatcactcttatattttttaaattaaaaaattaaaaaaaaattaaaatcatatgtacatttttattttttaataatttttttattagaaaaacttttttaatgtgattattgttagtattttttataaattctagtatttattgatgcttattttatttatttatagtgaaaataaaatatttatttcctcattatagttttggttgtgtgcagtgaagacactattgccccttcaagattttagagaaaggatagtgtgttttttttaaaatttgcatgatgttgatgttgacaatggattgcagtatgctaccaagattttacaattatgattgcttttctatcagagtcccctactcaaatgattatgtgatcattattagaagtttttacaagtttgttatccagatttccatgagtgtccctaatctgtgttgctcatagattagttgcgcatgctctttgaatggataaacaacttgtttggctagatatgaatattcttattttcattggatttttagttttatagtgattaatgtaagcgcgaccattttttatcacgacctcaaatatgctatggattcatggtgagaaacactgaaggtggcctaatctctgctgctgctggttgtaagttgggcaaagttttgccagagttggctaagataatgggcatcagggaagctatgagttggtttaagacgcataactaccactaggcagtgattgaatctgacaacctggtttgtgtggaggccattcgaagctctgaagtctttaattctgcattcggtttggtggtggatgggtgtaggaatatttttaaaaatgtgacttatgtatcattggcatttgttaaccgttctgcgaatcgagccgcgcattatattgcccggaattctcgtatcttatctaaacgtatattttctattgattgtgtacctttggagttgatgttaattcttacgagtgactgctcgatttaataaagcatactcctttcgaaaaaaaatctacgatctcacaaattttctctctctccttcattttattcacttttgactccacattctgtcaagctccctttcaaactactctattaaacgtgctctaagattaactacaatgcttaaaattagtgtagtgcttggcatgtagtgtcagatgaagagctaccttttaaagtagagcataaaatctagaaaaccgaaaaaacttgttgtgaaaaattatatacgcaagtatac

SEQ ID NO: 42835 - DNA, 1178 bp, Cannabis sativa
taacaatttgtatcagcttttttagttagttgcttaaattgatgtgttttaattgaatacaagaatgtgacagcagtaagaagattaccgttacatatagatgtaactgagatatttaatataaagcataatttacgacacatttatatatatgctcagaatcatctgcaatatattatgtctaggcaattttattattagatcaatataatgatggaagaatatgtatccatatatagtttaatttaacattgatagctacatctgcaagcaaaaactccagtaggggcaccttttagtgcttcacagattgacttgctttgagggaaattctcagtacattcttgtttgcatcttttgtcaaaccctgcatgcttgcatgtgtaatcactcaggacaacgttgcatagttctcccatcaccaccttattaccttcacccacaaaatcataatattatatatcatcattaatgcataataatctatgagactttgaaacccgttagggttttcgatttttcacaagatgattagaagaaaagaaaaatataagagagatattatatatatatatattcttacttgaagcaataagaataaggatggcgattaagagaaagttgcatagacgaagagacttgcccatatctataacttacggtgctctgatcactgacaagatatatagattagattctcacttctctattatctttttttgtagttgtgttggttcttcattgatatggaacctttatatagggctgtagctaaggtttagtggtttcttttactttttgtaacctttatttttttattattttcttctttaaacatggtaacatcaatgttaaaattggtaattttaatcctaatatagctttgtttatgttaaatgtcaaattttgtcatggaaggcaggttttaatttttttttttacaataattaagtactaattctacttgttatttctagcaagaatattctttgagaatattcttataataagctttttattaaatttatataaatataaaatatttatctaattaattttaaagaagtttacttattctaaacatgtcattttttagggagaaaatttagggtgggtttggaaagccacaatgtaattagatttgtgtgtaattggaggtaattacacaatttggcatg

SEQ ID NO: 42836 - DNA, 3655 bp, Cannabis sativa
  modified_base (126)..(126): a, c, t, g, unknown or other
  modified_base (204)..(206): a, c, t, g, unknown or other
actattatactttgtaatagtaattaaaaaaaaatattattcgccctaaatttatcttcggaattaatgaaaatgctcatgatagttattattgatgctaaccctttacgtggcaacatctaatantttgttatttttttttatttaaaaaaaaagtcacacaataatttctaataaattaagaattctgttatatagccacannntatatagaatagatatatatatgtcgattattaataagattttttgctctaaattattattgatgtaatataatttattcaatctgctaaaatttgtcccttaatttattccaaatctttcaaagtggtgttatatatgttttatcacaaaatcaatcaaaatgttgactttatttatttattttgattattgtcacattaacgtcatataatttaaaataaaaataataattaaaattaaaaatatgtattttaaaaaaattataaactaaaaactaattaataaataaaaataaaaaattatgtcaaactaatattaaatagtacgtagtacttttaaattattatttcaaattatacatgtgtaacaatgaaccaaatagttatgtcaacattttggtaatcatatgtgacaaaacataatagaaaaattactttatattaatactttaaatagtttgacaactttttttaacgaaagaaagcaaaataatacatatgtcataattttataaaataaaaatcctaaatagaatgcctcacctcaataccacaacattttgtgccaaaaataaataaatatatgtagaatactaaatttatataccatatcatattatataaatatatattttatagttttttactataaatattttatagttataccctagcagcttatttaatcaaatttataaacatgtttgtattgaattttgaaagggagcttgctgttgctattaattgtttagttgagaaataaatattgttaacttccaaccacaaaataaattaaattataagattgagagtagataaatatttaatttcatcattaattgtgaaagtgacaaccttaaatccagaaacctaaaaaaggaaattctgcttttaaaaagtgaatttaattatatcaaaatgagtataaaaatcttcatgaattgatttttcttcttttttcttattatgttacaacattaaaatcagacgaggactcatcacaattatatcaactctcagtttaattaattgatttaacaagtaatttataaaaagaaataaataaatattttaatcataactacaaaatgtaccttaattctgagtcaagacaaatagttgttctctttaaaacgtttatgttattgttcaagattgtataagcagactatcagtctctgtcgtcctccagaaaatacataaagataataacgggaagaaagtcgtttttgatgataggaacattaaaacaataatttaacaaataaattatctcgaaaaaataaggtgcaacccacaacagccaactcggggtcggacggacggacgtcgacggtgcatggtgtgaactatgttaattaatgcatcagggtaccaacactaaacagaaatgtcggttattatagtcttcatcaaataattaattaaataaagaccccacacgtatacatattgagagattactcactgtgaaatatataaatatatatatatatatatataatagttttagtgaaaaggaaaagaagacctatcaaaaattataacaaagaaatatgtggcaattgaagatagcaaatgaggatggaattagtgagaacaaatacttaaacagcacaaacaattttgtagggaggcagatatgggagtaccgtgctgatgctggtactcccgaagatcgagcggctgtggaagccgctcgtcttaatttctacaaccatcggtttcaagtcaagcctagcagtgacctcctttggcgaatgcaggtctaattattcacttttatttattttacttaggaatttcaataattataatacaacatttttattatatttatacagtttttgaaagagaaaaacttcaaacaaagaattggtggtattaaaattgaagataatgagaggatctcatatgaaaaggcaacgattacattgaagagagctgtgcattttgtttctgctttgcaagctagtgatggacattggccagctgagaatactggcatattattcttccttcctccattggtaatattattatatctataataaatattttttgttatgattttataaatatataatataaactatatgataattaactttttcatatttatgtaggttatgtgtctttatattacgggtcatcttaataccatatttagcgatgagcatcacaaagaaatgcttcgttacatgtactatcatcaggtacattataaatactaaagagataaggataactccgaaactaattaaaccttagatagcaacaaaattattggatcattttcaaaaaaatatatatcatttttattttatttttttggtttttggatccctaagctgggtgggccgaggcctagctcggcttagctcaagttcagtcccaatttctatgagttaacaaaagcttaatatatatgtaagaatttttctgtattcaattaattaatttgtacagaacaaagatggtggatggggattacacatagagggccatagcaccatgttttgcacaactcttaattacatttgtatgagaattcttggagaagggccagatggaggacaagacaatgcttgtgcaagagcaagacaatggattcttgaccatgggggtgtaacatatataccctcttggggaaagacttggctttcggtattatatattctcttaatattaaaatatagtaatttacgatgtaaatacataaatttaacttgtagtttcactgttgctgataaatacttaagtttaatttttgatggtaatataacatgagttataatttttgaacttcagtaggtatctaaccgttaaatgtatgtcaatggtcacatgacagtcttgattggtccaggtcattaaatttttatttttcatttaaaaatttgtttaaatataccaataaaaaaataacacgttcacattgacttgacacttaacggtcaggtacctacagaagttctaaaaatataacttaagcattgtaagggtaaaatttacaattagatcttagcccaacttaatgatcccataaaccgtggatgaaaaatattaggttatctatacaagtcactcctttcgtcgtgagctgcacaagaggacccaatagcccaaattctagaataggccttagcaaaattgcaatatatgtggtttgtacaaccgattcccaattatgggttgtacaacccacaacaattctttaaacatatttagacctacaatacgatccaaagatggtaagcctaaatacatcaattcttttttaaatatataatgattgtggtagcccatgaagtaagttggacaacccattaagaccaagatttagcctcataatagtcatgcacacgagagcagtggactacactactccaacatggttactgtaatgtccccgcttcaagcctccattaggtccttacacccacgga

SEQ ID NO: 42837 - DNA, 1963 bp, Cannabis sativa
aaggtgctggacaccaatggtgtccaatagcaatactcataaaaatagtgtgtagcaccacctaaaagtgtgtcttagaaatagttaacaatattctgtaatagttattatatgaattataaggaatctaaaatttaattacaccaataacaatttaacatctttaaattatggtagacacactaatatcttttaacatttatgacattgttcaacaaaattaaattgatttgtataaaattgaaaattttgttatttaagttgatattttcaaatttaaaattaaaacaacaataattccctttgaacaatgaaaaggctaaagatatcaattgtagtctattaattaattattaatatttataaacaagtccctatcgaaacgacacttggcaaagtataaaaggctcacccaacaaaaatttaattttttatttattattttcgttgaaaccaataaaacggtgccgtatctccctacaaatgggagaacacattctccgataaattcaccgaaacctccgccgatcgccggcggaatctgcccggtgagggttccggcgacgttattgacttgctgctgaaattaagtcacatcattgttatttatataggtttcggaagaaatggcgtcggaagatgcggtgactaagacgacgagtgagtctgccgtcaccaccatcgttaacctagccgaagaggcaaagcacgctagcgaaggagtcaaggctcctagccatgcttttattagcgttggaaagtctctcatcgctggaggtgtcgctggtggagtgtgagttctttgttaatcttttgtgttgttcttagttttctttaatcttgtttttgattttgaatttttgattatttagtttttctgaagtttttatgtttgtaaattctactgtttgattgctttttgagaattttaatttttggtaaatggtttaggttttgattcaaaggttcgttttttgatttagcaatttggattattcgagtaaaaactaaactatattttaaacatgaggaatatgaatttttgatgaataaaattagggtgaattgtgtggctttctgcattttttgcaaatttttaacttgatcagtcattatttttcatctgggatactttgaagaatattaaaaaaaattcttagctaattaatgcgaccataatagttgttttgcaaatatcaaaccattcaaattcaatgtagttattttgtcaatttaacattttcattttgttaatttggcgaaaatattttcgggtatttgttaatcaaagttgcaatttatgtttgtatcgtattacttaggtctgtgaatttaagggtgaagtttttcattgttatctaaatgttttatcaacttggctgatgtaggtcacgcactgctgttgctccattggaaagattaaaaattttgctccaggttttctcttctagctttagactggaaatggggggagtttcattgttaaaagctctaattactagagtgtcagaatatttttaatttagttttagataccatagaatcagtgaccacccattggactaaaatttattatgtagagggcagttatgatgagatttaatgtgattttggagttgagcacagtgaagtaacaaggctagttttttattctttaccattgattacaatgggatttcataatatggtcatgtttaaattaagctagtgtaaatttatttgcattcgggttatgcaggtacaaaatcctcacagtatcaaatacaatggaacagttcaggggttgaagtatatatggagaactgaaggactcagaggattgtttaaaggcaatggtactaattgtgctcgcattgttccaaactctgctgtaaaattctatagctacgagcaggcatctaagtgagtttctgcttgtctctttggttcatttccctctttgaaatatcatatgttcattgta

SEQ ID NO: 42838 - DNA, 2874 bp, Cannabis sativa
  modified_base (2818)..(2823): a, c, t, g, unknown or other
atttgtaagtttttttaaaaaatgtcatatttagtgtaattaagtttttatgccatatatatcaaaacttatctttatttttccatatttttgtaaatacctaacaaggcccacaaacaaggcccaacacaaggcccacaaacaagctcaacactcgaatttgagtccaaaactcacaacccaaaaaactcaaagaattgcattttgttaatttgttcataccaaacctaagcacccgatgacacatcatgcatgtacacatttgggacacgtataaggccacgtgtctgcataaaataattatgtgaactttgttttcatgtaataaaaagtccacaagctagaatttccaaaatggcatgtgaaatcaagataaggccacatcccacaacaaaaaaatcatcaaatcatatacaagtcatcataacgtgtgtggagatgaagagttgaaagaaattctaaagtaatgaccacttttttatcatttctttgttaagttggaagttggaacctaacaatactcagtcatcacacaaccctaatgggccaattccaaacccaatatcagtatcttttagtgggccctattatgaacccaagaaagatgttttactatcaattatcaaaaggggcaaattaagtgcaccatcctcaaatagccgacttggtcaataaacttgactatcttcaatatcatctcaatgaagaatttatattggaaaaaagaatcttcttaccaataattcattaacccaatctaacattagagagcaacaaattgaaaactaaaaaaatattaaattttaagtaaaaatttataattttattgttacaagaattttttttataaaaatattatctttttataaaataaaataattaaaacaacagtgaaataactaaaaaacaaccgtgaaaacttgacacaatacacattataaaacttacacattattttttttagaaaattttttccctagagtaaaaaagtaaaaaaagtaaaaatttcaatatttggtttaaaaacccctagaaaaaatcaagactatataattttacagcctataatgaagtgggtttttgccattaatgtatctgggattgtaaatccatattccataccaatacacattttatataataaccatcaagtctaactctattttgattctaatatatctactcctttgtttttcaaaaacataaacacatacaaatgaaaatagcataaatataaatgtaaagaatattattattattaagaggggacaaaagaggaatggggttaggtatggtgaggaaagatcacatgggaagatgaagaaggttgatagaagtagagcccactattcagcccacaaacacaaagaatctccctcacctcctaaaagtaggagattcaccttatcatcatcatcatcataaaaataattcatcacaccattcccaaatacaatgcttattatgattcatgaagcattgacaccacaccaaaatgagctaaacaatttcataatgaatggagcttcccctcaaaaaaagaagaagttataagggaatcatgtgactatgagagtactaatttatgcttaggtttaatgggcctccttaattaaactctcgggaaagttgaggaatatctcttttttgtattattaacaaaaaatactatcatattatatttcattgaaatactcactttttttgagtgaattgcctaatataatttcactatatttaagtctaacacatattttaaattaacttaaaggatataataagattatcatctataaaaataagtatattttaaaaaatatgaaaataaaaacaaaaataaaaataaataaaataaaatgagtgtccaatgcaattttctcattaaactctgcccactgctataggtcccatattaactgcttaatagtacctttaacttcttatatcaacttgtaatgtttcatatttgagtttttagggaaacagcttgatttgaactcactttttaatactaaaaaaaaattaagggaaaatcactcttaaagctgcatagatatcataatggagacaactaagatacaataaattaattgggttacaatggtagagcaaataccaagtacaaagctaaccaaagatagacacatataccatattaataataaggcaccatttatattattgcaccctcttaattttttagtccactaaaaataattctcaaactatttataatattgtaaagtgcagtaattctattaaattctatcacatacagctaacaaaatattagcgtaattatttatttactcatgtgttattaccaggggtagacccatagaggcgagatgagacagccatcccttaaaaaaataaaaaatatatatatacattttaactaattacaatatatattgctaactaaaaataatattaatataagattttgtataatgataaagctatttcatgcacatagtgatgaaggtcatgagttctaatcctaacaaaaacatgtttactttagcatttaaatttattttttgaatctctaccagtaagacttatatttagtgttttaattattgaacctaatatttctatttttactttatactacatttaatactaatataaatttgtattgatttttaacatattatacaatgtaagaaaaaaaagatgtctgctcacttaattagagcatctccaatagatgtgtaaataaatggtgaaaagctaaaatatagctcatttaacaaaaagtgtgctcaaatggtgtgtgctccaatggtgtgccaaaaagtgatgtaaattnnnnnnatagcaaattttgtgccaaatttagcacaatatttgctatgatgtaaattt

SEQ ID NO: 42839 - DNA, 1823 bp, Cannabis sativa
accggaggcacgaaattggaatggaaatgggaccacgacgacgccgagcgttgatggatcggatgaggatgatgacgacgacgacgaagaagacgatgttgacgaggacgatgatgttgatgacggagttgagggacttgtgggcgcagatggtaaccttgataagggcaattctagtaataacttgggcaacggggaggacaaaatgggaaatgggaaagctaagcatcatcaccattcttctcctttcggtaagaatctaaaacaagtttctgggtattttcatttgtatcagtttctgttttgtttctatgtacatgcataattttggagatttttggttgattttcaagtgttttattaggtgtgaacatgatggtaggatcaagtagagatgtcatagtgaaagaaggcggcattgtgcatcaaactgtgagtggcaacatcaaatccagtcctaatgataaccatcaccaccaccaccataatcaccatcatcatcagcaaggtagagttgggaattatcagaatgtggtcacagtggcggaccctgatggtgatggctattattctcagtattttcagggccctgaagggtctgcctcagggcaaaaggatttgacggttgaaaatggttgtgagtttagtggaagaaaagatgtgttgtattcgaacgagtcaggcgaatctttgaggacgattttatcagacccggtaacgtaagtttatatgaccatcatacaaatatgctgtattcatttttatttttctgtggatttaatgatcagaagttatgtattattttctttcatgttttcttagttttatgtcgtttttgtggaaatctaggggagctcttatggatgacgcgatgatattaccttgtgggcattcttttggagatggtggaatacagcatgttattagacttgtaagttgaagttcctatggaatcccatttctttattttcgttttaagatttggccatcattatactgttattgattttgttctgtttatggtcgtcggcataattttttttttcttttctaatgattacagaaagcttgctatacttgttctcagtcaatttctgaaacatcgatttctccaaatctctgtaagtatatagttttccactgaggagaattgatattctttcaatttatcttttaatgtgtagtatatccttaaagtgatgcaacatgagttatcatgtcatggcaggcagcagtatataaaattatgaaatcccatcccatgtctaactaagttgcaacttgcaagttgcttctttgtaaaaatcatgccaatgatcttataggcccaagaaactttgttgagattcttggactatgttcctagtttataattaaatgcctaagatggtctattagtttataagaaattcaaattgttcatcttcgtatgtcttaacaatgttcacatataaatggcaagaattaagatcaaattataaagctgaattatggataagaaaatatattggacaaccaaatgatttattagggctttaaatgtgcagctcttagagctgctgtgcaggcattccgccgggaagaagaattacaatttcatcgttcatccaaaagaagaagggaaaggtttgaccaggtatttgattttccattctaattctagaagaggaagaaaagaaatgaaatggttataattagagttagctacttataacttcttgttcctttaatctatggttgtgcaaaccaaatttctctctgttgtcgagtgaatttcgcaacaccaaattatattattttgttaatatcaaagagaattttat

SEQ ID NO: 42840 - DNA, 4359 bp, Cannabis sativa
  modified_base (130)..(136): a, c, t, g, unknown or other
  modified_base (653)..(653): a, c, t, g, unknown or other
tccatgttagacttttttttcatgttagacttttttttttttttactaaaattggacaaaagtccttaaatccaacaatctcaatagttctaggggcctttttaacaaccttaaaagttcaaggggcatnnnnnnntacatgtcaaagttcatggggaaaaattcctgattaacctattttttaaaacaaaatataaaaaaaattatacttttatttttgtgcgtaaaaaattagaaaatataattgttaccaaacgtcacctttacttttttaattttttaaatcacaaaaatgaaagtattttttttattattttttgtttatgataaattaaaatgtgtttaataactacttttatttttatttttgaaaatagaaaaataaaaatgtgttttgtaactactttgccccttgaactttcgacaatattgattttggcccctaaaatatacgatttgttaagaatctccctgaacttttacatttacagaaatttagtccttctgttaggttctgtcctattattccgtttaaataatgacgtgactttgtcaattggcaacgttgccctctaaactttgacaactatcaaatcgtacccccttaaaataaaaaagaaagagtcaatatttttttttagtaaatcttaaanaattaatttagatcttaaaaaaatcattttgaatgattaaaaaaaaataaaaaataaattaaattttaaaactaattaagcgatataaaaaaattatttatattttattagaagattcatttatatattaaaaattcaattcgtaaagattaaattttatggtaaaaaacttgagtatattttattattaatcaaaaaatatagatttgtttaagtaaccataacattttttcagtttaatttataatattttttcaaaataattttatattttattgaattttaattattttttatttattaagaatataagtttgattttttcttcaaaaaatcttagtttatttaaattatttattagattcttaataatttttatttaaattattaattagatacgtgttgataaataaaataaagcttgaaaataattttttaagtaaacttaatatttttatccgattttttaataattttattattatttttttttgaattaatagaattataatggctttaaagaaataaaatattacaatttttaaattattctttttaataaaagggggaaattttttgtattagttaaaatttagggggtaaaactactaattttaacggtcaaataaacagaacatcatagaaggggcataattatgtaactgttatattttaaagaaaatttttaacaagtcgtatatctttagggataaaattaggtagtgccgaaaatttaggggtaaaaatactaattatttattttaaaaataaaaaataaaattgtgttgagttatgaggctaggatcctaggtaaggagttcgaggtcaggtataaggaatgaatttagttcgagttcgggaggtggacttgagtccaagtcggggtcaggttcagaagccagagcagggtccagggtcatatttatgcatgagtgtgacatatatataggtttttttttgaaaatatgattgcatgttacaatagtacaaaacatactaatgaatattcctaaatttatttacaaatttcaactcatcacaagtattcatattcatgaggaataaaaaaaatgcctaaaagatatcagtggtgctagacactacctatatcgatatttgagtctcacataatttaatataataatttttatgaaatatcactaactatttttaagacatttttcatagtggtattaaatactactaatgtctactaacaatcgctatttgctaccaaaaacgtgtaactcctttataatgaataggtaggattggtacaacaataccacacatttttttttttggaatcattgaacaacatactatcactatttaaaaaagagatattattagaatgcggaagtgtatgattaaggtagtagaataggtgagtataaaataaggtgcatgatttcatctcaaaatcaattgacaataaaaaatagtccatacatatatataatttcaacgtattattaaatgtgaaattctctaacacatattaccatctgaataaatataaggacaaaagtcataatagttcataaactttttgtaaacatatatgtcattttcttgtaactgtcacctatgacctccatatgtcaaaaatactaaaatccttccaaatttatgctttttgaaaagtacatcatcaatatgaattacaaaaattcaacagatcaatcgatacacgtttcatgcttgcttgcgcctctcacatgttttctatttctagtaattttatgtacacaaaaataggaataaaaaaaaaaaataaaaagcaaaaaagaaagaaagaatgaatgttatgaagatggataagaagaaaccaagtgagaaggaatacatttagaactcttccaaactctagaatgcaacttgagaatctctttagctttctccttagtcttcaaattattctcaacttgtaaaaccaagcacaactttgccacaatgcccacttgaagcatctcttgaagaaccctacaagtagctgagaatctacaaactgaagaaagtattctcactgctctatcactcgccacgtgcgaaacccgaagaatcttcttcgaaaccaccgccatccccgcgccatgtcgcaacagctcggcccggccctcagcacagctgcagagctgatccaaaaccacaagtgtcagctcacaaacacgcttttccggggcatcaagaagaatctcaatcaaaaccgaaaccgccccgccttctaccgccttgatccggttcctaccccatggacagatctccattaggagcttcaaactagccttggacgcctgttgtgatatcccatctcttaaaacgctcacaacctccttgaacagttgggatccaatgctcatgattcgaatcggatcaaccaaatcaagaatcgatttgagtaaaactactgcattagctctcgattgttggttcccacatttcaaaacactcaccaacgaatcaacaatgtcagtagaactatcgttcgttacaagatgttttaataatgtgtgagagcttttgataacgagaaggaaaagaagatcgacggcggcttctgttaccgccatcgaatcggttcgattcttaactaagaaagctaagaattgtaccgttcctgctgcctctaaacactgcttgttcctttcgctttgagaggcaatggttttgaggttttggaggcatttgagttgtgaatttggggtgtttttggcttctttaaggagtttaaggatttgggatttatcgattggtgattttggggttggaattcgttctatgccgtatgatgcgttgaaagtgcaccatgattggatcaaacggcggagagtgtggttgggagtgagaattagatcttgatcgatgagaggctgtttggttacagggcaagtgttgttgttgcatgagaatagccaatgctcaatgttttgtcgatcgtaggtgatccctgttgaaacggtgactggatctctcatgagttggaatgaaatggggcaaagaaaatccgatggaatttcaacttcaacttcaaattcatccattattggtcttcctagttttgaattgtaaggaacagttatgttgaagattgaaatatatattatgaaggaataaggtaaaccatagttcaagttgttggaaacgataaagtcaacacacggaaattgagaggtagatagaaattaattaatagaaatgtgaattaattaattataagggaatagctttggaagaagaagaagatggggaagcttaattcgaggacttttcattattcaatattaaattaaatgaaacaaagaaataaagagatgtaattggggtcagcgtcggtgttgcaaagcctcctttataaatatatatatcttcgtatttcattggaccatgttgactttgattcttattctattgaacctattaatcatatttgttaaagatcaaacattgtattgcttccttcttccttcctttaataatctacaaattaaaatacgacatacgtggttccatagttggatggtgttttagaatttaggataaggtgaatgaagtttcatttcaaaattaattggcaatgggaagagtaacccattcttcttatgtattctattatatttccacacattaacaataggaatgtcaatggggcgggtcggatctgatctgactatgaccgacctgatccagattatgtacggatctg

SEQ ID NO: 42841 - DNA, 5791 bp, Cannabis sativa
gagagagagagagagagacctgaagatgatcgtgaatatctacttcaggtaatcctgaataaggaatttgcaatgttaacatttccagaagcagacatccaaatgaccaaatatcgatttcctgtaacaagaaaaagtagtcaagaaaactatatgaacattgctgtagcaaaagttagcaggaagaagaagaaaaacaatgacataaaatgcaaaaagatttttgccatcagcaataataaaacatgacttcaaatgtttagggaacagcgaatcacaaatgattaattaaaattatatggtaaactgaactcagcttaccattccataaggattacgttcatgcattgctcgcaagacttcaggtgccatccagcgaggtgttccgacacacacatcaggaggaggtattcctaattgcgcaatgcagcatgtatgcagtaaagaacgaagaggcacagctctatcaaaatcacagattttcacaataggtgttccatcaaccttttttctgtctaagtcaatcaaaatgttttcactttttatatcacgatgaataatgtgtttggaatggagctctactaatgcagatgcaacatccctagcaatgcacaaagccagctccacaggcacatgcttttcaccggcttttgctaacttttctatatagccctgttatagaataagcatggagtttgtcaaaaaaaaaaagaaagaaagaaaagaatatgcatggagtcataacaatcattaagacagccaaaagtgaataaggtgaaactttgaccggctacagtaagtttaccttcaaagatccccccgttatgtactccatcaatattgtagactgtagtacacgatactcagacttgccatcttctgaagagatccatttgcaagatatctggtgcccatacatttcgactatacaagagtgctgtagagcacctaaaattcttacttcacctaagcacccatactcaaaatttctaatatcatttgctgaggtcctggagacctccacagtgcgaacctgcagcaacaaacaacatatgcacaataatcatcaattaaaaaatcagcactacttaatcagatattattaattattagaaaaaggaaataaagttgaagatctcagatgaaagtcatataacctattattattatccgagttcggacttgtaaattaactccacgtggaaagaaaggttaaagttccaagaatgcaaaaaggaatgtaaaactgaaggtttacaacaaaatttcaacctcataaatgaatgcataaggaataaaaatttcgacaacattgataaatagtcaaaataagagcaatataattttttcaaaatatgtacctttgctgctgcctcaactgctccatatttgcaccgcataagtgaagtagaagctgctttcaaaatttcatctgagaaagacgagggaaaggaactaccttgagcagtcttgctgcttccagaggacaaggaacctctgttccgactgaggggaatatacctataataagcaacaatcaagaatatgaatgctgatacataagtaggaagataaagcagaataaaatgaataacttgactgtctcatatcaggtatggtccaaaatttcccactgacagtgaaacaaaacatagttctgggcttcatattaataagtgaagacggtaaaatatcaagcaaaaggaccctgtatgcaatatctcagaacatgaaggaaaaaaaaacatctgtactaggattataatttttgaagataaccaacctgcaataatactctggatctgtttcttctcgtatatcatgtggatgacaagcatcaactaccatgcgaaccagcgaatcaccgctcttaagtaatacaatattccatgcatgtggcataaaatccaggtaacccctgacaagctcgcaaagaattggaggctccattcggtcacatagatactgtaggattacagatgcattagacataaaagtcaagaaaataggtctacataaaaagattcctaaatatcaatatggtatgaaaatcaccttcattagcaatgctctatgccggcacacaccaaaatgtacagttcctataggaactatgatggaatttctcctagctttgatagcacggagtgatttttcacagatatcagaaaaaacaatatcttcaacagattctgcacttggattggtttgagtattaacactcatgccatttccagttgagcaggtgcaaacaaaaggcttccggtagtttgagccagatacagcttttcgagtcttatcaattattgcacttttatcactgccaccaaaatgatcagaaacaaagagagcaagcaatgatacaacctgcaactcattgatccaagctgcatctctagttagactatttaattgcttcagacgagataacattgcttgtgcagatattacaattgcatctaactcctcatccctttccctgaaaataagaacaaatgacaaagtcaattaaagtagagaaccaatatgtcatgtgaaataagccaaccactaaccagaaacaagaacatatgatgtctatatatcaacagaaagtacaagtacataacctgtccaaaattataacttcacgggaatcaagagggaaactttgctcataattcctcacaggcatgaagggccgatcacgtccagcgtcataaaagccatctggcaggaaatcctcaatgccgcagaacgaagtatcactatatttgcgagatacactagcactatcatcaaaagatttacgggacttgcacggtttgggattgtcaagatccctatcacagtgcctcttagaatttgaataactttttagcatttctgacaatgtatcttcatcctcgacaactttattctgaactgaggccaaagattcattcttctcagaactatcatatttatcccctttgtttactgcagaagattcaacgctgatgcatgagtcattttctgcataaagatcttttttcaaagtaatatcattatcctcaccactgtttgaaagattctcactttcatcatccccaggaagtatttctttatcatcatcatcatcatccagtatgacttcagatgtcccttcaacagaaggatcaggagcaagaactcctagacttccaggttcacacttctcatcctccacagaagataacaacttagtatggtctatacctttccacttcctactgttgtttaaccgttcttgacgagctctctgctgcaaataatacctcctcttccaccttttaccagatttcctcgctgaaaaacatctattgtttgatgctgatgcagtcattagacctggaagaagatggtgagaacctgtataaattaatagaatatttacattaggccccacatgcattgaaaggatcaaatacacaggatcagaaaggagacaaacattataacaaaacgtttttgccaaaattaattttctagtcctcacctttacgagagagacttccatcatattcgtgactagcgttatcatataaatccatttcaacagatgaattgacgaagttgtcaatgggttttccaccaattccttccaaattgcaacatatccaggaaggtatttcacaatgggcaagaaatttattgtactgaaccataaaaacacaagatcgtcaacaaggtggataagtttaataaagaagatcaccggcaaccaagacaatgaatttggatatgccaatgcaaactgtacataatttttcaacgcatgggatcatttaaaatacatgtatgtactaagttgcagatataagtacctgaagatttaaattctgaaggttgtgcatcaagctgagttcaatagagcccatagatgtcagcctattatttgaaaggtctaaattcctcaacctttgcagggaagacaaagaagagggtagttctaccaatttattattagcaactttcaatgataataaagcacttaagttactaatttcgtttggtaaactcttcatcttattgaacgaaagatctagatactccaaagtctttaaacacccaatttctgaaggaaggtatctgcgtataaaaattcacacgccacaacatagaaaaggtcaaaacatttttgtacaatttcctattcgtaaacatgttggataagcagagtataaataaggattagtgaaaccttgaatcaagaaaaaatagttcaatttttttattctttctcattcctctctaaaaccctatcccaattctctttactagaatagtcaaacatggcacatgcccgtataaaattcacaagaaaattcgaatagaaatttagcatcattgatattccaagtcacaaaatgtaaaaacatccaactttcaacttatctgatctgcataataaataaaattacaacaggagacactaaccttatcgagaaatgacaaacagagagcttggtaagacaattaagcccagaaatctcactcaaaatcgtaaaggccgaaggccgagggggcactttagacagttcaagctctttcaaactcttcaactgcaatggcaacccaccgaaactcggcgacgctattttcacctgcaacttctctaaacccgccatagtcccaatttccgacggaaacaaattaatctcattcccaaagaacttcaacgtcctcaatcccctaagagtacccacctcttttggtatcaaattaaacacatttttatagagatacaaacccctaaccgcctcactggaattatccacaatcgaaaaatcaatgttttttcctgaaacatcaaggaccggttcgtcatcgccactgctgttgctaacctcacaaactaccgaattcgaattagaggccttagagttttccgggctctcggaggttttggtaggttcaggcgcagtttcctcggaattgggggcctgcattgagatgggtttaagggctgaattccgattcaaaaaatggggttaaattatttggtgagaaaaattttaaatctttaaagctatcgaaacaaagatgtaagaaaggaaaaaagaaaaaaattgaacagcattgaatgaagaatcaaaggaagaaaaaaatgacgaagtgaaatttttgaaagaaagttgaaaaggggagcggggagaaagactaaaaccgctccctcttgcgaatgttgtagttaaaatggaaaaccctagaatctatttcacacaaacacaatactatgctttgttcttcataacataaatgaatatgattatttttaagtgacacaaggacaaacatgactcgatagtcaagtctacctcattatatgtatcttttaacaatatatttaatctgatgattttttttttatagttatatatttgatccaatcaaaatttagacaacaaaaataagcagcctatcagtcgattttgagtcaatttagtttacattttctttcatttgaattggtaaaacttgtcacatttgtttttttttttttttttttttggaagttttcgcatttttttttttttgtaacaaattgcaacttcattaaaaatggagcaataagttaagttacatcacaagaagatttagaacactaccatttctaaatgatctcttcatctaatcctaaagctttcgtggaaagattgtgagctataacattcaagtgtacataattaaaagaagcatatagacaaagagaatacaacatcttgaacaacatcacacaaagataatttatctttggattaggatttttacccctgaactttaacatgta

SEQ ID NO: 42842 - DNA, 4507 bp, Cannabis sativa
aaatgaaaataattatggggataacaattaaacaagataagtacaagacaaatgagtaggtttaatataaccaaaactattattaaacaagtctcaattattatatagttagggcttaggataggagtagactagttaaacataacccaatgaaaatgtcttctttcaaagtcacatgaaaaaattaggcacactatttgagaacttacacaaacaggctaaatagtaactaggattactattgaactcttttcttagaaagaaagaaaaaaaaaagaattaagacaatttttaaggtgatttagtcatctctttctttcacataacctaaatttttgttaataatggaataattttttctccaaattagagttttaattccggattattatattttttttaagaataaatctctcacaatataaaaatcattataaatgtgttatttcaattattttacaatctacaagtataattaaaatacgtattggatgacctataacttaggctaatcgaaatcttgattagcatctaaaagcactccaaccgtttctcttttctattctttgaaatatatcactaaaattttattttatttttatattagagtaaatttttacattacacaattcacgaacttctctattgatttatttataatctgttttttaatatattttacttttttaaaatttatattattaatatatattatccataacataaaaaaaattaaaactaaaaaattaataaatagtaatactctacaagtaaaacaacactattcattactctaaaaatttatatttttgacagatttatttcccttctctattttaaagaagctattaggagtgctctaattctcgctaatattgcattagcaaactatatttctaataacaaataaaatgcgaacaaatatgcataaataattgcaataactcgaaatattttaagaaaaaatcgaaaaacaaaactctacaagagtaataatttgcgaaaaaaatttgtatccttaataaaatatttatacaagataaaaggcacatgccatatttgctattttcttttatgtgtatacaattcataaaaaaacacaaaaaaacatttaataagaattaaataaataaatgaagtgtatatgaagcaagagcttttcaaatcattccaaactgtatacacattgcaagaatcatcatatcaatttttctttttctttttcttttttctttctttttcatccaaccccacaatgatttactacataaattttcaatttttcaatttccctattacacattttttaggccttccctcccaatcattggttttgactttttgctttctttgacttgctcctctcctgcattttcttctttttcgcttcggctgtaacccaactgtactccgatggaatcgcaaaagggtcttggatagtttctatcctactgctcgacatagcgttggatgatgcagaacggtgtaagggagctttaatccattgaaaccacgatgaactcgaaggctgagatgatgctgcagcagctggactttctcggccaacagcagatggacttgacgggggtgttgagaattcgtccacgggagctaactcttcaaactttgtgaatgtcaccattactcttatggttggaacaacgggaatggcaacctgaacatgaaaaaccgagaaaatgttatgtcatatcgcgcttatagaatcaactcgcccttgtaccactttggtctcaagatcaacatgaacaatcatatcattatcataaccaactttcttaatgcaactaacaaaagtgattgaccagacactcaatactagtttaactacaattgaaatcttagtaaactcagcatatgaaaatagcaaaagcaatgaagcaacataagtgaataataataatcaaaatcttaccttgacagggaaggttcccaaaggcagtttggttgttagaagctccctcaatcgacgaattgccttaaccttatcggctagaatatcaagcaatggcaatagctcctctgtttgaagtggaaagtttggagaaagccatagaataggcctcaatcctttcttatattcgttctctcgacctacatccttgtggcgatttctgttctcagaagagcttgtggaagacgacgaagctttggtattatccctcactcgtcgaagctcatcccctctcatatgaatctccatagaatgtcttcctggcttaatctgatttcttgatggggaatcaccaagcaaatcactcactttctcctctacacaaagagaatttcttggaggagcgattttcttcggggtttcaattttagtctcctttttcctccatccaccaaaccatcctttcttttcttgtttaatctctacatttctacaaacattgacatcttctatatgaatatccctttgctcgtaagagctatggcgatgcccaacaatcccatcgccattctcaacaggcaattctgatgaatccaacttaagtgcaacttcaagttgtctcttctcatcctcagtcaagatatcatcaatctcttcactatctggttcattatcattgcaagttgcgaaaaattcatcatcggtcattgcccccggtaccctcctagattttatgctcacaactacattatgcatatcataaactttcgccttccatgctccaaccatctccgttttctcttgtcgtctccatgtcaattgaggcaatagaactgcctgagttacatcaatcccgggcctaaaaatgttagtttgtgacatagcaacaacttcttggcgaacctcttcttcggttgctggtgaaccagcaccatccaaagcattcataacctccttatccttgtgtgagatcatacaaagtgatccaggagggaccttaccatcttcagaaccatcaccaaggaaaacaatactctgatcagaacgttgaatcctaaatccatcaaaaccagccaatgtcatatctgctctcaaatttgcaccccttttccaaatcttataagtatctgaaggggcaatcctagaaatgaaagggatcactgaactctcaaaatgaaatgtaatttccatataaaaatctctcatccttctcatagctccaaccaatctaggcaaccttctacaccatttcgcccaagctaaaggctggtaatgcctaactatacacattgcaatagcttcttccctattacaaatagcttcctgtaatgcactccaaccactctcattctgcaagctccaatctgcaccggcaaccatgagcatttcggtacaagtctgatccccgagcttaaccgccaagtgaagaggcgtgtcgcggtttggcacatcgcggcgatcaatggcagccgaaatagcctcagccttttcttcctcagctaaagaaatggcctcatttcgaacctcagcagggtcacaaaggcgcggtagactagccaatatcttcctaagactggcatagtctctcatggctatggccttatgaacaggactatgagcatattttgatacatcaataccagccattcctattcctcaagagaaatgtagcctagtatatgtgtatatataggttatatctatatgctaggcagcttaatgtgcggaagaacaaagacccagttcaatcatttaataacagattgaaaatcactcaaaatcccagaaattatatcaaatcaagagttagagacaaaccccacttcacaaatttgagatatattcccttataacaaactcaattcagattacaacccaaaaaggcaaaacaccacaaaaacaaaaaggagaaaagagaaaacagttgacacaccagattggattgggaagcacaagaaaagtatctctatatcttaggtgggcccaaggcaaagcatccaagagtctaggaacaagaacaaagaaagaagaaatagataaaaatctcacctttctcttattctcttcctcccctttcttcttcttctttcttcttcttcttcttctttaagaccaagatttagaactcagacactcaaccccaccacccccaaaaaaagaaactatctttctctctctatttgtccttccattacctcaggaagttaaaaaaaaaaaggaacactaaggacccaacccttgtgatccaatccagatcagacaaaccacaagaacatgcatgtgggtatttgaaaaccaaatctcttaaatattaaaaaagaaaactttattcataaacaaaaagagaagagaaacggtatttcaaaagagaatcaagaaacgaataaaaaccccaccaaaaaaaaaaatcccaaatccaatattgagaaaaagaatccaaaaagtgggaatcaaaatgaaaaaatatatatatttttttttttatatttagtatcaaattagagataacccaattcaaagataacacctttttttcataaagactgaaactttaagtggtgtatgagaaattgatagagagacagaccattaaga

SEQ ID NO: 42843 - DNA, 5647 bp, Cannabis sativa
agtccaagaatgttgcctataaaaactcttgttctcaaagtttatgctatagtagaaaagtgaactcctttaaagtttaaaatcatcatatactcattgaaaagcaagtattgttcgaaagaatttactctgctgtaaaacaaaatggtacatttgtctttcaaggaaacagattctaaagatgagattttttttttctgatgatgggcatcatcatcatcctatgtcgacatgcaatactaaattgtttaatcttaaaagatcaaagggaataatacccagcgtcctatttttcctaagtaggctttctatagttcctaatataaatatatatattatacatatatataaaaaaaactggtggtttatagcttactttccactgtcatatctttcaaatccactggtggccaaatgccagtatatgctgtttcctgagactactgatctctccccaaccccaaagaagattatgaaaaaaaaaaaaaaaacaataataatacaaaagcagcttccgcataatttgcatagttgatatgccactatttcatggctttcaattttcaaagattgaatgcagattgtgtatagtattgattattttagtttgttctatttggccaaacactgctcactctagaaagaaaaggaaaaagggtcccttaatactacaagtgatgtcaaaaatcaaaccgacattgatagaggcacacaaggattaaaatacatttctaggaaaatagtggaaaaattcacaggtcattttcagggaggggggaaaaataaaatatgaaacgttctcttgtgtggtaatgtgggtgacaaagtgataaaaagtagaagccttttgtactgttgagcattacagctgataataagaaaacaaattttgacatatgatttatactgccactctagacaacttgagagcatgggacagttagctacagtttactgcactagcactggccacatacgaaaggcacatcactattctttactaaccactagatccaaaacgtatatagactgggaaaaactggttttataattgataataatgggcaagactggttttttatatcttgaaaacgatatatgagcacacaagtacataggaagtgatgtatgatttttcttaatcaaacttatgactatcctgaccacaagttttatgttgcattttagtatatatgagccaatacaaaaataaattaataaggattaccttgaatgaaaatgcttttaatagagaagtaggcaaaatatccacgtggagaatccctaggcactggaataatatcatttacaactactacaacaacaacaacaactggaaaggggttattacataattacatgtaacttttgctagtactatcacaatgtaggacagttatctgaacccctaaaagaacgtagaaaatattcaaatggacgatgattatattgctagtcaattctagggttcatactagtggctttaatcataacataagttaagttaacatgattggaaaacaagctccaatcacatcaaagacaagtaagatctgtaccaagtcaaacctgcaaggtgcaagaagccagcatatggatgcaacttgtattcattcattcattgcatctcacattgtagaagctttagcaaaacttgaaaatctagagaaatcattttttagtagatcttgtgggtttccttgttcaacctatgaaagatcaaagcacaaaaaaaaaaattgaaagtaagcctttggctggtgattaaaataacactagcaacagaaaattgcatacgaaaatcataattagtcagtaaagataaacataccaaaataccacgatcaagaaccattatactgtccatgttcatgacagtggaaatgcggtgagctatagtaattacagttgtgcctctaaattcactagatattgtgttctgtaatattgaggctgtttgagtgtcaacattggccgtgcactcatccaaacacaacacctggaaagcgtgactgtcagtttttcttcatgacatacaagaaattactcaaactccccccaagtatatgattattcccacttcagtgaacgcaaatttatctttcttctttttttttttatgaacaaaaattctaactttatgatatgtaaatccaagagcatgataattcttttattgaaattttctccgggtcagaaaaaactcttacctttgaagacttaagatgtgcacgcgcaaggcaaagaagttgccgttgcccaacagaaaatgacattccagatccctttacatggatgtctaaccctcctactgcttctacttcttctttgacatgacatctctctagggccttccaaatctctgagtcatcacttacatggaaaggatctagattatccctaattttggaacaaacagacacagtgactaattttttttgaggaagtccatttgagcaaatacatttgtatcagttaaagagttcactaatacaaatataacttgaaaatctttatgaaaataccttaatgatccttcaaagagaaatggactctgaggaacaacagcaaaatgagcacgaagatccctaactggaacatcacctatgttaattccatccacaataatacatcctgtacagattgggctgaggcgaaaaagagcattcaaaatgctagactttccagcaccagttctcccaatgattcccacctgattaacacaatcaacaagatacatggtatatatttctactatatgttcttggacctcaatgtttaaacatagaactttcactaggatggataaggtacctacctgcataccaccacatatggtaaaactaacatcatgaagcgctgccggcaaagatggcatatatctcaaggtaacattatgaaattctatctgtccttggtatggccaattaggacttaaggaaaggttcccatctaacctttcttcagggatgttcatatactgtcataattatgaacacgtaagtcaacagttggatacttttaattatttaaggaagtgtatcttaatacctcaagagctctttcaacagaaaccatttccttttctgtttcagtgaagcttgttaaaaaactgcccagcaaagatacaactggagaggcataagagagagccagtcctacctgtgaaaatagacaatgcaccaactcaatatttgggctttgggtaagaaaataatagtatgattaagaggggtcaaagagaaattaaataggagtttggagataagcaaaattaccagccctggtgtgccaaaactaattggtaaatttccagatgatccaataacagccatgatggcaacaaatgagatgacaaatgctgccaacaactttaaaatatatcacaagtcagtaaaatattgagcggcttctgtatatcataatgaaccatccaatgcatgtatctatgtatacaaataaaaaataaacagtgttttctcactcaatcgtcgcggcttcacctagaagtttatttgtctatccagaaatcagcctaccattaaactctgataatatatatacatcctaaaaatatatatctaaacattaaaaaaaatgcatttgttgttattcagatcccaagtataggatgggacaatagttgaatagtaaattactatagttgttttgtgtcaaacaaatcctgagagtctgagacacacctgaagccgcagagaaagccacaaacttgctgttaattctgtgtaggaagttttctgatacaacataacgtgtttcataaatttttccaaaaagtactcctgccaaaaaatatttgtacgtaaatttgatcagcttcaagttccagggaaaaaaaaattcatcaagaaatacaattagaaaatttaaaacaggatcaagcctggtcttgaaggactattataagaaaataactgtctactaaacgagaagagtataaatcttgaatatgcatttcatgtaaacagaaacagttgggtgtttcttttcactggtatgtttttctacatctatcttaaaatgatagtgtctcctacagccaagtatttttaataacacccactccattattttcctttattttcacctagaatgggatataaatataatcctcaaatctaatttacaaactatttccagacttttatagagaaggcttaactatctctaaatatattgtttgtcaaaaaggactccacattttatgtgcaaaatctgatcctaaagtatcataaacctaaagctcaatatccacaaactggcctaatcccatatgacttcccaaagagctgggcttgaatatgtaaatcaaaaagaaaagaaaaaaaatcaacatggagtggtgcttatagccactaaaatccaactatctacctcagacttgaatgcccttattgtagatgatccatcaagtgtctctgagaaagttgcgtatatgggagatcgagaaacactgtccagccttcgcagttcccttgatgttgacctgtagaaaaactgaagaatactttacttagtagacatctttcactttattatatatctaccaccaagatggagataaaaatttgaaaggttctttgtcacattcttttactcttttataccaatgtactttcaattctagctcacacctcacatatttactacattttcttgaacaattggcattggaaatgaagccacagaaaaattcaaaatgaaaaaaaaaagaaagagaaacctgaagtttgctgtagatgaaccaaaatggcagtagcaaaagcagaaagaaaacctaaaggtggaaacaaaccttttagaacattttaagtaggacagttgagttccagaataaaggaattaaagaaatctccatatgctaaataataaatacctgtacatatgacaaaaccgctgcaattcctagcaggccaacaaaattggctagaagaatgttgagaatgaatggaagggaatcatcaattgtataaagatcggaagacagcctacataacaaataaaaatatgtaaattacagaaagaaaaacaaaaaataaaaatcaatgaaaaataccgtaaatgcatcaaaggataacctgttcaatattcttccacttggtgtctgatcaaagaaatgaacaggcgcattgataagctttttgagcaacgtattgtgcaccttaactgctgatcttaagccgccaaaagcaaatgagaatgctctcaccaatgtaagacaagaatttatgacacaaaagatgcagagtatagcctgcattaaccccatggcaatagaaaacagatctcaagttttttcatgctatcacaaaaaaacatgaataatgtaaagtcacctatttaattgttctaataaattgtgtgccaaaattaaagcaatactttcaatgtattgtggctctatggactgtaaagatatgaagatgctgccaagatttagttacatgtgtccacaaaaaagctcattaccaggtagaaggatgtggaatattctttatgatgtgcgccacttgctgtatcgacccaataagaaagccacaaatcatttccattacgggaagcttgcatcagtattgctgatacacatattataattgttaagaaccaaccagagaatgcagcatat

SEQ ID NO: 42844 - DNA, 2535 bp, Cannabis sativa
aatatttaattataccaataatatgacaccgagaagtgtgttagataccaataatattttttagcaattctcgaggatttattattaccttttgaatggagtgatattgatgggatttccactgcttttgagtaaaaggttggagtgagatgctatcagcccagatgtcaactgatgtgttattgctctgtaataatatggttcatattaagttgtaaaaaaaaaaaaaaaagctgaaatttatagcaaaatcgatactaaattgtaccattattattagtaaaaagagtgttaaaataccccatagcaagttagcaacagttaattatacacaagagatcgaattgtcacaccaggtttgattagtattgtttaaaagttaatcccataatcattattatatataattgattgaactgacctcaaaatagaggtctgcaacacctgactcatcaacagtgagaccccctttgagaaaagaccaacaatgagattgagcaacaacagaaccagcatgtttgaatccattctttgttttgaaagtagctcttactgggacatggtttcccttactcacttgtatccaagctacatttttatatatgttataagccaaaataatgcataataatgatcactaagaaacaatataacattaataatttagttcaacaatacctgaaaatgtgtaaaagttattcttttgaaggtaaagcctttgtgatacactatcataaggttggtttctgctgtgagccacaaggaatctgttgccctctgattctttgtgtagtaatttggcataaccaaatctagaccatccttttaagccattatccaactctggatttgttataatcccacctccatactgagctttctcaggttttctaacacactggaaattggagaaataaagaaagggtataaaaataaaaataccatttttcttaacacaagcttaaaattttagtggtaatcaaaattacctcaatgtgggctgagtaatcataggataaagcattggctcctaaacctgcataaatgtacacaattaatgtctgattaacttgtggttattttttattttatgattatggaaagtaacttgtatagagttactaaataattaaaatatattaaacaattttttttgtttttttgctatgtcctaactcctaaggttaataatcgaaatgtatgcagtactaaaaactagtctataatatatgatttgattataatttcattcaagacacatgtacggaattagcaggttacttgttttgtccctattaattttcaaaaaatttcaagatgaatgaataatcaattttattttgtatccacaatttgtggaattatgtagatttatatttatattactagtttcaatatttataagtaaccaaaataggaatttgtatctttgccaaagaaatcaattgtaaaatatgtatgcatagcaatgattttagtaaaaattaaacaatatatatgtatagataagaatagacattgatatttatatatacaaaacaaaacaggaaactacattctatattactgtcattatttatttatttattaaagggactgtcttatttaaaaaaaaaaaaaggaaatccaccaaaaatacaaaaatgttttcccaatatataaaacaaagaggccccttccttctatgtggtaattaaaaaaaatgagtaatgctagagacaaactaaaattgtacataatgaagtgtgcattaaattttaaccatatataatatttttaataactaacctttttcattaaaattaatagttttttttcttaaacaaaaatacagttttgaatctaaaatgaaactaaataatcgctctctccaaaataaacaaataaaatacgagcattataatctcacacattggtaatagagtttagagatgtgaattatagtacaatcactaggattaaacaaaattacaaattgctaagaacaaaaacaaaaattgcaaattcttctttatattaagttatacatttttatagtgtttttaccaatgagaattttactatatatgttatactagagagacaaagttacctgtgtaaaggaaaataatactacacagcagctgcagaaccataatattgttttttcctccaactttcattataatatattatatgcagtgatattgccacatatatatgtatagaaaaattacataaactaaattaagatcgtataataaatataaaacagtactagtaatagtcacgacactacagagagagagagagatgtaatactataataaactaaaataaaatgtaatatgataaattgaaatgtgaagaaagatttggattgtatttatagtgaattgtactgagagaatttaggtgtaaattaaatgaaattaattttgttaggatacccattctcatgaacactctctttctctttttcacataattatgaggtttttcctctttaaaaacagaataatatattccaaatatacttctgttcttatcttctct

SEQ ID NO: 42845 - DNA, 5470 bp, Cannabis sativa
gtttttggatcttctccttcaaagatcggagagcttcagagcagtacttaatctgatccggtgtcagtggcagcttcggcggaggatcgggggagaagttaagcgaagacagagattttgctgctgcggcggcggcggaggaggaggccatggcggaggtcggcgatctccgatgagtgcgggagcgcgtgaaagcaacgttccccagaatgaaggagagaagtgggaatagggaatgtgtttggattggatagtggcgtgtttggtagcgtgtaaagatagcaattggtgaggtgaaataatggtcccctcccctatataagtttttgagtgaactctttcataattggtgtccaaccaaacatgcacataacataataatgaatgaattaaatatgtgttgtcgattaaggttgtcattttaagtcattactaatgagttgtgaattgagtatagagtcaaccacttgagccatatagacatgggcggatctatgtagaggcgagggggataaatgcttctcttgagaaaaaatcgagaaataatttatatgtattttgattagttacaacgtatatttataagtaaaaataataattataaacataatattagttttcacataatgtaaacatataaaggatattgggggtgtgtatattggaggttatcatatcaaattctagctatgtaatttaaagatgcttctataaaacaaaagaattgagtgtaaagtctttaactaaaaagatattattagtgtcaaatattactatgaaatgtcatactattattagtaaatgtgttagattttatatattttaatttaatggtagtgttggacgtatttaatagtaatacttagtgttgatattaagtgcaaggcgccatttttagtattgttattaattttgggttcacaattaagtgcaaggagctattttgtagtggcgttggacattgcaatattcttttaacttaaagataaaatatgtaagttcaactaatatattgtttgatagttgataccataagtgtgagagttagagtctctgcaatgcaagtggaaagatttaagagttctgcaattccatatcatttgggaaatattcagtgtgatgatttttgagattgtgtaagtataaataaagttatacatttgagttgaattttttagcacaacacgaaactagtacacgggtgacacgagtacggtacgacacgaaaaaatatgggcttggatccaacacgacataaataaatatgagcacaggcacaacacaataaacacgaaagcacaaaataaaacacgaattgaaattcataaaataattttttatttaataattcatttattctttcgtatactttatttaaatattttaaaactatatattttttaaaaagttagttactttaatatataatacatatttatatttttaacatatcctttgcctagttttaaattatgttagcatattttgatatgttgaacattttttttgttgaaagagattatgtagaatattattgagagctttatgtaaaaatttattaatgaactactattatggtgatattattttggttattaaccatgtaattgtaattatagtttattttcttttgtgattttgaagctcattttaattgatataatttatttatgctttaaaattagaaattaatttaaaaaatgcaagaaaatagcaatttttcataagctcgtttaagggttatttgataaatacatttcataaaaaacaagctgacccgtctaggcccagcataggttcggcccaatataaataaatatgtgtttataggacaggttgggcttagttcaaaaatatgggccaggctcggcctagctcgacccgacccgttttataatattagtcgggtcgggcctacataaaaaatgggcttttataaaaacgggttgggccgcctggatatacaactttaggtacgagactacatagttgaataaggtttaaatgaattgatggtactacctatattaacaagtgcacattattttcggtagtctatcatttaaaaactctaaaggtaaatgtgttttacttagaataatactagaataagtaacatcctgagaagtttttctaaaaaacgtgcaagtgaggataaaatatgctgaatacactcgtgctaatttttaaagctaatcatcattctaaaaagcaaccaaacatgatgtaccaacgtaagagagtcatccatgaatgtaagagcaccaataaaaatttaaagctagaaagttataataagtgtcacatagcaatgcttcaaataatcgagcaattaccataaaaaagtggatatggggttgttgttagatgagcacaacaatttatatgtaaaaccaacactggtaaatgtaggtagaaaaaacaaaaaggtgcgacataattctcattaaggaattcgacaaattagacttcttccacatgggaaaggaatcaagaaccaatgttttattttgaaacctaaaatacatccaagtaaatataaaaaggtgtctatgtgagacaaacaagatgacttaactaaccaaagtcttcttaaagaattcaagccagagttgaacatgaaaaatcttttttaaagttttgggggaattggagaagcctcttgatattaaaatactaaaaaaaatcccacctttttgggtccaaaaaaatctagaagtataggaaaaatccacacttggtgcctttgagcacctctatgcaagacataaccttttacatggcacattaaaagaagaaaaattgaatcgagtattattatgaaacatcaaggtgtctaacactactaaaagatgacactttataattagttaacggtttttttataatttttattaaaataaactaagtgggatacgatattaaattgcaccaataataatattatacatcacaagggtattggacaacatgagtctcatttaacatttcagaattgaatgggaaaatcgtgtgtaatatgagtagcccaaatgtgaagttcacaaacactccaaaacagtagtaagttagtaaccatatagcataacaaacttttctccataataaattaccaagattgaacaaattcactttaagacattgagtagcaccataatgacactctttaaaaattgtgatgttatgcaatgagaagttgtaaagttttgacatttgcttattataaccaaagacacaaaattataataaggaaagccaatacaaacctactttttttacaactacgtggcatgcaacattgatttcataaacaaatcacattcttcttcctaagcctataataatagttcaccataaatttttgagaaccaaacacaaaatttgttcattcagtccaaaaaacatcatccttgttgtgattaccatttccattagtaatcaaaagccctttgctctcttcatcttcttcatactttgtttccccttcttcaatgcaagcactagtactcatttccaccccggctaatttttgcgccttcaaagcctcggcctcccaatccgtatggaggagcacgacatagagaatggatacaacgcaggctagttgggccgacatgaggccaaaccataggccggggaagccaattttaagccaaaaggcgagtccaacagccacaggggtaccaacaaagtagaacgagcctaagttgacccgagcacccacaaccggcctagcagtgccacggagaataccgcagcctgttgtctgcgggcaattccccagctcgcagaggcccataataggcataaccgacgcaaccagggccatgacaaggtcatcctttgtgaaaagtcccgcccatctttctctcaaaatcacggtccatgtcacgttgatgaagccaattaagaaagcgcaacctaaggcaaccatggcagctagcttggccttgtaagggttgccagctccaagctcattcccaacctgcatataacatgatttattaagataacatcaaaaagccccaaaacacaaaaccacttaaagcaaatagagaggaatgagttgaataaaatcaaggcctagaaaatacattacatttttgaatcattagtgaaaatagatatttttttttatattaatttacaaaatcacccttcttgtttcattttttccccttctttccctattataggaatttttgtattctagctttgaaagttaaaaaggacatattgagagagaaatgaaagaaagaaagttgtgtttaaaattcatgccccaatttgatttgatgaatgagaaatctttagtgggaactttgtgtgtgtttggttaagacactagccctagcacgctcatgaaaattggtgctttttaaacaaagttgaatgaaactctatagtgctgatttgtcgtgcatatacatagatacacccataaatatacatctatattggacagattgtccattttaaatacctttttgtgtatagtgcataaatgtccaatcatgttttcttttgtttaacctttttctttcttagtgtttttccaaaaagattaatctacagtacaattggtacaccacaaaagtatattgtccaaaagggtttttaggtcattttctatgggtaaaaatttaaatttagtgttatttctcactaaaattaatccaatccaatactaaaagctatcttatatgattgtctatagtatcccactattattcatgtggcattgtcaactatactaaaattgtattttttttagttttttatattgaaataatagttaaataattaaattttcttaatataaaaataataaaaaaatatacttttttttgtgtaatttatagttttctggttggaattgaaaaaaagtagtgtcctttaaattttgctattagagttgcccttataagacactgtattagatactatcataagagcatccaaataagatgctttaaaatagagaatttttaatatatttaaagaatttaactaaaaacacgttacatcagatactctaaacactttttttttttttattttaaagcttctttaaattcattattcatgctctacatttataaaatattattcattgcatcaattatttggagttttaatttttactttatatagggatatgtgtaaatattagtattatatgtttgaaatgaataaaatatattaaaatttgaaaaagtagaattttagagatgtattttaaaaaagttggtgtatgttgtaatgtaaaataaaaaaagtaaaattttaataatgtattttaaaagatagagtaagaaagctcgtgagagtgctctaagagtaagtctcataagacgagaaacaacaaatttctaaaattttacatatttagtattagtgtaacaccaaatatattattgtagttagagatggtctaagataatttttaacaattaaattaagtgagact

SEQ ID NO: 42846 - DNA, 2363 bp, Cannabis sativa
gcttgagctcaacgagtacacccgcctctcctttctgggtccacatcttgaaatgtcggggtcttgtggcagagatgatagagagtgttgtatcgaagatggccttcttgatggttgagtaattctatcgacgaggttaaccatcaatgtcattatcaagtcatgttgtgctaggagctcttcttgagcaatagcttagtggttcccactttggttattctctctttggtcttctccgacaacaggaggcagaggttctcttatgatggcgaagaactggtcctcatatgagtaaactatgtcttggagatgttgtgaatgtctatgcatggtggttggttaatactcaggaaaagacgtagatatagacttgccttttctatagatggcgctaaattattgacggtgagaactcgtcaacaaaatttttgttagaaaatcaaatgcgaaaggctaaagatgaaaatctttagagacactaagaacaataatgaagtaaaatcatattgtattgaatcactaagctcgcatacaaatagttattttccaacccttttacaagtattcaaatgaaatttttataattgagctctaatggctctgaaatacaagtagtcacaaaagttgatggacaaatttcttttgtaccatgaagatcagcgcgtgagaggagtagtggaaaagtggtagtcgggtgttagtttttattccaagtgagataaaaggagtgtctccactacttatacctttgtacccacctttttttagagatgtatttgctctaatggatttgtcctttgtatcgctttggtatctctcccactatgactaaggctcataatgcgaaaacaatcctaagagatttagttaagtgttgagatcttgtggcatgagtcctttgatgttggaacttagtagaaatttcttcctaagcctttcttggtggtcactcccttgtaatatacactctaagtatagctctattgtgtggatctaagtggcattagatagggaccaagagggagagtgagggtcaccaacgaccataacaaagaatagcatgaaagtttacacgaagtgccaccgtctcgattggaaacgaaagaaagtgtctcctaattaatcatggtactataaggagattggttatatgatctgttgtctaagggattcctatgtgaggaagaagcttgacgaggaaaaggagaagaagaaagaagcaataatcattctacctagtgtagcagaaaacatatatgttgatgaacataataatagttatataagtggggatgtttgttttctgagaaaggtgatgatggaagaattaggagaagatcgatattgatcatcatcatattcacaagctcatggttttgttggatatgatcctatttcaggaaatggttggtcaaaagtttcatcaggtcattgttgatggtcatacggcgtcgtattagtactacaccccatctaatattttttataataactataacaacaataatgacaatgttcatcataaaccacaagcagtagtagccaagttggtttgaggagctggagtattttaactggaatcaatacttcgttttccatcattagcacaacaaggtgttggcttaaaacaattctggatgagtgtgagagatgagtttgcttttcctctcaagataaagctcaatgaacaggccgggttgccgagtcttccatgctttatggaactccccctagatttgaagatgaagattatggagtttcttccgagtaaattaagacgagcaaaggttggagtgcacttgtatggaactcagtatgttgtcaacccaagaggaaagtaaccatttatgggagacacggattccatgctgtacgtacatgcaatcttcgccatcatggtcaaaggtttatctattggaaggtgttcgaagtttatagccaagaggttgttaatatcgatagatgctttgaagaaaatgaccaaagggagaggttgaaaactatcataccaatgctcaaaaataaaaaaatttatcatctttattttttataaaatttgaagaaattcttttcaaagagaaagataaaaaaagttccatgagtttgtgttggtattaggtttattagttttgattaaaatttattgtatttagatgtttcattaaattaatgataattgcttcaaattttaagctaccctagtatacgtaattgcacgtgttacttggcttatgaaaatttgtaatttgaggtacttttaggacctcaagtatgcaggtgtataccccattgatggcactattaggtactgttttgaggtccttttatacatcatccataaaaaaaatgatttcaaaacacaa

SEQ ID NO: 42847 - DNA, 3498 bp, Cannabis sativa
ttcagcaaaaaagaacaaatagttttagtagcagatcaaccctgagatttattggaccttaagtatgaacaaaattatttgggcccttataaaaatgtggtattttaaaaactactaaaaaatttaggtatttttaaaatatttttttttggtctttggggctttgaactgggtggaccctaagtgtaggtaggcccgactctaggcataagtgggctaggcttgtacttagggcccacctagctcaggggcccaaaaaaattctccttttaaaattacacttttttttactaattataaaaaatgccacatcttttttctaaataatgacccaaaaatattttctttactataacccactgaattttagggccagccttaagctaagcctaacctttcttaacccttagaagtcacaatatttgtgtgatataaattttagttaaaaaaactttgacaaataaataaatatatatttttttactacaagtgatatgttatgtattaactataactttttctattttaacgtggaaaattggtgcatgcatgcaggctaagaacacattgtgcagttgagccatatataattgcaacaaatagacaattgagtgcaatgcatcctatccatagattattgaagccacattttagatacacaatggagattaatgctcttgctcgagaaagtttgatcaatgcaggtggtatcatcgaaacagcatttgcacccggaaaatattctatggagttaagctccgtcatgtacgacaaacaatggagattcgatctacaagcattgccagctgacctaattcataggtatacatttgtttaattataacatataaaacacgaagataattatatttcgaacattgctatttagtattttatggtatctaataaagatttctaatataaaataagatatctgggacctggatatatatatgtcacatcatcatgttatgtagttataacatagatagactttttgtaaataaatatcatttttagtcacaacaaaaataagtacttattactaagaaagtagtatttagattgttactcatttaattttaatcacagcaaatgttgtggttaaaaacacatttagtaacaataaattatgattttcgtgattaatatttttagttatggactttttattagtaataatataggaatgatgatttatgtttagttacaattattttacttttaagtacaaattttgttgcaactaaaagtaagattattttgtagtggatgttgaaacttaattctatactatatacttttcatttatatgatctcatcataattagcttgaaattcatgtagaggaatggctgttgaggacaaggatagtgagcatggtgtaagagtaataattgaagactacccttacgccaacgacggtcttctcatatggagctccatcaaacaatgggttactgactacgtcaaccactactaccctatctcaagtgaggtagagcgtgatgaagaattacaagcatggtggacagagatcagaactgtaggtcacgctgacaagaaagacgcacctgggtggcctgacttaaaaacgaaacaagatctcatagacattgtcacaaacatggcatggacagcgtcagctcaccatgcagctgtcaactttggacaatatgcttacgctggctatttccctaaccgaccaaccataacaagaactgttatgccgtcagaagagaaggagtataacctagatgcgtggaaacacttcaaaaatagtcctgaagatgcccttttgaagtgcttacctacgcaattacaagcaggcctagttgtggccgtgttagacgtgttgtctactcactcgccagacgaagagtatcttggagacaagatggaaccctcgtggggctcgaatcttgttatagcggaagcttttaatcggttcaataagaggatgaacgagattgaaagtatcattaatgaaaagaatgataatgagaatttaaggaatagacatggagctggaattttgtcttatgaacttctcaagcccttttctgagcctggtgtcactaacaagggtattccatatagtatatctatttgaaataaattttaaacattccatatagcatatctatttgaaataaattttaaacattcatgtattatgtttttgtatttgtattattgctctagaataatataaccctaatattattttgtatactaatattattgtgtacatatgtatacatgtgatgccaagtattaattagtattacttaaattatatagtgatcgagttaggattttcagtatagcgggagagaggaatggaaaggagagagagagggagaccctctaaatacacaattttcaattcctctaaaaatgaaagaatttaaaaaaaaagattaaaaaatatattaaatgtcctttttacccttaaaaataattttttataattgtatttttaataataaaatagtaattgtaatatttattttactctctattccaaatttactcttaacactaaacaattaacacaaatgagagcaactatacttctaaattttctatccatcctactctctctttcctaccaaacataacctattataggatgacaatgaatttatttgatcttaaaggtaactccaatatagtaaatgttaaatttattagtattaaattaacaaaaaaaaaaatatgataaaattttagcactaaattttaatctattctaatcacaacactaaaattacattaaaatcatattttttattattatattattttattaagttataaataatcacaaataataaatatacaaaaaatttaagtataaatatattatttaaatattaaaaatcaataaaaaaaatagttagtgtagtttatagtgtcatactaataataatgagacattataaataatattttttttgagtacgtgagctgcaacaaaactgagaaaaggagaaaacagaaaacacaagctgcagcaaacacgaagaatggagagcaattaagttctccaagatcagtcctcatcacgccttagagcttcctgagcataaaggtgagcttctttattatcggtcctagagatgtgcttcagggaggcattagggaagtttgagagtgactgacgaatcatcgaaactagactcgagagagttgattatcctgccaactgctagtgatgagctgaaggcaatctgaaaccactagactagggtgaaactgagagttcttgcaccacaataagccttccaggagagattgggcttctgcaaagattggcaaagaggcccctggcttagagatggatcgacctgataaaacatgattagggccttttttgatggctgctcctagccctatttttagcgccttttgatcttgttacatccccgcttcaagcctccatttggtccttacacccacgaaataatgactcttatacacgagtatgccact

SEQ ID NO: 42848 - DNA, 4277 bp, Cannabis sativa
aacccggactcaaacctcggccccggctccagactcggccccaaatccaaaccctaatcctagacctgaaccctggcctcggacccagagccggacttggacacgaacctagaccttggactctgacctggaccttagaccccgatcccacacttggacccgacctcggcctcgcaccccagccctgcacatggccctaaccccagacttggtcctggacccgaacctcagcaccagcaccgaccccaaccccggacccagacccaacctagactctggacttggaccccgacctcggaccctaaaccccaggcctgaacccggaccccaatcccgaactcgacttaaataaaattaactaataaaaaaaatttagagaacatactttaatttttgttcttaaaattgagaaaaaaaagtagttacataatattttttttcaaaatcaaaattttaaaaacaaaacttttatattattaaaaaaaaattaaaaaaaaaaagtattaccaaacttcacctaaataagtgactgtgatttgtgagtaatggctaaaagaatggaaataaaatagaaaagaaatatttatggaaaaaaaacatatagatgaataaaacaaaaaaatagtagcatttttttatttttaaattagacaactaaaaattaatttcaaaataatattttataaaactatcttcacattttaatattttaattgagaattaaaattttgagaataaaaaaaaattactttcaattcttttaaaatacttttttcttattttgaatttcgacttcaacttagaccttggaatctggacccaaactccaaccaagacaagactcatactcgaaccccaacctaggacctaaaccccaaccccaactcggatccaaacccagatcctggacctagatctcgacccaaacctcagactcggacccaaaccccgaccctgacacggaccccagcctagaccattgattctgaccctagacccaaacttcgaaccccgatcccaacccgtaactagaccgcataaatagaatgaaaaaattacacaaaaataaatgtttctcttggcagagaaaaacataaaagccattgcaaaagaaaataatatatcacttcaaagaaatttgcgcattgggtgtgggtcccaataaattaagaaaaaaatgtgaaatggtgaaacggaagcagtgtatatattactgtgaattcacgtgggattatttgattgcattgacagagaaaaagacagcaagttatcacagaggatcccggtcccaatcttaggccatctttatttttcttaagctatatcaaccgaaaaaattaacaatgatatatataagtaataggaataacaagcgcatattatcagtggaagtaacttcgctctagatataaaataaaccaaaatgagtattacattacatggatgtatagagtaatatttcatagctagtttaggataatatactccattaactaccaatctaatttctacaactaatacaaccaaaaagaaccaagtaaccttagaatcagcattttaatcattcaagcctctgttcccatttcatggcgcttttgtctttcaagtgagaacaaaacgacagtgaagaaagcctgccaaattacactcaaatgttaaaacaaatatttctaacgaccaacaacaattatttaactaaatccaaatgaagataacataattaaaaaaagcttacttgggtcgttgttgattaacatagcagtccctccaaaactacaagtcccaccagtcctcttgtgcttctgccaatagctattgaaagcataagaagcatgagccacaacagtatcgggattataacaatttccttgtggcattatctcattacaatcagctccaccttctccacaagcataatccatggcagcctgaagtgtatcagcagggacattgggcttagccacgcaccaaagcttatggaccatccctatatggggtgaaggggcacctgggtggtatggtgatggatcacaaggaggcaaggtgaacccaaatggtggactagctgattcaaaagctggtggactagctgctggttcaaaaacaggggaactttctggtgcataagagaaaggatagtggggtggagagactatttgggccagtggaggagacatcatctggggtggagaggctatttggggttctgaagattgagggggtttggccgcattagaaggaactgaaaatgcaactttcggtaaagggtttggtctgactggtaatgggtccaatgcatctggattcaaagatgagagctttctactcatgggtttagtagggttgttattgactatcacattgaccttgttgagctcaaaaagtccaagctttttcatgcatttggaatgtgatgagaccagattagctgtttcagctggtaaaggagcaaactttggaaaaggtggatgtagagagtaagttgagtttgtattctgaagaaactccagaaggggtttggtgaatctttgtgcaaactccccattaaagtaggtagattctgggtccaaacaagcagatgaaaatacagctgagactttgatatctttctccaaaccccaccttgtaagggaatggtgaatgttctttagagatggtagtaaaagagaaagcttatgctcttgacctttttggcacataatagtactgccaacaactatggtggtgaaccggttggcagggtagtaagccagaacatgatccctaagccaactctctgccattaaaacactgcttgaaaccccatgaaggtctccactacttacagaagcagcaataggtaaactagggtgagacgacaccgtttttggcgcttctggagttgaaatgtaaaggttaaggagctgaacagattcttgaccagcacctgcaagagaagagcagccatgagaataataaatgatgaaaaaacaaacccagaaaaggaaagagaaactgtacaaatcgtagagtaaaaataaattcaaaacaggtaagagaagtagtaagttgcttacttgtaagacccaagaaacagaaatataaaatgggaaagatcagcaagaccatcttcaacatttttgttaagtgttacaatactgacccaggccctgaaaaggaaagatgacccagaaagctaaatatagcgagcttcaaatgcttaaaatgcacagaatgctatcatatatgctttacttacagtgagatactgaagcaaagaaaaggagttaagaggacaaagcaaagcaagttgttgatactctacaacgttctctctctttttaccacttgtaaatcgtagtgaaaaatcttccttttttgttatactgtaacaagaaaagaaaaagattttaattttagctcttcaagagtacaacggttacaaaagccaaacattttgtttgttcagaaaagtgaaaaataaaaaagaaaagaaattgagcaaggggttttggtttaacgtttcctagtgtcccaatttacaaggaggccatttgtcctttcagctgagtattgagacacgtggcagaagattaaaagggtagcctgggaaatgtgagacccccacctatgacactaaaccaacatatgaccgtacctagagagagagagagagagagagagagagagttgtcgttctcttctctatgagaatctattgtgttgtggggtagaggtttgtttttggcggtgtgttttgtaaaacgacgtcgttgatgcagtaaagcaaaaaagtgaaggttcaacgccagtcaaccaaagcagcagcagtgcagagcagcattctttctttgtttatcattatacgaaatgcatattttctttttcataataccaaagttaagaaaggcagacagatgagtggggaccactccagaaccgctaataaaaagaagaaagaaaaggacaaatgtggaacccactaccaaagcaaaatggcagcttgtggcccatactttcatcttctgattggtaagtaaatttgtaattaatggtggaatgattgatctttgactttggtaaaatttggtccacgtaattccactctctactaggttatttattaggaggttgggcaccataccttattattagaacattgttaatacataatagtgtttaacatctacgtgtttttgtaaaaattattatattaaattatataagatttaatatttagttagactaataacaatattaataaatagaagggtgttagagcacctccaaggaggcag

SEQ ID NO: 42849 - DNA, 1354 bp, Cannabis sativa
atatatatatatatatataacaggccttaaactaatcaaagggagcacacttttactgagcaaagcataaatttaccttggtatacttatagtatccagaaccagaaggacagcgatcaccacagttgccacaaaccagctccttctgttttattaaatcagcaaaatggtttgtataggatgtaagaggaggcaatttaactccataatgaaccggttccttcttattattccccgtagtagcttgagctgtaatgggtttgatcgaattgggcattgcaaccactcgaatcccatttggtactccttcttcggtcttaaccttagacccctcttcaaccacaacctcagaaccatcttcatcaccacccgaagatgatgcaccaaaattaatcaaaccccacttctcaagaaaaagaaaaaccctacggagcaaattaacatcacccaccagagatttacgaacctcagtgaacgtaagccttctagatggatcttccctgtacttgttgataatgaaatccctatactctttgtaaatttttggggttcttgagaatgagcttccatcaaagaactctttcagataaattctctcagtgtcatggatttcgtcccacaaaaaccaaccttgaacagaaattgaaacaatttacttgggaatttttgaacttagctaatattaagtagtagattttcggagggttttagagaattgacttactggagtggcttggaatggtgtagaggtcgagctccggttgttcgggtcggacatggtccggttgctgttccatctcaggaacggaccaagctgaatcgttgagtcggccgatttaactctccggtggttgctgttatatatatatatatatatataatatatatatatatgttctttcaaattagttatagttttttttagggttttgtatataatgaataaggtttaggaatttcaattgtgtattcagatttcattaaacaaaataaatttttcaagttgaaaattaaaagaaaaaaaaaatgaactctagaaaaatttatattgtttaatgataaccaaaagaggttaatacataaacttcttccataaaagaaaacttatcatttatgctaagtcaaaacatgaatcctaacattaaaattacactcatacgagagaaatgtctcctaaaaactagacaataaaattttttaaactagttgagcataaaagagtgtatgttaaaaggttatgagttggagcctcaaattatataatataatatataaattaagtaatataatcgctcaactaatttaattttttttagtattataataataattatttaaaaatataattctaata

SEQ ID NO: 42850 - DNA, 2190 bp, Cannabis sativa
tgtttttggagctattaactgaaacctctgttttctgatatggagaacaacaacaacacaatgtcggtgctagccaagactgactcggaagtgagcagcctaactcagtcatcaccctcccgatcacccagtcgaggtagcagaccagtctactacgttcaaagcccatctcgtgactcttcccacgatggtgaaaagaccacaaactcgtttaactcgagcccagtactgagtccaggtggatcgcctcctcactctcactccaactcctcactcggtccacactccagggagtcatcttccactcgcttctctggctcaagaaaacaaagcggtggcggcggcggctcgaaccggaaagggtcgagctggaagccgtggaaggaccagtttgattcgattgaagaagaagggcttcttgatgatgatgctaactctcgtggtctctctcgtcgttcttacttcatggctttcattgttgggtttttagtactcttctctgttttttccttgattctttggggtgctagtcggcctcagagacctaccattattatgaaggtaatatatatacacaacattttatttgaagaaatttttctaagattacttatttatctaaatcttaactaacatttgattctaagaaagtgtaacattcaattgcattgtgtctcattagttaatttatacactaattttacataacttgttcaatttctcaatggtaacctgattttgtgatgtaactcattattcttatcttttttgggttaaagtgagattagctagtgcatctgagatctatgcaagagagttcaattggagtgaattttaaaggaccaatacgaaataagacatttttataataattatatacaaaatggtatttttataaatttttttgattttgattgaggaggcgccatttggagtagaaattaatgagagaattcctataatatatattaatttgttgtttatgtattaaatacagagcattttgttcgatcaatttgtgatccaagcgggaacagaccactcaggagtggcaactgaattagtgtccatgaattcgacagtgaagctcacatttcgtaacacagctacattttttggggtccatgtcacctcatcacctctagatctctcctattctcaactcacagttgccactggaactgtacggacaattactttactactactactactcaactcaacatgactaattcatgagttttgtaataataataataataattaattgttaatttgcagataagaaagttttaccagtcaagaaaaagtcaaagatcgattaaggtaacaatgaaagggagtggcattccattgtatggaggaggagccagcttgatgagcatgaacggagtaccgcttcaaccggtgccactcacacttaatttcatggttcgttcaagagcttatgtgttaggaagattggtcaagcccaaattctataagaggattcagtgttcggtggttatgattcccaagaaaatgaactcacctttgactctcaaaaacaagtgcatttaccattaatagtgattccattctagagttattatatatatgtgtgtatggtgagttattttctcttttgtcatggattcaaattttcaggttttgtacatcgagactctctctctctcataatgggcgtttgttttttactatacaaaaagtttatatataatttggattaggaaagaaatggtaaattaaggccgcaccctttaaaacaaacttttatggttgtgttgtgttttgttagttgaatgtgtaatagaattcacaaaaagattaccttttttttttttatttacaattgtgatccatttcgttaagggaatgaaacattgaactacattaatttaaaccttatattaacaactttcaagagagttgctgtgttgacgagtgcatatttgtacatttatttttgttcattaattagatgaattattatttatttcttaagtttatatagatttgatgtgttatttagtatgcagtattaagtttaaaacagtgaaattatgataaaattagaataaactatacacatttgagcaaagtgctaaaattgggaagcgaataaatcgataaataagaaaaatgacaaaaaagtgtgtatggcgctacggtgatgtgtgtgaggcgcta

SEQ ID NO: 42851 - DNA, 4425 bp, Cannabis sativa
aaaaaaaaagaaaaaaatcaataatctcctttgtttgcacttcaaattatgagtgcatataaggtcaaattcacctttaccttcatttctattgacaaatgacaattgatcgtataactcgtcctttactaggctgaaacagattttagaaagaaccaaaaaaaaaaaaaaaacaaaaaaaacaaaagaggaaagatgactcgcgggaagcagaagatcgatgctcagaagcgaaatgcggagaagaatcagaagcaaaagggctctcaaatcgaggccagagccgttgctctcaaagccaactgccctatttgcaaggtttttctttttctttttttttttttaaaatatttatatttatcattttgtttttcaactctgtcgatcatcttcgttgttccgatcgtaaatattaaatttcattctgattattttgccagatgtttatttcagggcggatttacgctatatatctgttaaagcaattttttttattgaacttctttttgtctggttaagaattagggttgtgatctatctctatttgtgtcttcattttgaactctatgattcattagtgatcttttcttttcttttttaattacaacgaagattttaacttgattggtttaaggtaatcttgatggttataagtggatgcctatctggtttgttagatgcttcacactaaattttggttgtgggataatgtgatgatgtctacaaactataattattgtacttgctatatagggctaagagtatcaataagaaaatctcactgtttaagataaataaataagtaaataattgataagaacacttatagctggtggtaatgttgtatagtagttactacttactaggtattgatattttagcctgacccaaaatatatttctgtacttatgataacaatgctcaagataaaaaatttctgtgggatagctttcagtttgggcatctcttgttgttactgttagggagttctaagaattttcgtctattttcttccctcaaacagttaacagctttttaggaattactggattgtagattgggttactgagctgaactaatggacctcttctttctcatttatattcttcttcttcttcttctttttttgggcttgtgtattttctttcttgtgaacacaaaagttatccttttttttttctatgtgaaagtattacctatactagctgaattacttgaatcagtatttgtctatgcacactatctagttcttagtgttatgaactcaaccaaactaaacacaggcttttgacaatctttatcctaggttttttaagcaattaaatttcaaaacttgagaagtagattagtccttttgtggagtaaataactggatcagatttgtggagatctatgtattgggatgattgagcaatatcaattctcattgctgataccactttatgtgtgaaggacattttcttggtccttatcatgtggatgacttctaggtaattttgtactttacgaaagggaaagtcatttatttgaggtggtctctgagtgttgtgttttattcctaggtaaaagctccaaatgattgaataagtattgtttttctaaacaatgtggcaaattttctaggagatgaaataaacatctaaaaccatgtgaccacccaaaaagctatatttgttgcaagattttttatatctaggtctaatattggtcatttattttgtttttcagaaacataaaagataaacacacgcacattttctagtagttggatgtttggtataattgagaacgtcatttttctttctctgtttgtttcagttaacgtatggattgatgattatgtggacaactgttattgaaatttcagggttttgactttcttttcccaagggttatgaattacttactcctgtgaaataaactggagaaaaaactaataaagactatcaattatgattagttttcatctccttggcatctgatagtgaagataaaaatgacaccattcatatttatatattttcttcaacagtatgtgtgtatcaaagtatgtatatacatatatatattgtgcttagtaatgaaaaaacttagcaataggaaatggtcatcaccatccctctgtctttggggcttaattcttaaagtagctaaaagcatgattagctcatggcttcagtaggttcagaataatttggaaatactattgtgttttattaaataaatttatagaattggaaatggatttgtcaaatggttcggcatgatttatacgcctacaaggtttaagaaaataaataatggggaggcatgtagtttgctattccctgttattggagaatgctttcttctttaactaaggaacaaggcttgtggttcaagttcttcttggtaactaataactatataacaattgttgtggtttcttggtcccaaaatattgttaggttaggtggggagtttggttccaatggaaaaaaaaaaggaaaggaatattgataatgtcggggaaatgcattatgcatcttttacggtaacaggaagtggccccttagtcttttcagaaaaagataaatacttatagcaatatactgaaggcagacatcatgtccagtcaattcgataacaagatgaaatgaacattaagtgtttaatttggtttttaatgtagtttcatttaagagaggttacagattttagtttggtttagtcattaattttcttttgcttcaaatattatatcttccctaattgtcctattggattaaataataaacatggtctgaagttattcactctccccttcattttagattgcatgaaaatttttccttattgctcaactaaataagtgattccagattatttttctcatatatcttttaaaattgatgattagtttgcttaagagagtggaatgttatattgtaatgttgtttatgctgttttgtctgtatcacgtttaattatgtgataccctgtggattttccacatccttgtattttcttttatagcgttatgagtcttatgacattgcctcaactacaactttctaattctggtgattgatagcctcataattccatgaatttatgcatcagacatttgacatatacttgtcgaactcgcatttttactttccttcataacgacaaatgcatgctttcaggtgcaactagcaaacgcgaaacaacttggggatcattatgcctccaaacacccaaaggaaaagcctcctactgaatcagagtgatttgttgaaaagaagcaaggcaggaagaagaagatgaagaaaaaaggctcagaatgtgtgtttcgagcttctatgtgtacttgtgaaagttatgaaaatcaaaatatcaagcttctgtgtatttgttaaaattgtatgaatctaaaatttgctgaaattattccccaccaggccttatggtccgtggagattgtataactatgatggatgattgataaaacatttctatcacatctggagttcaatcaatgcatgtaaagtggttgttttggcacgtttttagttttctttgcacttgcagtagcattgatatcaatttggtatcaagtttaatacacaaatcatcggcaaaataagaaaggcttacggtttagtgttggtgaatactgttgtctaaagttcattcaaaaaatgagttttgaaactcaaatagtccttaactgtcttatatgagatctttattatttagtacaaccacacaaccctacttcatacaagtatttcttttccttttttgtataaaaacatgatcaacttcataattaatttcagcagcctacaaacataccccagtcacaacagctccaaagccaatctagtcatctagatttacactagcatagatttacagcatcacctcacctaaatccgaaggagcagcatgcacactaccattaacagtccttccagggagtcaactagtcaagtattagtacaagttacaacatcagtcaaatcataattaaatctttccagaatgataataaaagtatgtaaagtctacaagtatttgtggcatgcaaattttagtcaaagaaaaaaaagattaaaagaataaaaattagaagaaaatgttttcttaaattttataatttttttttaacaatatctcctttgaatggttgttctattccattgttttgtagtgtctatattgttttgaatattacttagcatgggaatttgcaatctttaaagtggttttaggatcaaatgatgcattgttttgagcagtagttttattgtttgtattaattcttgaacttctttcagtgtgacaatgcttcttacgtcaagattggacagattcgtcaagttgttcagatcccacaaacgagtaactttataataagtaatgttgttagaacgtttagtcatagtgaaggtccac

SEQ ID NO: 42852 - DNA, 4338 bp, Cannabis sativa
  modified_base (1159)..(1169): a, c, t, g, unknown or other
ttttaatattttttcttccttccacttcttacaaaatatacatataaaataatatatattttaaatattaagtcaataaattcaaataaattttattgttaaagaaaaaaaataatataaataactttaataaatattaaaagtaatttttcaaaattaatttttttagatattataatgtacttgtaattttatagagtataaagataatttccctatttttacttatttatcttttaaattctatccctattttttcttaagcaaaaaaagaaaaaaaataaaaataaatctatcgctagtttcaggccaagtattccaccgaccctaaagtgttcctaactccaagtcaagttgtcccaaaacaatagaaaaatggaatttacctcgttgtaataatttacttaaagtcaggctagtcaggccgccagctcatctatttggcaaattatacaaatttaaggcctcaaaaggctggctgtattcccagacatcatcagatattgttgaaccgagttcaccaatctaatgttatgtaataactcaaactccaaaatatacaataacaagtattttaacgtcttcaaatattaatttttattttttaatattgtatattaaattaaaatttatgaaacttaatatcaaacggttaaatattattttaaattttatattgttttaaatgttagaatttaagataaagtaaatgagtttatcttaaaactaattagtaatgaaaagagtagtctatttctcttatatattcttatctttctacaaattaacgatgtgaaactatttaacattcaaataaaatattcattaaataataattcgaacaatgtacttattaaaataatagtacaaaatattctaaatttaattttcatcaatttcttaatataactaatctgaagtttatttgtagtatgagcaaatgttaaaaaatacaatcaatttgggcataatactctatatattatttttttaacttttttttttttttaaaatttacgggttgggtttctaaggtcgttgcaacggtagttgcaatagcggtttctgtacgattttttgttgcaatttaggttacaacgctagttgcaatagaggttctatgtagaattttgtagaaatccaaaaaaaaaaaaaaaannnnnnnnnnnaagtgtaaaaataaaaaagcctatttatattatattctattttaacgagaattgtaacatttaaaaaaaaaaaatacaaaattggaattatcaattaacaaaactgatagttcataagtataataggatccaaaaagatatatcactttatctctctaataaattaaagaaatagcatacacctcaaataatattgacaatcctccaagtgacaactaactaaacattttttttttgtttggaaagcaactaaacatttaggttgctgtattatgtttactattattatttatagcctggtcttgttttctcttcttgtattattttcctcctcgttactttaatggaccatcaccatagttctgatccagtaaagctagctagaataatatatagaaccagtcttaattagagtaatttactaagagattaagtaacgccgcctcttgagagttggcaaaaaggtgcgaaaactaaatataaattaaacaacttgttatttaacggatattatggtcttatttacctgcaccactaatgaaaaatcttaatattttacataattataatcatatttccttattaaattcttctctactccctctcgtacgttcaacccctccacttattttcacatgcaattaatgtatagtctctttcctttgtcccttcatttttttcctcgaaattaacaaacgactctatctctatgcaataatttataaacatttatatatatatgtccaagtctttgagcccattttccatatgttgaattagctcttttattatttagtcctgctcttcagttttttctctctttatttcattattcttagcctcttaacaatacatatttctgcataataattaatcctttcatgcttttctaaattgcattaggagtagcaataaggttaatttctgggaatctatatacataatttataaatatatatatatatatttagagagagagctatgaaaccagtattgctgcatgggattcttcatgtgacaatcgacgaggttgataagctttcaggtggatgttgctgcatgtgtttctacaaggtatcactatccttaaactcatttcattaatgctaaacacaacacttaaccaagcagcttagtattattattatttattagtagtagtaataaatgtgcttatatatgttgttgaaaacttccactgaaattatcagctgacgagcaaagctgaacacaaatttgggcttaagaggaaagttacacccagactttatgcatcaatcgatttagggaacaccaatgttggccgaaccagattgctcgaaccaacagcctcctcgaatccgcaatgggacgagacgtttcacatttgttgtgcacacatgacatctaatgttgtgttcactgtcaagcaaaatcgacttggccccgatgaggagattggaatagcttattttccagctgagaaacttctcagtgggaaagaagtagaccaatggcttcctctcttggatgacaagcatcacaagcctctaagagatggatccaaaatccatgtcaagttgaaatttgtagaggtatctaaagacattaactggtcacaaggaataaatggcaatgataagtttcaaggtgtgccttacacattttttcctcaaaggagtgattgtagagttaccctttatcaagatgctcacatcccagataaatttatccccaaaatctctctttctgggggtaagtattatgagcctaatagatgttgggaggatatttttgatgccatttatgatgcaaagtacttgatttacattgctggttggtctgtgtgtactagaattactttgatcagggacagtaggaggagaaaggaaggaggcgatttgacacttggcgagttacttgtaaagaaggctaaacaaggagttaaagtactaattcttgtttgggatgataaaacttctctgaagttgcttaagaatgatggagttatgtctacacatgatgaagataccgggagttatttcgaaaacactggtgtccactgcgtcttgtgccctcgaattcctgatggtggacaaggcattattcaggaattgaaggtttccaccatgtttactcatcaccagaagacagtggttgtggatagtgagaatatctcaggtgatggtggaatatcagagaagaggagaattgttagctaccttggtggtattgatctttgtgatgggagatatgacaatcctaatcattcaattttccggactttgaatacaacccattctgatgattttcatcagaataatttccgtggtgcctcaatagaaaaaggtggaccaagacagccttggcatgacattcattgcagggtagaagggagtattgcttgggatgttttgtgcaactttgagcaaagatggatgaagcaaggtcataacaaggacttgctttttgaattgagaaagatacaagacacttgtattatacctccatctcctgttatgttgttacctgaagaccatgagaattggaatgttcaattgtttcgatcaattgatggaggggctgcttttggttttcctaccactccagaaaaagctgctcaagctggtcttgtaagtgggaaagatcagataattgacaaaagcattgagtatgcttatgtcaacgcgattcgaagagctaagaactacatctacattgaaaatcagtatttcattggaagctcctatggatgggactcaaaagagttcaatgttgacgaggtcggtgctgttcatcctattccaaaggaattgtctttgaagattgttagcaaaattgaagctggggagagatttgtggtctatgttgtcattcctatgtggccagagggcattcctgaaagcggttctgttcaggcaatattacattggcagaaaatgacaatggagatgatgtataaagacattgctaaagctctcaaatccaaaggacttgatgcaaaccccaaagactacttgtcattcttttgtcttggaaatcgagagataaagaagagaggagaatatgaaccctcaaagcaaccagaagatgattcagattatagcagagctcagcaagccagaagattcatgatctatgttcatgccaagatgatgataggtaacatgccagtttaccaagattttac

SEQ ID NO: 42853 - DNA, 7771 bp, Cannabis sativa
  modified_base (4964)..(4970): a, c, t, g, unknown or other
actctcctatctcattctcattcacaatatttaacaaaactattagtttaaaatactcaatatatgcttatacaatacataaagtactctcctatatcacatttctcattctctatatatacacacaatacatatttaataatatagaaaaactcttaaaaaatttagaaaataaaaaataaagcaatgtacattactaaaattcgtagaaattagatttataccttaatagatgttgtacaatgttttctctactaaaaacggtggccggaggtataaccaccacaatcactacctctaccttcggtttaccttaaaaaatgaggaaaaatgtgactttttcaagtatatagtttttggtatgagaaatagaagatttagaaataaaatgagctacaatgttaaaaaatggtgaaatggggtgcttttccgtggtggttggcggagagggtttggggtttcattggtttggcggtttctgggttggctgatcgaatgaggaagacgaagcgctgggctagtgttataaacccttttggcatctcggttatttccaaataaccgacgccataagtggcgtgaaatttccttctaaaaattttcaaccctatggcgtcggttatttattattgtgctgaaaaagtgcctctaaatgttttgtagtagtttatgttagaaaaagtaacatagtaatgaccatgataagaatatgtttatggtaaatgcatattgatatggtatctgtctagactatcataaagtatgttggaaaaagttatcatgacactcctaaaaaaggaaattttaaaagcaaatagaagttgggattattgcaaccccaaacgcccaaaagtatcagctcttatgtggtgaaaaataagttttaataccaatgcgggaccaacagatgtattcccctctagactctcaccatgcacacttgggctttgtgtgatattcacagtcattgttggatcaacttcccactctcttttcatgaaagaatcagctattataggaatacaacacaatatatgtacaatattttgttttacttttaattggttcaaataaagtctgtataatatgagaatgcacagtactattttaaaattaccttatataaatattttgttctcaaaaataaaatatgatatatatatgaaaaagttgcaaattttaatatgtcatctcttaatgtgcctataatagcagtgcatttttcagtaaataagcataactgtaaatatctttaattaattatttttagttatataattcgtcatcactaaatcgtttaataacatttcttgattaatttgtcaccacttttattgatttttaaagagtatatacttgttgggatcatccctggcctagctattgctagcactttttggcactttttggcatatctaacatcatataataataataataataactctttttttaagaaatatttatataattttagattgaattaatataagaaatattttgtgccaggtatgatttccatgtatattaaatgcaccaaattatagaaaaattactttggcttcacagaaggaaggaagcatgtataattaaatgaaagtcgggatgagaataagcaacaaaaaagtatttaaatggaaaaagcttaataaatattgcgtataattaaagcccaaccattgcagcttataataattaggtaagagatagttttcaaattgtatatgtagcttattagctagatagctttatctcttaaattcttaattgttcacaaactttttttccaacgcctttatagatgataatctttttcttcgtgccttcttcttctgctcaaatttgaccaatatatatttcttgaaagtatagcaataattaaatattgattgccctgcatggacatgcatatttatattatacatatacattatatatgtacacattttccttactatataattttatggtatactacaaaatctcacttttagttacaactcacgttttctcccaattcgcaatacatatattataggtcttatattccctcttcatattaataacagcaaatgataacgtacgtaatatataacatataatatataatatataaaatatatatatgtcacattaagcgaaaaaccatttttctttttttatagagaagatagaaaacattaatcgtacacgtcgtagtagtcgtattcggatcgatttatagcagagatacaataaatctctttaaatggtattggaaaaaacggatatagctacaccaagagcctttctttaccactaatgctgggcatgagtcattaattatgagtagctccaattgaaactaccttataaatatttatatatatacatcaatagataaagagtgaccatcttatttctccccccagtacttgtttaattaataaattatagatacacgacctaacaaaaaaaaaaaatattatagatacacgaaaaatatttcatattaatcaatccttaatgggctctacttaattaagatctctattaattatgcaccatgtttagtcaaacttgtacaaacagtttgacatagtgcttaatttatttcctgattttttttcattaatctgttatttacataataaacacactagctatccttcaatggtaatttttagtcataatatagatttttaaagattaaatatttatatcatttgtaatcactacaacaaaagaaattattgttgacaaaattaatatgttgtgactgaaatgcatgtttagttttatatagtaattcatatagcttttgcactaattaatactaagaatttcggagtaagtgatgacatgatcatattgaatcctaaagtattctcacttttataatttgtgaaaatggtacttctttttgtgatgatgatcataaatagagattaattgtaggtattctgtatgtgatatagctaatatataaaacccaataaatattagaaactatcatgtaattaataaatgaaaactaatcatctttatactatatataattattagtattgtcaatggtattagtcttattcattcaccattactatcgaatgtttctaatacaacggtctgatgatttaatttaatttaattatacgtttccatgttatattgattacatgacagtttcttttccttattattataacatgaatattgtaataatgttacaattctctatgtttccaatcaaattaataataaatataccggcaattcggtactacaaaaaatcttacttttagtcataataaaatttgtgatcaaagttaaaaaaagttctggctaattataaattatcattattatgttgtgactaaaaggtccgtggctaaaaatattagttacaaaaattacaatttgttacgactaaatgtgtttagtcacaactaaattagtgacaacttgtaactaaatactatgtttcagtcacaagtaattttttgttgtgactaaaagtcacatttagtcgtaaaaaatttatgttgtgactaaaaatttgtcactaaaagtaacagttttttgtagtgggggcctctcattaattatttgaatgtttatgagcatttttattagacattagttgtgtatagcaatttctagatatatcatcttacaattagttagcggtactttttaaaaattattacataaaattatataagatatgatacttaattatgcaaataataatatagacatataagagggtgctaaacaacccctgtggattataattagatattttactttcatcaattatatttaaacaattgttgaaaaaaatatatattctaataaggacataatgcagtataagttcacttattgaagctaaaatcatcacccgtcatatctaaatgttataatttgctctactattatctactaataaataaaatttataagaaaaataaaataataattaacaaaaattaatgaaaaaaaaaagaataataacaatgcaaaaactattaatattatgcttgtatataatattctacaatattatatatttacttataaacaaatatcaataaccattaaaaaaatattgaaataaaaaatacaggagaaaaaaatgctagaaaaaaatgtagaaagacttaaaaaatatattttaaaaaagaaaatagtgatatatttttttgaaaaaaaaagggaaaaatgtgaggtttaaaaaaaaataaaaacattctttatcaaaaaataaataaataaaaatattaataattggtacaaacaaaagaaaataaatacaactccaaacatgacaaaaaaagccacaaattactaaatatcttatttagtttgagaaaatacaaaatcacctaagcggtgcggaacaagtaaaaaaatagttaaacttctaattaaagtgaataaggatatgacatattaacaacatctccaatggagagctaaaattgtagtgtagatgcatattttagtacatcttcataaaaataaattctaatgatggtgtataaagtagtcaaaatttagcacatgcatgctaaaaattgtgtcaagtttagcacaaaatatagcatagactaaattttagacacaaatattacattttcatttactattctcccacttattaatgtaattaatcattttttacattttatttatatgtttaataatatatatttatatatatacttttaataaaaaaaatttaatggttttgttgatattttttcacgcatttctatcaaaaaagaaataatttcaccctaaatatatagcactattataaaatttaggtcaaatataatattgagtaaatttttttagtttaacttatacaccatctatgagacactacaaaaaatcttatttttagtcacaataaaagttgtgactaaaagtaaaaaaaaaaatgtgacttattataaattatcattcctatgttnnnnnnnaaaagtccgtggctaaaagtattagtcacaagaattacaatttgttgtgactaaaatggatttttagtcacaatacttgttttgactaaaactaaatcagtgacaacttataaataaagactatattttagtcacaagtaatattttattgtaactaaaagttacattttgtcacaaaaaaattatgttgtgactagaaagttgtgactaaaaatagcagtcttttgtagtgggagatggtaaaaaactgctaagggaagtggcaaacacgataaatagtgacatttcgttattgatgtatttcaatattgagtctcaaaatttttaatttagtgaataatatgagaacctgctaattctttaataagtgtcatatatttgcataatgttagacatcctaagatgtcaaataataatgttctcttaataataataaaaataaatgaccacaaaaaaatatgtacaaaaaattatacatgaaaaacccaaaaaagttgtaaaaaaatttataaaaaaaattgtaaattcataacaaaaaaaaattacgtcaaattttacaattatacattaaagcataatgctaaaaattaatgcaaatatatcacaagttattttttgtcaaatataacaaaaattttcacatcccattaaaaattaatattctaaaagaagttaattataaatatatgtacatattattaacaaaaaattaaaggacatattaaggtgccaaatactatgaagggaaatatattgttattggtacattttagtatcggttctcacaagtttcaatttagaaaattgctaaccaattattgtagtgtatgtgaattgatattgtattgaacaatttaaggtgccacataacaataattgtataaaaaataatttacaaaaaaagaattaatacaaatatcattcataaaaattaaaaaaaaaaatcactaaccaattattaaataatacatcaatataacattgaacaacttataagtataaaaaaatatttacctacataacaaaacaaaaacaatcaaataaataaataaaaaaaatagtatatatataaaagcaaacgacaaagataagtttttttagttgtaacatttatttatatataaatgctgtaagtatatgtatgaactgctcatcgaccagctttttttttttttttgctttgcctttttttaccgttttaatattatatttttattcaattttattacaactttttctcttatcgctcacaaatttatttttactttttatctgtgtttgttggtaaatgcaaaatgtattttttaaataaatatacataactcattaaaaagaaattatttttcagcaaaaaagaaaatgaagattatagcaattaatattttcgtttgctcttttgtatcatttcttttaccaaattttactatttcaaacttttgaaaaaaaaaattaaacattggaaccataacaagtttaaataatatatttataatataatattgattagattattataaattatacaaaaaaaaattataatatatgttttatgcgagatgcaaaataactaaatgaaaagttttaatttttatatgttaaattatttgtatgagaaattataataatatattacgtgttagatttatgattgttaaatatattttgttttaaatgttaaacaattttttctttcacttatgtacacttttactttacaagtatacataaatacatatatatatatataatatggaacactttttaatttatattatctattcatggttactaagcaacttaactataaatattaatcttaaaaatattaaacttaacaaaaaaaaaaaaaacagagaaaagtaattttgatttattctgagcaaaatgtacaaagcagtcgaaacaaagaaatgaaagggagctttatatagagctcagcctaagtcggttacaaacagggaaaataaataaagaaacttaaccaactaactattaacagaattcctaactactttcctataacagaggagtagactaaagaatacaaaagaaaaaagagatatgttgcagcggggtacaggatagtgtatatgtattctttaataccccctcctcaagatggagcgtgtatgtcattaacggacatcttggaaacatgggagctcaaaataggaaaggttagtggtttggtaaaagcatccgccaattgtagtttgctggatatgggaatcagcctgattgttgagttgttgattttgtctctgatgaagtgacagtcaagctctatgtgtttggtcctttcatggaaggttgggttgtttgcaatgtggatagctgagttgttatcacagtagatgaaggctggatgttgttgaggaatgtgaaaatcgtgtaacaagtattgtaaccatgttatttcactagtagttgcagcaagagcgcgatatttagcttcagctgagcttttggagatggtaggctgctttttcgtgcgccaagagataagacaatctcctaagaagatacaaaaaccggttgtggatcgccttgtagctgggcaagacgcccaatcagaatctgagaagccacggaggtgtaatgttgatgacttggaatagagaagtccctgtccaggatttcctttattgtagcgaagcagatggtgcacggattggaagtgtgtagtgtgaggatttgccaaaaattgactaagggagtttacggtaaaagtgatgtcaggtctagacagagttaggtacaagagtttcccaactagctgtcggtaatgagagggattttcc

SEQ ID NO: 42854 - DNA, 3316 bp, Cannabis sativa
  modified_base (62)..(62): a, c, t, g, unknown or other
  modified_base (3256)..(3285): a, c, t, g, unknown or other
aatagttcaaggggaatttttaagggtcaaaaaagttcaggagacataatttggtacatgtnaaagttcggggaaaaaattgctaattagccatttttttatagtgcatgtcatttatgtacttaaaaattatcttggaaatattttctttctatatggccaattttcttataattacgttatttaattagaaatcataccttaatatattctaacattttttcttttagacaaaatgtgctgtaataagattttgacctttatagtatatctagctagctgtacataaaattaatgatatatttggatagacaataagatttttatatactattttcttatcatcaataattaattattatgtatataattattagacaaatgagttgtcttttaacatggttatttggtgaccttgggagtttggtgctttggtctttcgtgctggtattttgtttttttgaagattttctcaagtttctttagtgttctctgtttttagtactatttctttgcgttgctatggactctggacagacccatcgattatacatggataaacaatatgtatccatcttgataaatgatgatgatgatgagggcctcatttttgatgaaggagtagatggattattggagattgatgataactggttattagtggggtctttcttgactaacagatctacaaattttcaagctatgcaaaataagatggtcatgctatatatggcgactggggagaggtctttatgttaaggaataggatcctaatcttctaattttaccatgaagtagatatcgaaagggttattgaaggcagcccttggacattcaatcgagccccttggatctttgaacatgttaaaaaggagaaaatctgcatcatgtaccccttactaaacttgaactttggttccagttgcataatatgcaagttagttttatatcagaaagaattataagaggtgttggtaagcttatcaaattggatcctaacaactttttgggcgtttggcgtgattatttaaggattcgagttaagcttcaagttgttgtgccactgaaaaagaagaagaagttggaaatacagggtggaccgatgtgttatgtgacttttaagtatgaggatttacccacattttgcttcatatgtggagttcttgaacactctgagagattttgtgaaagattattccacacgccaaaagatcaaattgttaaaagctatgatcttgagttaaaagctttactaagaagacatcactatgctaatggttcaaaatggttgagatcgagggtggctatgaaacctggttcttcaacggactaaggggagagcagtaacatggtggtcaacgatcatattcgatgacagcagtggatgttggtcaacgcccattgattcctcacaatcacgaatctttattacaacctagtaatattgctactagtaatgtgggattgaatggggagagtttagtgtcaggataaggatatggtgtgttgggaattaatgaaaattcccttcaaataggggtggtcaacgatggagaggttagtggcgccaaataaggacatttcaaatgatgggctcttgttcctcgatcttaaaagaagaagaagaatgggctctgacaaattcagagcaaatgtcgtatcttcgaccaatagccttatgtaatgttatgtataaaatcatcactaaggttatggttaatagaatgaaatcgattatggatattattatctcgaagaatcaaagtgctttcatcccaggaaggttgatttctgataatgtcttggtctcgtttgaaattcttcactacttgaagaggaaaagaaagggtaaagatggctacatggctctaaaattggacatgaacaaagcttacaaccgtattgagagaaactttcttgaagctatgctttgtcaattggggtttgcagatgcgtgaattcgacttattctgaattgtgttacttctgctagttaccaaattattcatagaagttatgaagttggtccaattattccatatagaggtatcggctaagggaatcccttatctctatacctctttacattgtgtgcggaggcccgctcagtgtttcttcaaaaatacaaacaatgtggtttgcttcatggttgtaaagtggcaaatggtgccctaagaatttcacatacgctcttcgcttatgatagctacttatactataaagctttaagaattgaagtggttcaaatccaagaaattcttcacaagtttgagttggcttcaggtcaaaatattaatttttctaagtcatccatattctttagttctaatactactgtttcactaaaaaaacactttgtagttttttgggcatgattgtggctgctgacgatagtctttatttggggcttcctagtactatgactcgtaataaaactactactttgggctatctaaaagaaaaagtgaggaggaggcttcaaggctagggtacaaagtttctatctcgaactgggaagaaaattttagttaagacgatagcacaagctctaccaagttatgccatgagtatcttcttgttacctttggagaccattagagagttggagagtttattgtcaaagttttggtggcaattctctactagctctactaatagtattcattggttatcttggaagtagctttgtaaacataattcaaagggcaaaatagatttttgtgacttgagaaattttaatctagcttttttgaggaaacaaggttggaatctactcttcaaaccagattctttagtggcaaggatttttaaaaccaaatattatcctcatggttgttttcttttaggtaccattggattcaatccgaattttgtttggcgtagtgttttagaggcgcaacagttagtatcaaaaggggttcggtggactattgaagatggtaaaaacattattgcagttttgggtgaaccttggctccctaataaactgaacccgatggttatctcctctaatcctagccttattggggctaaagctagtaatcttctgaacatgaatggtacagattgggatactgaagtgctagctgatcttttgagcaatgtgatcaagacttgatcgtgaaaatcccagtgaaaatccaccaggtcgtgactgtcttagttggtccctggaattgtctggtttatacactgtaaaaagtgcttacaagcttgctcaagagactcatggagttgttgttggaaattattttannnnnnnnnnnnnnnnnnnnnnnnnnnnnnttattaacatcctaaataagaactttctaaa

SEQ ID NO: 42855 - DNA, 3176 bp, Cannabis sativa
tttattatagaaccagttttgtttatatttatacctcagtttttttggaattgattctcatttttttttatcataattgattcactttgttgtggaactagtattgtttttatttaagttatttatgtttaagtattttttaggaactgattttctctttattctttaattataaccgatttttgagttattatgtatttttttactcttttttatgtggaactggttctattttaggtttaatgtctgagacatctaactctggtgacaataaaaactccgatgacttttatgatgacggtgacaactccagtgattttttcggcaaatttttttggcgatggtgattttttcgacaaatttttcgatgatgatgactttttcgtcaactaaactggcgacattgactttcctggtgccggtgtcttctccgatggtatttttcatttgaagttttatcaaatttaattatgatattttgcttaatttctcatattttaaactttgattactttttaatctaatatctttttgtattatttatttattctaaaatttaaatcattttcccatatttataaaaaagaattctaagaaataatccagtccaatctaatttaatccgggacgagtttcattgttccattgttacattatcatacaagtacaatgaaaaagcaataccaataatgcatttatatactttaagtaaagttatttatcatgtctctaaaaacatccaaattagtggtagaacttattggaaatcctttttgaaatatagctgcaaggtttcttgctcgtgattttatgtcatcgtcccccattagtgtctttattcccttaacaatttcatgtttcttaatcttttccgataaattatccgaaatcatgaaacccaatttcagatgagccacaacgagtttcgcattataattttggtctcctctaatgggccaagccaagagtgggactccaagcccaattgcttcaaccgtagagttccacccacagtgtgtcaaaaatccaccaatcgatgaatggcttagaatgagtaattgtggggcccaaccatttattatcaaaccttttgggccaacttggctagcaagcccatgagggaaataatcttcttgagttggtccgcgacttggtggaggacctgaccttcccgtcccggaatggaccacccaaataaatggttgggtcgacgcctctaatgcatctgctagttctgagtactcttccattgatggactaacctcagtgccaaaacacacatacaatactgagccacgtggcttcgaatccaaccattggatgacatcatcctctgaaacattcgattgtcgatttgtacgaatttcatgatcatgaagaatcgaattcgaactaatggaattccaaaattgttcgggcaaaagtggtcccacaccccacacaggctttcctatttgcttggctaagtattcgatgaacggacgttcaagataatcacacgtgttaatcatcaaagcaatagaccctttcaatccatcaacccatggtggttggctaccatgttttggtggacctcttggtcttggtccggccctacctaaatagggaggtggtggtgggcctggaggcccatgtgtaccatccacaaacgggccttgatgtccaacaccaattaagtgtagtggaggaccaggtggctgatgtggtcgttgattggtatccaagtaagtaactgccatttcttcgggcaatccagggagcaaacggacctcaccaggcttgagatcaatgggttgagccttccagaggccatactccatggcagctgagcaagcaccagaggtgaagaaaccaaccgttgggacatcaaatttgataaagatctcagtcgtccaatccatcatgacatcaaggatggcacaaatgggccgaactgaatttgggcctgttacttgggcttggaggaggttttcaaggccgatctcgaattgaccagggttaccatggggaggttgatcgcttgagtcaggccccgggtgcgtcgatggcgccgaagtttgttgaatttcagcgatttggagaagtggatatgggcggagggagaagggaattgagaaggagagatgggaaggaataacaaggagagtgttgatgtttctagaagctatttgcttgcaaagctccatgcttgggaaaagatggccttgcccgaaaaatgggactacccatatctccttcgacatattatggattagtggatttctcagtgctttgttttcactaatacaaacttatatatataaaatatatatatagagagagagagaacggaaaaatactctgttgaagaaagcttagtgattaagaacgaaaaggagttgcatttatgagttgggaagaaatagtgtttgagttttgactgttagataggtgtgagattgatatgtaatacgtgggactgtgatagagagagaaatagaaagagaggtaggactgtgaatctggttggtttgacttgcagagaaaagaaagttagttgtgttcatttattaaaaaataaaattgttgggattttagttttgtttttaattgtattttttttaggacatagagatttttttatttcttttcttttttttttaacggaaagaatttctttcctcaaacaatgaaaacactgttttttttttttaatatgattttagtttcttttttaaatacaaattttcttttaataaatatttattcataagcacatattaaactttcagtttactgaatcctttcaaattatttatacaatttttgttggttaattatgatttttatcctttaaattatatgtattaaattatgctctttgaatttttaaagtcgttaaaaatattccatgaactattaaaattgttcgatgtaagaacttttatcaaattttagtaaaaaagtctaacataaataaaagtttatggagtataatttagtgcatatcaaagtttaaggagcataatttggtagatatcaaaatttaaagagggtttagtagataaacaatcattgaaataataaaattgaatgaaattagacaaaaattcttaaatctaacaatcttaatagttcagaagaatttttaagaagacataattttatacatgttaaagtttagggtgattctacaa

SEQ ID NO: 42856 - DNA, 2556 bp, Cannabis sativa
  modified_base (65)..(71): a, c, t, g, unknown or other
catttaaattatttattagattcgtaataattttggtttgattttttaagatacatgttgataannnnnnnaaagtttgaaaatattttttaagtacagttaatattttttattaatttaatatttttatccaattttttaataatttttattatttcttctgaataaatagcatactataattgctttataaaagatagaatactataatttttaaaatatatttttttttttaataaaatggggcaaatatttgtattggtcaaaatttagggggtaaaaatgctaatttttaacggtaaagaaacagattctaacaaaaataacataattatgtacttgttatattttagggagaatttttaacaagccgtatatattacaggggcaaaatcatgtagtaccgaatgttcagggacaaaaatactaattattcaaaatataatttgacataaaacaagaccctcttgcaaccaaatgagcggccatatttgtagatcgtttaacaaaagataaagacacattattaagagaagagagtaaagagagacaatctctcaccaacatacgaaactgagatggcattttaatggaactgttcactgcttgaaccaccaccaaagcatccgactcgatcaccacatcagaccaacacttacccttgatccaacttaaatcttctttcgcccttatcatttcagcaattttaggctgcactgaaccacaccgactactggagatcgcctcaatcaaattaccaccgagatcacgagccacgctaccaaagccaaacctatgttttgttgtaaaaatggcaccatctacgttaaccttgaccttatgcacctttgatttcctccattgctcactaccgttactagaatcaaaaaccaacaacagtcccaacttttgagattgagcaatactccaatgaccaaggacagtaagcaccgagcttaccacttcaaccacaaaaaaaaaagatttcttcttccaaaacacattgttgcgtgtattccaaatacgccaactgaccatagcgtttccattacaactgttgaaaaattattttcaatcaagtcaaaaaaccagctgctaaaactctgatatgctacaccaactgtactgaaaatagataggttccaacaagaacgagcaaaatggcaatcaacaaggacatgaaaaatagtctcatatgcaaattacaaaagggccacatgaggtctacatgaacatgcttagatttcaactgtaccttcgttgggagacactctgaagtagctcgccacatgaagtgatgagccttagaaggaactgccagctgccataactttttccagtcatcaccttcatctaacaaaggccattcacctttaatcaattgtaagtgcttataaacacagctaactaaataaaatcctgatgtttcttttacctaaaaccactcgtccaccattgctgtatcactcaattggatagataaatcaagtctctatctttggcgttaaacaggtcattcacaatttcaatgtcccaagtattcgtatcaatagccattcacgaagacacactttttccctcaagacttggatgggaggaggagacataagggttattcgaatcgggcagccacgaaacacataaaacactgacattgaaaccacaccgaatcgatcatctagcccctacctaaaccagttcctgagcctcaaaaatgctatgccaaataaaattaggattttgtcctaaagtagcagttaataagctaccattaggataatacttcgctttaaaaatcttactcaccagagaaatgtcatttgacaacaaatgccatccctgtttgcctagaaaaagaaagattatagtctcaaagatctctaaagccaagaccaccaacatttttatgtcaacaaagtcgcttctaactgatccaactaacacctttgctagatgaattggattgagtcttccaccaaaatttagacatcattcctttaagatccgagcatatttctttagttaataagaagacactcatagtgtaacttggaagagcttgagcgataaatcttattagaacttccttacccacttttgacagaaaatgactctcccaattgaaaattctcttcttcattttatctttaagaaagcttaaaattgcatttttattacgccccattatgcaaggcaagcccaaatataagctattttcagaagcctccaccattcccaatagttcacacaagcgggaccgtgtagccacttgtgtattattactgaagaaaatcaaagattttgtaaaattgactttttgacccgaagccgcctcataagtatgaagaaggtgtaagacattggtagcttcctcttcattggccttacagtacgcataactatcgtcagcgaacaacatgtgtgaaataaccagagcacctctagctactttgcagcttgttaatcgacgattttgttcataaaacttcaacaaggacgataacctttctgcataaattagaaagagataatgagataatggatctccttgtctca

SEQ ID NO: 42857 - DNA, 2353 bp, Cannabis sativa
taaatgcaatttgttcttagccccaatagcaagattgaaatcatggagctatcaatgaaaactgagtggtggagaaatgagaactagccttgggtgctcttttgagccaacaaactagagattatcttcattggctagttagttatgattcaccaaggtggaactcatgaaatttgtggtagaagtcgagcaatgccattcatggttgaagttagtggagccacactgtttgtagtgatgctggtggaagaatgccattcctgtctgaagcgtgtctaggcggaggcgaagaagcatcaaaggtggatatcaagaccagattatctcagcaagagccattgcgggtctttggttgagattttaggtcttttaggatttagggatttttgacagtgtttgatatttagagtttcactgataccatattagacatataaacccctcatattattatttttgaacaaaatcctttcgtattattgatatttagtcgaaacatatgttagtgttctagtttagttcttgaaagaaattagaattacaaagttttaacctttttgagatggtttgatatttccctagagtaatcttttactaacaatctcacaaaattcagcatactctcataagactcctaagaatttataggctagactaacaaagactcctaactagccaacaaatagcaatctatgtattagccattcttaaacaatcatctcaggtactaagaacttgacaactcagcctccacaatcttatattgagactaatattaaggcgtaagacctagtacaactatataggctgagaaaccaaagtaaaccaataacaagcttaataataacagagttagttacaaaaccagctattcatcattcatcttcctattgtttgctcactcacttttacaaagaaatcgcatcaaaatgaagaaaaagactggttaagaaatcatacataaacgtgtttaaacaactaatatgtaaaaaattatacataaagtcagtgaggcttgctgaataaattttgctggaattgtgaaattgaacttgctgaaatttagtcccaagcttttcctctatttaggtctctctgtttacacaaataatctctacgccattaatcttaacaacacactaattaggtctgacattatttttattgattgatcaattatttgtgttgctatttggtacccagattctaataaaaacaagcttgcattggatgtcattgttaacttagtagaagaatgctgctggttaaatctgcatgttgttccaccccatggagatgtctttgaaattagaatttctcatggctatggtgctaggtggtctaaagatggtagtaaggtatctggttcgtaataattaccttaatttcatatcataatattatacttttcaatttataccttgctttcctgctgcctcatgtcccaaccccttcgttagtacaagaagctcaagttctggttgatagttaccgtgaatatatttgatctgttcgaaaactctttattactgcttagcactaatcaaggcttattgcttaggtgtaattgctggaacaaaataatcgaactgtgattacatttaattccactcaagttctttctgttcactgcaaggaaagagtttacattctagtgtgggaggcctgcaaaaagcaggaatctaaatctggataggagttatcattattatatgtctcttaagaaaacagaccgagagagaaatagaagaacatactattatgtttgattcccgcactcataaagctcaacttgtacagcttgctagttctctactatttatgttactttatgttttccagtgatttactttgttttgaggtttgattgtggtgctggtaatatccaatatctaatattcaacacccaaattctacctaattttgaatttttattgcaaaactcaattatgtatgactaatgttccattgataattgttttagtttatcggatttctagagccatatgtagaagatggtcattcaactggatggaagcactgaattgtaccaaaaaacctgtctctagttttcatgacagttagctaggtacgtactctgaagggcttaatctgctatatggtcaactttgtaccttgatcacttggatatccaagagattgcttattcatgtttgtttttgatttgttattctttgttattatagtctctccgtggtgactaatggtttggcattgcatcgagataacatgagaatgtctacccagaattctacgttgacaatgaagcaggcggtcaatgatggatgtagtagaattggagggaattattgccttttagctgccaaatgta

SEQ ID NO: 42858 - DNA, 3766 bp, Cannabis sativa
tgaaatatttttttaaaaaatattcagttgcagccaatattttaaatttttaagttagatttttttataaaggttaaaattaatcgatacgcattatcaattcagcgtgtgtatatatatatctattaagattggcccacgtgtacatcaagagaatccaatgtgatctgattggagtaagatccttctgtctcaactaaaaccatttgatgggttttgaatccttttttttttttttggtgaaaaggcgggtgtattccacccattcattgaaacaacgacaaagccaaaatacaagataaaacgggactaagcatcccaattgccaaaactaacagaaaaataacaaacatgacacaagtaaataaactaccaataaactaagagataagacacagcataggttccaaattaagacaccccaccattagttagggaaccattcatagaagtcagagaagatgctttcatccatagtaccaaggtcaaggactccagttgcacctttcatggccgcccattttgctgagttgtgagccatgtaattgaattttctgtcaattttctccagtttgaaatcctgcagagattgagccgagttcttgaaacgatcagctactccagagatgtcgaggtccatgtttgtggtgcagtgagctgagcaatttgagatcaccacttcattatcacagtaaaaagtgactttccccatgtgattttctcctgcaactcctactgctatagccagcattgtggcttctaccagtgtaggatttgtagcagagactttctcagaatagatggcctcaattctatccctcctgtctctaaaaacagccaccccgaaagcacagttagactgaattgagacatcggtgcagcaattccaccagccttcttcgagaatccgtttatgtactcttccttcagtgcgcaaagtccatttagacatgtgatctctatgaagcctgttgactgaattgatgaccttcaaaagggggctgagacttttcccatgaattacgtcatttcgggcctcccaatttttttggaaaatacagagagccttggtcataaactcctcataagacaagtttcgcagtctatgcgactggtcacgaaaccacaacatccaatctgtccaatttgggcagtgtaattgatcagtcctcataccccaaaggctaccaaaccaaatagcctttgcaaaatagcactcccaaaaaagatgtatagatgtttcatcttcctctccacagatggggcattctcgtgcttgaagtggtatggccattccgatctttcctctggttggaagggcatctctcatcaattgccaccataacaatttcaacctcccatggatcggggagttccagagggtcttccaatcccaagtgggctgatcttgtaagctttgattcatgacaagcttataagctgatttaaccaaaaaggtacccctcgattctcctagccaccttcaggagtccgttgttgttgtataggaagtccaatgttgaggatgtttctagcatccctttcatggaaccattgtctcactctctcctcattccatgtcatgttttcattgataaaatggcttactagattttctccttgggttgtatccaagacgagtagtggcatgtgatctctgttgggcacccaagcatcgaaccatattgatatagttttaccatcttctattttcctgcatagaccttctttcaataaaggcctagactttagaattgctttccaaagaattgattctgtcccttttagttcaacatcaaagagatccctcccttttaaatacttctcatgtactatggaactccaaaggttgtgggggtccgtgagcaatttccatccccactttaaaaggagagccgtattaatatttttaattttccgaaatccaagccctcctttaaatttggatttacatattgaactccacgatattgtgtgaatggatttcctcttctcattgtcgccccaccaaaaattccttaggcattgttccattttatttgctatcccggatggaatcacctccgaggctacaacatagacgggaatcgaggttcctaccgattggataaggcaagcatgccctactttggagagaagacgggatttccacccatcaattctggtaagcattctctgcaccagataattcatgtcttatgaacggttctttgaactgaataggggaattccaagataggaggcatccttcttcatcttactcataccaaggagacttaatatctcatcagcacgaactctaggcaccccttttgaaaaaagaactgtcgatttctgtaagttaatcgtttgacccgaccaagagcagtacaagtgaaggcagtccatgaaagcttgtgcttctcttatagttgcttggccaaacaaaattacatcgtccgcaaacataagatgtgtgattgatggggtcgtgcgagtgactttgatccctctaatcttgcctttgagagtgtaatcctgtagaagtcgagacagaatatccgcagctaagatgaataaagtgggggagagtggatcaccctgtctgagaccacttgaaggagtgatcgtgccttgtttcaccccattgatcaacaagttcattttcttgatttgaatacagctctttaaccatcccagcaaaggattcttaaacccatgaaaacatagggcctccattagaaactcccaatccatcttgtcgtaagccttctccatgtcaagctttatcatcatgaagcctctcgatccctttctctgggacatggaatggagaatttctttcgcaattgcagtatttttagttatgcatctccctttaatgaatgcagtttgtgtcggggagataatggttggaaggatgtctcgaagctgtgtagtgatgattttttatatgcatttatacataacattgcatagagctattgggcgaaagtcatttacctttgatgggcaatctttcttaggtatcaggactatgtttgtgtcattgatgtaatgaggtaattctgccgtatggaaaaagtgattgatgaatttgatgaagtcttctttaatggtgtcccaatgggttcgaaaaaaggctactggaatcccatccggtccaggggctttgttgattcccattgtagatagagttcgcacgattttctcctcatttggcacttccatgagatcatccattgaccgtgtttccctccgaagatgattcaattcctcagctttgaacataactcgcgcgctgttcttggagaaaatgcttgagaatttctctatgaataattgggctatgccattcatttctccaattgttgccccctgttcattctgtagagattggatgtaattgcgtcttctccttgttatagtgctggccatgaaaaattttgttgatcgatctccatcttttagccaagcaactctcgacttttggcgccaaaaaatttcttctcttcttaacccctccgccattttgtctctagcttcagagtgtgccttttcgtcaacatattgcgcctcttcgatcgaactgagggctattctagcctcatttatctatgttgacaactttctgaagtgggtcttgttccatttggctagatgagccttggtatgtttgattttgtgatacaagttaaccatcgggtggtcatgggatgtctctaactgtaacgtcctcgcttcaagcctccattgggtcctcacacccacggaatgaatggctctt

SEQ ID NO: 42859 - DNA, 7830 bp, Cannabis sativa
atatgacagaatggagtgggagttcctgagacgagtactctctgccaatggttttgatgaaaggtgctgcaatcttctaatgtcttgtgtttgtagtgtgtcctattcagttctccttaatggaagtcctataaagaagtttgtgccacaaagggggttgaggcaaggcgatcccctctccccattccttttcttgatgtgtcaagaagttttgtccaagttactgaatcgggctgaggctaggagcggtatccatgggattaaaattgcaagagactctccatcgattagtcacttaatgtttgctgacgatacaatcctcttcacacgagcgaatgaatcagaggcaaaggaattgctgatatgcctaaacacttatgagaagtggtctggtcagagctgtagcaaaccaaagaccagtgttttattctctaataacctggaaggagcccgaaagcagtcaattttgaagcagttgaatgtgagggaagcaaatggtcaagaaaaacatttaggcaatccttttgttttcaaacgaagaagaagggaggagtatgaactattgaaagaaaggatgctcaatcgtttagaggggtggagaatgaaacttttatcttatagtgctagaactgttctcttgaaatcggttgcttcagctttgcccatttatgcgatgtcaacaaataaaattccgattagtacctgcaggagtttagatggtctcatgagaaaattttggtggcttggaaaccttgacaagaatcgtttccttgctgtcaaagcctgggatactatttgccaaccgaaatgggcagggggtttaggtttcagaaggtttgaagatgtcaacagagctttattggcgaaattagcatggagtttggctagtatggaagacaaaccatgggttcagtgcctctctaagaaatattgcagcaaagaaagcttttggagtgttcctcctaagcagggagattccttccaatggaaaaagattattgaagttagaaatataatccagcaaggtgcactcataattgcagcggatggtcgaaatattgatctgtgggctcaaccatggatcccttggatggagttcggagagttcaatcatactatgcaacaactaaaggtacactttcctcttataagatccattgctgatatctctcaagaaaattcatggtgcagaaacaaagttcttgaaatcttcggagatactttgggaaaccaaatccttaacatacctaggctgcctccttctcgtgaggataggttggtttggaaggcctcccaaaagggaaatttctccgttagaaaagcatatgagagggatcaatgccatatatttggtgatcacaataaactgtggaagatgatctggcatcccaaaattcatcctcgggtggctctctttctttggagatgcttcaatgatgcccttcccatcaatgttaaactaccgtttattcatgacaagacttgcttcctttgtcattcagcaatagaagatggtcttcatctctttagagactgtcccttttccttatgtttgtggttcggcggagcttacaattgcagagcaagtaacataccaggagagaaccttcaagagtttttactgaatcttttagacaccttttctggtgaagattgccacagggtattaactttcgttggctgcctggctgatgagatatggtatcaaaggaaccaaatgagaagacttggagttatggacccttccacaacttcaattgatcgaattaatggtaaattcacggaaatggtagagctgatctcggggggaaggttggaaagtgaacgacgcagggaattctcatttaaaccgagaaagtcttatgactatctcctcttgacggacgcgtcgtggaaggatggagttgctggtattgcagtgataatgattaagcctgctactggtttgtgggcttcgaactctgctcatatttccgcggtttcagctttggacgcagagattcaggccatgctgtgcgctctcaattgggctaagaatgaatgctgggaaaatctagctgtgatctcagatgcgcttctcgctgtgaaagattttgatgtgaggaaatgcccttccgattggaaatgttatcattcttctttcttagtgttggatgcgcttttttcttttcagtgttgtaatttttattttgtgcctaggaagtttttagactgtgtagactcgctggtaaagagtgctagaatttctagcctatcagctagcattgttcaaggggaaggaatcccccctgtgattcctatgttcttttcctagtttattgaactttgttgttcttccaaaaaaaaaaggtgggattgtaaaaaatttgactcacttaatagatgccacatcaacattttactacttttagaaagtttagacagttagatgaatctaagcctagcctagataaaactctcgttagtataattttgtccaagaaacaagagtgaatgagggttgtaaatagaacatatgtgtgtttgatcatgtgtttctcagggtgattttgttgtaaatggtgtttatcaccatagccttgaagtgtgtgttgtaatctctaactgtaaaagtgctgatcacattcaataaaagctcattcattttcccaattttatgttaatttttctggttttatagtttctgttgttgaaggtttagttcttgatattagagtgaagcaatttcattacaggatggagaacaatcatttctttaccaaaacaatgtacttacaatctgaagtttgatggtcttctcatcttgctccactgttcgaattttctacacagaaaaagcagagttctaacaaaaataaaatcttgaacttataatcatgaaatggaacctccaacactcattgccctttactgtacttacaaagtccactccgatggtactgatataagtttcttcgtaggtgtcatcctacaaaacatgacagaaaacaaataaacataacttaaacaatactctaatcaatctacacatattctatcagcaatcattagtaatttgtttttcatttacaagaaagttctaagtattaaattcctactgcaaatctctgcagaagacatgtcttgccaaccccagaatctccgattagcaaaagtttaaaaagataatcactgcaataggaaaaaaaaagaaatcatattttttagtatcatattatttaaggtcataagaaacataacatgataagaaataaatatttaagccaaaaaaagttattcctagtcatgaatcatgattgttctgtaaattctcttctcacaaagtactaaattaatgtttggaacaaacaaggttcttcagccaactgtacaagtcagaaccaacaatgatcaactttcatttgacaaaatatattaattaatcaacaacccattaaaactaatcaagctacgtacccagatactaaaaatttggaaaccattgggtttgactttgttacaaattacaaaatcaaattattgatcaaatcaatcatcaataaagccatatattcagtgttaaaagagattagtactattcaggattcatagcttagtaacggatgaaggattttcagctgcttgcttcaggaatcgttgaattatttcgttccagttgcaaaagtattattgggtaatatgtatgagaagttacaaagtcagaagtggaagaagacttgaaggacttgatactcaatcaaacgcagctaagtctctctgttgggagtttttatggaccaccgttaatgatttggttaaattggtttgtaggtccaattagtactgtctaatctatgagcaacagttctgtttgagatgaattaaagaaaatggttaaggacactgatgatatgatatgatatgatgtaagcactaaaactagtttaatttaatgttgtagttggtggtcaacttgctaatataaatgtatacgatgattacttacacataaaaatgatgcaaaaaatatacgtttgccaaagtacagacgtcaaactccattgagatgtttcctatgcaagaacccaacccaccataatttttaaatatctatttgacatattcaaagaatcaaagttatgtcaaatttaatttagaagtgtatactggatagtgatattttataataattatgaaattaaattatttgagataagatacatatttatatataattactatatagttttattcatctattatatttttctgttttattacctctaaaattaccgtaaatgagacaggtgatagttctaaactcctaatgtgtgtatgttctttctttattgtaaatatgtgttggtagaattcactaatttgacataaaaaaagctaaaaattcaatcactttactttttttttgtaatgtagtaaatattattgccctctatttgtttaggacatatctgtaaaaagatggccgaatattttttgagttaaaattaaaggaaatatttggtttacttttatattggtgttttctctaataaaaaataaaactagtctactagtctactacatcagaaagtacttaaatgacttccgcagcaagttctttgagaagtttctttttgtgtaagaaccaatcacacccaaatcatgcactgaactttataaaaatacgttttttttttaattaaaataaaaagtcaaatcattataatcattggcagttgctacactgaatattatatatatttgatttgatttgaatggtcttaggcctagaaagataatttaagtcaagaatatctgaaatagaagcctttcaaattatcgatctaaattacttgtactctttgattaatacattgtacgtatctacttttctccatatgaaaattcaaatggggtttttttgaactaactattaataatgtcattgtaaatttataatatgaaacgtgtgatgtttcatctaactgtttattcctttgaccaagaggaagaagccagagattactagtacaggaatattttaaagtagtacaaagttataaaagacaatatagtcacctaaaacataaaactaaacaacttaccatttggtacagaactgtatatatttctttaaacaaccgtgtattaaagtaataagtgttttagacaccaaaaccttatgtttattggaattatgtaatgggaattttgaaatggtcaagtcaatgttgccacacgtattaaaacaccaagttacttgtcttggtttaattctctacctatataaatgtagacccaatacgtataatacgcatcaaattacttaaccaggttcattagaagtaaaaggcttccaaaaacaccaccatgtctgtcaagaaaactctttctttaaaccgtggcgaagctgcgaaaggcggtgaaatctcagaaaaacgtagtaagaaatatggccgttgtttctctttcatggaggtgaggatggaagcaggcaaaactttgaaagaaatggactcaaacaagttgaaatatgatatcaagagatgggctaaggctgtagttgcttatgctcgccaagtcagtggtcgttttggaggctcccgtacctaaacaagagcaatatttttggcaatctaaattggatagtcaccatgcaaatttcagatgtatatatgagttggattagattaacttcgattgattcttttattgttttgttgaattattgcattggtttaaattggaaagatttgtattagaaatggtgaagctctgcctcaactgtacaaaaaaagggactctctgctcgtatttgatgtataaaaataaagggctctgccacaaattgatgtatatatatgtatattacagacattttccactaattgttctattgttcttgctgctaaagctttcttaggtgttatattcattgattttcatatcgctcaaactattattgtccgatctaataataggatttcattgctagattttacatattgtttacatgatagtaaaataacaatgtacaaaaaaaattgtattgattgatataacaggtctcaagaaatgtcaaaacttacatagacaaaagcaattcaaccatataataatttgttcatatgacatgatgatgtgaatcaaccattaatctttaacttatccaaatgcctgtgtctcctctaaaaatggttcggataagctgttttagagcaccttctgattctgaatgagctccctttttcattgggttagtggtaagaaacttgggcaaatcccttaaatgatctatcctatatatgatattatcatagtagataatttagctatgaacaaaaccaagactatgtatacatataaagatctctttaaattaaaggcgttcttctagataaaaactacaccttcatgacaactgaattatctgattcttccatactcttgttagtttaaagatcttcttgaatgggttcagatgagggtacatttttactcccccgattcgaattttttccttgagcaaatgccctctctcctccagacatggtccgcaaaagctgcttagaacacatgttctgagcctgagtagcattcttcattcggttggctttcacccacgccggttcctacaagaaaccagactcagattttagatttccaccaaatgaagttctactctgaaaacaaagacaagtaggtttgggtaaataatgcttccataagaggagaaaagtcacctcaggaacaaaacgagaaaatccaaactttatcaggaggagaacatgttccatgataaggatagcagcaagtccgggttctattttccattttccttcctgatcgtataaccatgctaaaagtgcgcaattggtgcatattgacatcacaaccagaaactgaaaattggatagcatgataacatcctcacattagtcaagacaattatactaacgtgaaaaaatgaaatatatgcagttcagaaccttgtaatgtgacgacaattgtaatgtgacgacaatggaaacctttacacatactagccatgtagaatatcttattttgggccaagtacctggaaaatgttcagccaagctccaacagttacggcagcacgaggaacaggcctcctaaacatggtaagcagttttactgcatctgttctgatttcagtgatgttgttctgcaaggagtggagtttcagaaaacaaaatttaacaagaaccagattgagcggtgatacaagtgttattaagataattgtataccagaaaagcaaaggcaaatgttagcggaaatgcacaagcaaacatcatgatcagtccaaactgcaatgccaactccaaaaagtctgcaagtggttcaaggatctgattagtcaaaacacgtatccaattatcccatgaaattcctaattttcatattacacccaggatccacattatcatacaataaaattaaggataagaatttgctgattattatctcagttgctaactccaagaaagcttgttttctgaaagtgacatgaacacccctctacctataggaatcatactcttagaaatataagaaacaagattagcattatattagaatgtattaagatgatttctgaatttcaccatcaaagagtccatcttcaagctcgtcgcctatgcttgcagaataagaaggtttcaaatactctttctctactctggaagaaaatagaatcttcccacatggtgatcccttctcttgttttttcttgcgtctagatacgaaacaatttaaaaaatacataatatacgaatcagctgaagtttaggcaaagaaagttacaaccaacaatgtagaagtaccagg

SEQ ID NO: 42860 - DNA, 2266 bp, Cannabis sativa
gtaatcatgatattcatgctacatttacttgactttagaggtttaagaagaaggaagcacgtgaaaataatataactatatggaaagctgttgaattgttgttatatgataattatatgaaaaaataataaaaatttgtagaatgataattacatgtagatagcaattattggtgtgacgtggatcaatgacttcatccttttgtttgctttagaggcggctgcccaattgccaacgttttcttttcatttactctttaaaagagtactatttatgactgttccttcatacataggagacatttcaaattttcaagacacttgcccaacgtggacaaaagaatgtttagttgatggatcttataatattggacaaaagccataataaaaacaaactagttggaataccaatatatacttatccaaaacttaaaattaatgttaaaataataataataattcgacccttctaaaagaaaaaggtcgactaaagagaaaaacgataaatgttcaatagaattaatgttatgtaggacccaatcaaacttttgacttttcaaaatttgtgttaaatgatttcgtgatgtagataattttatattaaaagataccaaaattataattaggctttccagctgtgatttcacctgctcccatcacttcatatatagatacattatttgattgttccttgtaggactttttggcacttgcaaaccattttccacacacatacttgacaatcataattgaattgagtgtgacttgtgtttgtgttaattactccataattactaaatataattgcttctaacataaatgatcaataaatttataaataaaaataaaattgaagggtcccacaatccactaacagaaaagaactattcagattaagttgtctcccaacatcctgccagagaggatatgaacttttcgaaggccctctccaataccaacaacctgaaaattcttttatacaagttgttattggaacgatctaatacagttgccattataaagaatgacagtattatgtctatatacaagcactaagaaaaagctgaaagcccactatcaatatataaatagaaccatcattgctaaaaaaggagatacagaataatatataatcatagcaatagccaaaagcaaaacaacaaataattaaaaaccatccattttgtagtacgtacatttatatatatatatataaatatcatggtgaaaacaaaagtgttgagcattcagaaatatatctatatcgattcgaccaaatttcaaaaattgagtactgtcgcgtatcattactgaggaccgatgttgtatggtataaagttaggaaaataacgttcttatatattagttgcattaccaatcatgtagtgaaaaagaaagtctatgtttaatattttgctttctaatttgagtttattagccaattagattagaattgcaaaagtgaaccgagggcagatcaaatgccttcctttattattataaatctcggagcctctgaaaaggacagatcgaggaggaagatttaacaaacatatgatggatctccacaaataaatagaagctagtccaatatggtacaattacatatatggccacgctctatacaatgatgaaataatttattgttccctaaaaacaaattaaaaaaacaaaacatacacaaaccaaaccatgtccttatcctagcttaatctccaatctccacattcttcttcttactttgctttgtccataaccactccaacttaaaatcagcaaaagcatttgcaacgctaccacaaaagaagttgaagtgtgtgggtcatcgctaattgacagacccttattgaataatgaacattcattcgaggcttggtgcgcgttgatggaaaattcttttattccacttttcaatctagaacctgcaattataataccaataataataaaaattaactatttgtaatttagtaatactaacaccagttaaataaaataaaaaagctaagtaattacttattacttacatgatccatgtgtgtatggtaataaaattcttgagcttagtatggaggtgggggtggtggggaagagtatatgtaagcgggaggtgatggcaattttactggtggaggaggtgaggtgtagtggtatgggggaggtggagactttgttggtggtggtggggaagagtagtggtatggtggaggaggtgacggtgatggtggtggtggggatgagtagtggtatggtggctcctcttcgtg

SEQ ID NO: 42861 - DNA, 6195 bp, Cannabis sativa
tctgaatgctcaggcaccggaatctgcttggccggaagtgaagttagaatttcagagaattgctcaatccttttagtctgacctcttgatactacgaataactttgctttgctttaatactgttctgccattttgcctacaaacaatggtctctaggtccccaataatttttcattattgcttgtttaagaatgaaacggctatcctatgtaaacaagaacaaaaaaaaaacaaaaagaagcacattctagtatataaattgatttgacagattgtttttcttgagatgactatgaggtaccaacacctaactttgtgagtgcaaaaaattagatttatacatgactaaatttacatattgaatataaatccgagcctcatgaccatcagggtgacttgaatcttcctatatttttaagtgtgtgattaggtacatatatagactaattcaagcacaagttatctgtcttcgcttgatcattttctctaagttatcagaaactgcggctgtcaaattaggatcttcgaatcccagctctaagccaagcctgcaaagaggcacaaagcaagatttgcccagttaatagattgaagtgttttaagaaatcagcaacagaatgttaaaaaaattcttactttggatcaagcaccagtttctggacttctttaatagctgcactagcagcataaagtgatatcttccctacctgaattaaaaagctcagtaatcagacatacatcttatccagacacaaaattaaaggagcgtcaaaaaagaaaagaaaaaaaaggtagagagcatataaaataaggcacctccaatacttgaagttttgcttcgtgctcattcggaagacagcgaatttcttcagctaattttacagcctcccccaggctttcaggagataagaaatcaagtcctaactgaacattggactgaggaaaaactcaaaaaaattagtgtaggtaatcaaaagatctcagaccaagcaaacatggactggagagttaaaaatcaaaagatctcagacaaagtaaacatggactggaaagttaaaataacctcgtaagatgtgaattcctataacatgaacaagttttgaagaactaaaaatttagtatattctactgtaggaggctcaggcagtcgaaagtgaaattaaatttctggtataaactttcacaatcccagtaaaatgctacatagaattttattttaacattataaaaaccaccatatcacacccactcacctgaagatttcttacttgaaaaggacacccagctgggacaaatacagcttgccccagatgctgttcaaaggaccatggctcaactcctgaaacacaagccaaacattctctaccattaaaaaatttaattcagaaacatcaatattctacattatcaaaaccaaacaaacagggataataaacagagccatatttattaacaaggtaaaaatgaaaaacaaaagaagaaccaattagattcagtttcaacaatcatctgtatcttaacaaacacagttaattacttgcaatgctttcctaacacataaattgtgcaatttcaacaaaataaattttaactgtcaatctttctggctcataatcgcagccaaggattagattaaatttatctcttctatatctccagtttattaccgaaaattatcagtagtatcagtaaagaattttacttactcattgcagaaatgataatcgcagaaggaaaaataattgtaccaaatgcagttcaattaagagtatcaaactaactaaaacataagcttgtatacgtaccaaattcttccttcagtttttgtttgtgatacgcattcaagaaaaacctctcatcataaagtggccttgtaacctataatttaaaatgtacaatcaacaacaattacaaaatccaagccttagctaacagttgaaaagttgttttagaaaatactagctaaaacttacaaaatcatatgattcacagtcgagcaacccaaactcctcctggtgcattctcaggtactcagatacttttggaacatcttcacggcgaaaaacatcccaaaaaactcctggacgagtcttttcagaaacatctccaccattctggtttgagtgttccccaatggcagcatctccaacactacaagtattatcaatcccttgatccatcatctcaacatctctattttcatccaaatttgcatgattttcaatttccaaactgtgttccccaagagataaatcaggtgacctaccctcgtccccacctacttttccatctccttctgtatctttctcctcagattcctcaaaagcttcaggcatcttctcaatctttgttgttggctgaccttttaatttcacctcacatgtattcaccaaaagatacacctgatacatgcacaaagtatcattatttgcatagaatatgaaacagtgttaaaacccaagggatggtctagtggtaaggagtgctggtaggcatttgttccaaggttcaaatccccaaagactcaaaaatattgaagccactgggaggtcccccagtcaaactgccaggaccaaaaattcaaatatatatgtatatgaaacagtgcttaaaatatcagacattaacaatcactatttgcatagatcaggtgagagttatgaagctaaattaaaaggcaattatgacaactggctaaagaagaagtacaaaacatcttcactagataaataaatctttaaaatcaacaactttgggtcaacaagaagaatacaactaaccatgtctcttatgttgaaatgaagattggtgacagaattgccctcactaagttcatcgtatgtcccataggaagtaaaaatcttaggccccacatcattctgcaaagagtagtgtgggagttttgctgcaacattgagaagaccccacttggagtggatatactcaagtaaaggcaatttaccaataaattcaggtctctggtacaataagaactcctcagctgcacttgggcaaggccaatcattcaacttcaatagctcttgcttaccattttcacggagccgtccctcagaatatccttctagaaactgaccaagttcaatatcaatctgccatcatatcaaagccaaaaaggtttatttcaaagaatttgataagacgttaatcaatcaacaactagttattcaatgaaacaggaatgagttcaatgaaaatgaaacatgatacttaagatgctatggaagaagataaaaacaatagagagctcacctcagaccaatcaagacaatctatcgcctttaccattctgttctcatctttcaatttctcatccttagtctcctgtatccctctccatatcaccattgggtcccaacttgaagagtatgaactatcaaaaacctgattaacaatgatgggctcacctctagcccaatgctttctaaagtcaccaaccccactagatttaatatcttctgacgtagggcagtacaagaaattagcatcaccatcctcccgatgagcatattggcagtgcctaggatcattaaacatgattttccccatgttggcatccctataaaccctacacccacttaccatttcctcaacatttttcaccaattttgctacccaattcatcttaaaaatgcgacttagattcaatgatgaatatccgcagccaccgtactcctttggggggcatggaatgctactatcactattggctttccactcaggaaatttgtctgaaaagttcagtttgaccctaggcagtagctccaccacagactccttatcttcactttctctgccaatcttactatctgcaactccattaatacaagccacagatgcttcccttaaatctctagagcaactaagacaaaggtcataagagcagtttgcacaatgccgatgataatcaatgatgggaattcgacagaaattgctgcaataaaccacatcaaatttcaagcctccaaaaggatgacactattgtacgctaaagactaaaatcataaatgtgatagaaattaacaagataatcagaatattacatacaaccatacataaaattgagaaatctaacaaccatagaaggcctagtcctaactccttatgtggacaatttaagaaagtcaatacatggagactgaagtaaagaaaatctagattactatattttaagggtatcaccataccagcacatttgctcatctacattcaatcgtgtccttgaaagatcaatgtcagttcctgaaaaaatacagagtgacaaaatagttaacagatttctaggtgatcactaaatgaaagcaaaattaaaataccatagaagaatcaaaagtatcttaccacgaagccttttctccaattctacctcagagcactgctcatgatggatttgcttgacaacaggaagcaccgaagatagcagacagtggagatattgtaatttatccagggcagggatctcctttattcttacctagaataaaagaagcatttgagcataatacgaagtgattaaaaggttatgccaactttcaaatataaaattcttgtctataattaacttctgaaacaaaatgatgaaattatctgtagcgcacctttaataaattatctccacgtaagcaaactttacagttacaattaccatgacacgcggggcatattctttgaatatcttccactgaggtgtccgggtacctaaaagtaagcatctttattaagcatgcacatcggcattcaaaagtatgtatgttctcctagagaatcaaacctcaccatttagatatacaactatcgcagtatcctcttcgatcacatttgaggcaccaaataactctttctcggtcattccttcgacactgatggcatgtttggccaccagtctcttcagatgattctgtgctttgatcagagtactcctgaagaataaagtgtgttcactttaaattagaatgatgcagtaaatatagaatataaaataatcataataaagggtacccgcaaccaatcatcttcaacgagaaaagtaaaagaaaaacacaatctgatgatcatgattattcgcttttagttcccttaggcttagagatacaattcactcttaaggataagaacacaaagactatcaaagaggtatgcagtgaccaaataatgagttgtttcccaaggggtcaaaaagggggatgcctttggatttcggaacaatgctctctattttaattaagaaaaaataataaaagaaattcttatgaactgtcattacttgggatccaactttgagacaaaaatcttctgtatgttacaacagcatcacagtaattatcctgagtatagcagcagagctcaaaaactacatcaagaagtaagcttgcattcaagtcaacataccgaaactgtcgtcgcattagcatcaaagcttctctgcgatctgtttctggatgagtccacggcagaattaggcgttgttttatatgatctgaaattctcttcatactgcgctaagtctaaatgtgaatcatcatctagcttcggagaatttcgtacagaaaaacttctcactggtggagtttcaggagagtagcgaaactgattcttggataccttctcaaagtactttttcctatggacaggagcagaatactcctcaactttgggagtcacaagtggcacatcaaaatcatcactcttactctctaagtaaatatcactttcacccaatgactttcgcttggctttctttaaattagctcgcattgcagaattagcagccctcttctttgcctgaatatagtgcttttcacatactgtcttatctggcatggacatggcagtgcatctccactgtttcccatctgatctcttgcaacgcaaatcatctggaatcccaacattatcctcaccaatcccggaggctgatcgtgaatgatccatcacaaaatgatctgcaacagttctgtattatgcagaatcttgtgctgctgctaaaaccagacttcaaataagccgtttaactaaaaacaaacacaatttaagctatgaatgacacataatcaggttcaaagtgcccaagattatttaaaagataattttcatatgaatctctcagttaattttcaaccaacccagtacgaaaagaaactaaatttacataaagttcaattaaaaaagaaaaactca

SEQ ID NO: 42862 - DNA, 3134 bp, Cannabis sativa
tattgttattaatattttcgtaaagtcatttcattagtattttccctccctatattaggacatcttttctgtgcgtgtgtataatttcacttcagcagttcaattttatatatcccattattatagattaataaacattccataataaattgataattgaacaaaaagatccaactcattaattaattaccttagtatcggcaaatatggttggctgaatgtaatatccagtgtctcctacacggttaccaccagttaacaaagttgctccttctttcttcccttgctcaatgtagcttagaattttttcaaattgtcttttgtcaacctgccattgtatgagtagagagtaatatcattaattttcagatcgatttctgttttttcttttttgaaaaaatagatatatagatattattatattataatcacctggggtccttgacgaacttcaggattaaaagggtctccaacagcccaagcttttgccttctcaaccaacttctttacaagctcatcgtatattccttcttgaacgtacaaacgagatgttgctacgcaaacttctccctagaaaacataaaagatagaataaaaatgttttagtaatgttatatataccaaagtaataattattagaaggatggaatgtagaatattataaatatagtataacacacaccttgttaaataagattcccataagagcaagttcagaagccatttctatatcagcatcatcaaaaatgatgataggtgacttgcctcctaattctagtgatacttgtttcaaattgctagctgctgctgctttcattatttcacgtcctacctctcctgatccagtaaaacttacctgaacacatgaataattaatgaaaatatgtaactcatgaaaaccataattattcgaaactacatgattataatgttacgtaccttgtcaatgtccatatgagagctaatggcagcaccagcagttggtccaaacccagttaccacattcagcactccgtcaggtataccagcctaattaccattaattattttattaataccataataatacatatacaaatttatgtgtgcttctcaaattattttaatgatcatagtaattttagaaacattattatcaagtatactataagaattatattgtgaaagtgtgttttagaaattaattagtaaagtgacatcatgcttacactgaaagatattagattttatatcaaaattaattggtgataattaaagtagcacttagtattatcatcacaaattattagagactgtaataataatataataaaatatactaaaaagcatttaagctgcgaaatattataaaaggttgcttacattattatcaatcagtgtattttaacattagattttatatattttgatttaataaataacattgaaaacagaaaaaaaaaactaattacaagatatcaggtttatgtacatatataatctcaaataagagctttaactatttatatataaggtatatattttgagtttatatattattaccagtttggcgagatgagcataatagagagcggagagtggagtttgctcggcgggtttgacgatcatagtgcaaccggcggctaagcaagggctgaccttaagagaaaacatggtgcttgggaaattccagggaatgatgtgtccaacaacaccaatgggttcaagcaatgtgtatccatggagtggacgcgacatcttcagaacctcaccgtggactttgtcagcagcgcccgcgtagtatctgacggtcgctgcggccccaggaatgtctatgctcttccccacactaaataatttcccagcatcaaggctgtccaaagtcgctagttcttcaacgttttggctaattaagtctgcaaacttcatcataatctttcctcgttcctataaatatgaatataatcattttaatatatcaatacagtaattaatgtatagtaagtaatattatatatatatttatatacttacagtgccagacatgcgaggccaagggccatggtcgaaagcagctcgtgctgctttgacagccaaatcaatatcttccttgtctccttctgcaacccttgctattacttctccgtttctaggatctattgtctccaatgttttccctgtttatttatttgatttattaatattattatgacaagttcaacaacaaatacaaatgaatgtcttaattaatcatcaaattataagtaaatatatataatgattacatatatacatgatacaaaagaactagctaagaccgacatctagttctacatgctccaaaatccaaaattcaactttaaaagtttatttattaaattttgtaatgatagaaattagtggggcatttaaaagagtaaaattttcctatttttagaaagaatatataccataatatatttcctaatttattttacttttattaatttaaaaaatatgactccttacaaatttataaattaaatataattacattttttaacaatagcaattaatctaaattaaaacatttgttttttagtgtaattaaaacattacttttgatatgctttttaaaaaaacattttggttatgcttttttcaaagaaaaaaaaaaagaaaaagaaaaagaaaagaattgattaccttttctaatacttatgtaaatagaataaaatgattataattttttctgatcaatttaataagtaacataataaaatattatttttgattattttatatatattataaatacattcatttttattattaatttataaaaatgctgattttattttatttatttgtttttgattgaaaattcattcaaacattaaaattgttatcaactatggataacaacatgatgagactaaaatttattttcgtaaatatatatatagtttaagtttctcaatgtcttttcttaaagaaaagttattacacgtttattattttctacgtactcaaattaatataaataaataatttaaaaattatctaattaaaattattaaaatataagttcttttttttgtctttttctataatgttttaatttttgtaatttgtcctattttttttgcttcatttaatttgaataacaccgcttt

SEQ ID NO: 42863 - DNA, 1761 bp, Cannabis sativa
attagtctagagtctccttattgagaccttaatgtaatcactgggttaagtcctcaccagcacagatatattttgcagcttgatctgttgaagggtagagtttaaaagatcgaatcacctcttcttttggcttcatgataaaatattgttcctgtagataattatcctttatcaaattatttccatgcaaatgagcaatgaatggcaagatatgcacatacacatttctaaatgagtttacctccatgagtataacatctcttgagcaattaaactgcaacatagaaaacattggtcaattaattcgttaaaagttataatatattcttcaaagggacttgaagaaacttaattcatttgagttaagcttaaagtgaaatactcggtacatccttcaaaaattattgaccaagttacaacaagtaatagttccttgatccatggcctatatatctaaatgagaaactctagtttcctactaaaattttaagtagattaagacagacaataataatttgatggggataccgttaagccatacgatgcttccaaatcaccagtgtttttagttgttattgtagcaaccccaaattgagaaagggcttcaaatgttggtatattgatgctcattatttttccaggactcctaaagaaagagtcaacaaacaacatgaaacatgaaagcctttgagattctatcactactgaagtatcaatttcagccaaataaatatatcatccaagatcttccactagtataagagatcaaattctgcgagagataaggaagaaaaaacaacctaataaagaaatgagaatgctaatatattataagcttgcttctctcatatgcagaagaatatgacaagttggcctccatgacaaatacacaggagatgtttatatactggggctactctggtataccccttatcgataaaccttcttgtgtttttggctccaggatagttataattcaaattttttttatgactttactcgtttttatgactttattcgttgtagatatttaagacatttgcaaagtttttgagaaattcgaatagtaagaataaagaattatagctatcttgaagccgaaaacacaaggaggtgaatttgtacacccattttagggggtgtaacacagaatctccctacactattatagtattttatttagttaatttgtggaagaaaaaggtttataatagatattaatttgtggaagaaaaaggtttataatatatatgccaatccattttaaaagtttgattatatgcaggagaaacaataattttataattaggcatccacacttaattttaaagaaaaatcaacctttgataaacataatctacatcatctgctcttagttctatcaagagatttgtattcagaacttcagtaacccctatggaaaatgaatgagcccctgcattctgttacaaaataaataaataggtttaataaatcactttttttttttaaaaaaaaaagagagaaaactaaagcacattgagtacagattctaagacataactggatgctggtttattctttcaaaccttccttcaataccatataatggtaactgttttcttctaattctattccggtcagcctgtgattaacatttaagttatctttctttatcagtacatagctaataaaacctcaaaaattccaagtcacaaaataatatacaacagagcataaaaccatatatattttcctacttaatacatgctaacctcccaa

SEQ ID NO: 42864 - DNA, 4188 bp, Cannabis sativa
cattgccattcctagtggaaaatgaaaaagaaattttgttaaaaatgaaccagtagtaaaggaaccaatattagatgtaatcacgggatatgccttcaaaagacgactttatttcatacttcattaaataattaatatagcttgtatcctgaaaacattgtattagtttttctcttcaatcttcttttttcctttttcttttttcaaaatgcttttctatgtaattgaggtttactttttttttttttctctaataaattgtttgataatgagaacctgaaaatttagtcaaaattttataaatgacatgttattctctctaaactcagaaaaatagggaatcggtctctaaacttgagatacaacatgaaacacccaccaccaccaacacaaaaaaaatttaatcactaatctaaaggataaaaatattaataaaatctcaacagcaaaatatttccacacctgacacctcatggagaaaaagaaacccaacaaagaaaaaattgtcaaaaaagaaaaaaaaaaaaaaacataataatctggactgttttattattaatattataattaaaaaagaacaattatagaagctgatggtcaacatgttgtaacaccaaacaacaaactataaagaacaacaccatttatttaaggaagttcacagttttagatgttgtccattatgtccattcaattatagtaagcaattaatctttttgtgttctagtactaagtctcaagttaaatgtagaaactttctcatccattccttttcaccaccaaacacatagattcgtagctaataaaaatatattgtaatgtaaaaaatgaatcatttacattggattggaccactaattttaatcccaaaaggtcaaatggcaaaacagccaattagtaaaataggcctctagtagctcctcattcccaactcttcattttgtacagtagaaaataatggtcaaaagtactaaaactaaaagacatgactaaactatacagctattgagatcctctctctctctctaatcagattagtcttcaaaataggattggaaagccatccatatactgaaccccccaattggaatgccccataaccaacagaatcttgaaccgaaatttagttatgtcgtatgtacatggcatggctatcactgctctctataagattcgattaaatggtgtcttcacctttccagcatccttactctgtcaagcaactcctggatggtatttgatgcctcctgcagaaaatagtgatttattgttgaggaatataatcagagaataataccaggtgaaccactaagtcaattaacatacctgcagcctatttctcagattctgttcctcagtgtctcgtcgatccctttcctctgagaaaatatcgataaggctctcttgttccttgttcaactcgtcgattttttgttgtgatgcttccagctgatcataaattaaaacagtgattaacaaaaactgagtataatagtgaacaaatcatgttcgataaaaccaagatccatacctgaatctctaaagtcttgcatctgtctttttcgtactgcaaatcctgaagtacttcacctaaaacatctccttcgattttattcaatctacaaagtgagaaagaaaataagatacacaaaagtgaaacagcttgatatagtagcgttttataaggtcgagtagtacttctcttttaattcagcattttcttttctcaactgctccacaatgagggagtttgactctgactctgaaggagaatgcctggtatgatcaacagaacttttctggaaaagataaaaaagccattggttaaaccatgttagcaacgcgtataaattaagttatgcacattaagaaaggtagacttgttgcatgattgtatctgatcaataatatcatgtgattgttttcaacttcaactaaaaaagaggaactagtcgcaggtcattcttataccatttattggaagaagtcttttttaccttatgtacattcaccggagtgaaatgaaaacttcttccaccgaatacactactatctttccgagccatgggtgggctgggggtgttaaatgttctctcagctgggattgtcttatcattaccgccattactgtacttctcgcgcatgggagtgtatgagctatcatcactattatcgctgatttgctcatgaggaatcgacgaatttaaattacttgttcctttctgattaaagtgcctttctgcagctggagctggagttctattacttaagttatgggctggagttctatcactgaagttatgagctggagttctatcacttaagtaatcacttctccttttcattggaagagtattatttattatagaatcaggagatttttctgcaaaattatgaaatcatgtaaagaaaaatgcaataaataataaataataataataataaacgaaaagttttaatttaatacctctatcgtttccattgaggtgcttacgttgagactggtagccaattttgtggcaattattagacctatacataatatatcaattaccacctctatataaatataataataaaaaaaaaattaaaagcttttagaaaattctaaccaataatgcttctgcatttgtacaaggcgtgtctcgagtcttgaaagaacggttgtacgctcaaatccctgcttatcatgagcaggttcaacaaagttggcttccaatacacctgtcaacatacattaagaaaaatcagatattgggctatacaaaacatcgatatgaaagctttgggtcttcaacagaaatgacacctataactccacgacccgaacttcctgcagcattccaaagcctccaaaagggctgcaaattaaacataaaaaagaatatcataagatgaaacttctacacattacgaaatgtgcagaaaagaaaatctccagtcgttttactccaaccatgtacactataaataaaattgcacttgttgtaaactgttaaccttgtccagcatcaaggtaaccttttataacagccaaacatatcacagcatcataacaaaaaaccgtattgaatggaactattaaagaaaagtaccagaaaataaacagaacagagaagtacaaagaagcttgtcgattagaaagtgagtagtattgttatatcataaatgtaaaacatttagaaaaaaggttaaatgagaaagtaccttaatcaatctgttcttgtgataaacattaaatccttgaacatctatgtgatgctttgcgtccttaacaaacccaatggtgacatcagcaaccatctaatcacatcaatagcctgtaattaggaatgacatacaatatgtggagaactaaaactaagcaaactttcttcttataaaagattacattgacatctttagagatcccttcaggaccaggttgaggcctgtatttgatcttttcagagaacatcatatcatttacaatattatggtggtcgacatctttccctcgaagcataattcgaaaaccaggaggaagcctcaagtacaatattgatgcatagctctggatttaaaccaaaattaattaaaaattggataataagagcataggatgataaatcaccaaaatcaaaaactaaaattgtgacaataccctcaatgagtgtcgataagtcaagaagtgcctggaattggggaattgtttagccatctgtatattcttctcatctcgatttacccccctaatttgtatatcctgtataataaaaataatattagacaaatttaatagataaaattctgctttataaaagaaagaatgagagtaggaatcttgaggcatacatgtggatcagaatcaaaatcaagctctaactgtccttcatcatcctcccaaaggttgtatatgtatattcttgttccattgccttttatcattgagaactgaaattaggcaaagcaataaagtcaatgagtgtatgtggcaaattatgagaagaaagtaagaataagaaatacagtgagtaatgacaaaaactttttatgtatgtacaaaaatcacctggcgaagaagctctccttcagtagaaaatggagaccattctacaatagtctccaaatttttattccagtcactgagagaagaacgcaccatcttcctccatccctccccctcgctttcataatcaagctatcata

SEQ ID NO: 42865 - DNA, 3148 bp, Cannabis sativa
attttttttttaaccaaatgtaacaataaaaaattaaattttccattctcattaacctactaaaccaagattgatgacatcaggaagacgaaggggttcaacaaaaattatgattagattaattaagcttagtcagtatacacgcggagataaaaacataagacgtggaccccagttttactagtcccgtaacgcgctttactatggaccccacaaatcacttctctctcaactaatcttcttctctttctcttttcttttcttctacacctacttagttccagtgagaaggagagagaaagagagactctccaacctctgtttatggtgatcgctccaaaaacactcaaaacttccaaaaacccactcatggaggggaagcttcacacccctacctatcaacatgaaacatccaaatttcaaattattaatggatagttaaaatttcccacttctctcatccttaccacacctattctttttttttttattcatttcatcatttcttttaaaaggaaattttgtattcttcccatttatttctagtttgttgttatctccaactctctctctctctctacataatatatatatatatttgtgtgtatactagtaggacatgaataagaggatttgtacaatcttatcgtttgatgtgcccgccgcatgttggtctagtacttgggttttattgtcgttcatgttcatttgtaacgcccttctctttaaacctaagcgtttttgttgttgggagcttcgataatgtcgcagaagagaaaccccgatgagggtcgagctcctcgaccagaaggaactaattctgacgataagcgtagaaagattcccaatttcagaaagtaagagactctcttcctttctctttatttctttccatttttattttctgggatgggctctcttctgttcttattttcgatgaggtttggttttagtggtttgagttcgctttgtggcttttttgctcttccttagcttaaattaattgcatttcttaggttgaaaggctgaggtgggttttgaggttgtgttcttttcttcgagttaaattatatatgtagcattaataaccttaggaaaagaggcatgttgggaataataatatgtaattgggggaaaatttgattttttttttttgtcaatttgcaaaatggttttgctttgatgattctttgcaagtgtaagtaaattccactgagagtgagtcagaaagtctactttgcaaagagttatgattaaaaaaatatttgctgtgaaaagtgaagtgactaatgttattttgttttcaagggaaaaaaaagtgcggtttgtgtgtattatattatctagcttattttacttgacatagtgaaaaggagagatgaattgtttatcttatactatatataagtgaagaaaagaacatatatattcgacaattactgtagttgaccttaactacttttcatcttaatgtaggataacttttttgagcatttttaggtttatgcaattggatgattagttaatagaagttctttgtaaaactcttcaaggctgtgttgcactttagaccataattgctacaatttctacaatgagtttattttttaatgattttcttttcattgattttcagtgttgttttggaggtaatgaagttgcatacatttgaacgctccttggagcctttgattcgtcgagtggtaggtatcttcgatttttcaactctttgcgatcatggggtcatcagcatccacttatgtgaaatcctcatgtggactatttgttatgtctttgctaactaactagagaacaacactctaaatgttaggctgaaaaacttttgaaatgcattgcatgttcaacccatgtggaacaacctctggcctgttaccagctatcattttcacttctttaggtttatgttttctttaaagtagtccttttcaccctagaatattgaaatagacctaacgtttcttaaaccccacttgccacttggtcctgaacatggcttttctcatgaatgttattggcatgtttatacacctaatagtaataccatgtatattattgcttggcataccagctagcctagttaaatggttatgatgttttactgtaatcagttctcatcatcctagtttggaccaaggacctttgttacttttaataggaaatcttttaacaggcattagcataattcctataacgcacttaaatttgttaagcaactacttagaagttgtaaactttgagtaatgatgcactaaaagagacaacgtccattggcgataggacgtgataagttgttatcgtgaatttgttcatttgggtatgctggattgccttgtataaaatgtcaaaattatgttaacgtcatcggttgaatgattgatataaaggtagagaactgtgaaggaaataattgctactctgctttgtctttcttctatatcattttgcaatatgctctttgcaaattattagagtagtgggtttatttctttttattaataattttatcgcttttcataaaataacataactcaactttctccttaagtaacttcaaacaattaattttcttttttttttctttacttgaaaaggagtttggtgacatagaatatatcatagtctttgtatctgtttaatcttagaatttttgttgatttatgctttacatctataatgtgccgtttttaactcttgtatttgtatatccatatcaaatggaggtttattaaattttactaaacatattcttatgtttctttcaggttaaagaggaagttgagatagccttaaaaaaacatttaaacaatatgaaacagtaaggaataataatattttgtttccaaatatcatcacctcactgatgcgacaaaagttgttcagttgaccaccttgtgtcgcaattgataaccagtgaatattttgtttatgttaggaatggcgtgaaagagatgcattctactgttgcaaagagtttaaagcttcgcttcttaaataatatctctcctcctgtattcactggagctggaattgaaggagaagaaggcttcccattacaagtagctttagttgattgttttacaggccaaattatttattctgggccagaatccacagccaaggtggaagt

SEQ ID NO: 42866 - DNA, 5891 bp, Cannabis sativa
cctatagggcctttttcagccaataaaaattgctacgtcagcaattcttttaaggtggtaaacatctgaattttacacattctggtgacttttttaattttttttattcaaacctgactcaaccctccccctctcgtttctcacggcaaggccaaaaagggctaattccgatcgccgtaagaccagatggaggtatttgacataaaataaacacctcaacttaaccattgctagggtctgataaagatcaatgaaccaaaaaaaaaacaattgaccagtaaaagtttgcatgagatacgaaataaagaaacaatttttacacaaatgtcccattttccttatacaatcaaacaagatagagattacggttgtgggtttcaaactttaccgctgacaatcttgctaaagagtacgattatgtcgctattgttcttgtttcatactgctttcttaattttctgtataggttttcaagtcggcaaagctcgcaagaagtgagttcatttttcaatttttatttttcttttgcttcttcaatttttattaaattaattaaatggtcattttatttttgtttaaatcttttatgagacatgtataaagtgccctacccaactctttatgcctcataatctaataacaaagaggctaatctcttcaaattgtattaagaggggaccggaactctgtgaaatggatgcctgtttttcatgttaatgatattgggaggaatgaagcatccttgtggtgtgctctatccatgactctctgtatatagtcactcattttttctacttccatgggtacgccaccagtaatcctcagaatcgcctctctgacaatatggattcttgactatgtttggacttatggtttgcacaatctcatttaggaatactcgtgtgctttcctaaactcatcttattaatcatcatctctttttgtgtttttttttcctttgttttatatctcaatgtcagcaataagaaacaccaagatcgtggcccctgacccatctccggtgatcgtgccaatgaaacacttcattagagtcaaagcttcttggcttcgctccggccacgtcgactcccaacgggccaaacgagtttcagaaaatgttcctctcgtagtgatcttccagattccgtcgccagattctcaatgcactgccattgcccagcgccggccgccgtccaccgtggagtctagtgagcttgggcagctgctgtggtgtaataaaaatgagcataatccggtgtttctcacctaaaattaaaaatatgcatatgctgacgtggtaaagtcgtattttctaaaagaggccctactagtggagtttttctcttgagacctacattctatatatatatatttgatagacttatctttacttcatatatataaatgtgtctccttgcaattattttttgttccattaatgttgctgaagtttgataaaaatatggatgtgagcatttactctcatctctacacatagaagttcttattaaaatctagaatgacttgtcctccatttttttttaataaaagttaaagttttctttattttttttttcttttcttaattgtttttttaggaagaaaatttaagtatttattatgaaggagatatttatacttgtattagttacatgttaaaggacttgaagatagctcaagtagtcataaaccgtgtgttggaggtctgagttcgagtccccaattatacaaaaaaaaaaaaaaaaaagttacatgctgaagactagaagtgtcttaatattattaagagtggttaaattagggcacccactaagtttatgacaatacatgatgaaatttggaacattatattgctttactgcatttattgcaatgctttctagtggtacctactacctaccctgctccatattcagtccattattttggaaaagaatcactatctaatttcatcatagtataaaaatcgttagtaaaaagaaaaaataatataaatacattataaatatatatttataaatgaaaattcatgttttaggatcatatgttacttcttcaagctctcatttgtatcaaacattaaatttctggaccatgccacaatagacatcatctacaacaataatgatatcagtgatatgcacatgtttatactatattcacatcgcttaattagagaggtaagtttttgaaatgaaaactcattgtgtcccacattattatattgttctaggttaggtactcaaactcatgcatatgctttaatgaaacccaactgtgaaaccaaagaggttgttgaaacttgaattatatgagagtataaacagtgctgatatcattgatcaagctaagaacttttcctctgttattctttttaggtgcatttcagctatggagtgtcaaaaaaatctgcagggtgatcttgagtctatgagggttttctacagaagtggagcaactaaggaaatatcttggagaaagtcacagctgaaaggattgcttacttttcttgaggaaaatgaggctgatattatgaatgctcttaaacaagacttgggaaagcattataatgaggctttcagagatgaggtatatatatatatatacatataattgatataaaatagtagtaaagacaagaagttgtcagtgctgttacacattatccttttagaaagaaagaaacgtactttttttttttataattgaaacaagagtgaaaaaagtttgttctttattgtaggttggaacattgataaagtctctaaacttggctttgaagtctttgaaaacatggatgtcaccaaaaaaggtactctgataaatttttttcttatcagtctttgactaaacttcttgtaatttttatcaaatttatactaataattcctatatttgttactgctttgtgaataggctagactacctgcaattgcattactgaccactgcagaattggttcctgagcctcttggtctggttctcatattctcttcatggaattttccatttggtgggtgaaaaagaaaatgtagcaagacaaaactagatagaaaccttattattgaaaactcttattaattcttctttctaaaacattaatttatttcatttgttaggactgtccttggaacctctcataggagcactagctgctggaaacacagctgttctgaaaccttcagaattgtcccctacttgctcttttattctagcaaataccatgcccagctacctcgatggtaaagctgtcaaagttatccaaggcggctcagatgttggagaacagctcttgcaacatcgatgggacaaaatattctttactggtatacacacaaacacacatctatgcatgatcattttgaggtctagatgtactttcccattcatgtcttctctgttaagtaggaatttccttgtgaatggcttacatttaaatcaaggtggagctacactatgttagagagtctcacattgataatgtgtggaaacttaataccatttataagatcataaggctactccaatcatagccaattagttttggagatgtatccccatacttcttaccatacaactcactatcctattttctaacatcatactagcagctgtcaaacttgttttccttattaatatccctcacctaacttaaatttttggcttcgccctcattcaatattgaatcaatgatataggtagtcctcgagtggcacagatagtcatgtctgcagctgctaagtttttaacaccaattgtgctggagctgggtggaaaatgccctgctgtttttgattccttgtcatattcttgggacagagaggtaattaaaggcataaactttattgtttaggaaaaatagttaaaagtttttctttaactattttgttcatgtaatgacaaggcggctgtaagacgaatccttgtggggaaatttgggacttgtgctggacaagcttgcataacaattgatcatgttcttgtggaaaagaatttcctgcccatattggtaagaaaacaagagctttctcacattttctgatataacaaacaagaactcaagcatggttaaaaaaaatcacgtgttcttgttgtttaggtggacttactgaagaccaacactaggaaaatgtttggagaaaacccccaactgtcaaactccatggccaggatagtaaacaagcataatttcttgagattgaaaaatcttttggatgatcctgctgttaagtcttcaattgtttatggtggcaaaattgatgaggaaaacttgtaaaagacaactttttaagtttctttggtgaataaaattagcatttgtttagtgacaaaatcataacttttgtcaacttttatgcaggttcatcgagccaacgatcttggtagaccctccgtttgagtctgaaatcatgacagaagagatctttggcccattgcttccaatcatcacggtgaagatcattaaaagactgtttttctcttttgttttcggaacaataacttacataactactctttttctttgcttcgacagttggagaagattgaagatagcatagaattcataaagctaaggcctaaaccacttgctatttatgccttcaccaagagcaaaacactagagagaagaatcatatcagagacatcttcagggagtgtgacaatgaatgatgccataattcaagtacttctttttaacattttcattatttttctttacactgaaaaagaagggttttataacaacaatttttggtgcatctgtttttttaatactaatttggacccttattatcatcattacattgcttgacttaacaatggatttttcttctcatgactgttgaaaaatgcagtacgctgccgatgcagtcccttttggaggggttggagaaagtgggattggaaggtaccatggaaagttctcctttgatacattcagccatgaaaaaacagtggtaagaagaagcttcttcactgatttttggttcagatatcctccatggaatgaccaccagcttcaactctttcgtgttgcttacaactatgattacttgggtattgcccttgtcatgcttggcttgaagagagccaaaaagaattcatactctatctaaatatataaaaataaatttggatacattatgtacaagtatattgttttcatatctaagttgtattctttgtgtttttcttctaattatatattgagtcagataaatggcaatattataagtaaggagtggatgagatgagtgtattagtttgtaatagtgggagctgccatattttgatgctttactaaaaggccaaattaaattgttcatataaaattctagctttttatttttaaaatctttccaagataaaatctaatgcaaggattttattttggaatgtgttcacctggtttttgtcaaatgatctaagaaaatcgtaaaagatagaggactacgctgattaaattttagcaaaataaaatcgcaaaaaagtaaattaaagaagacaccgggatttatagtagtttactcttgtgtcgcgacgataataggctacgtctactttataatttattgattttgttcgacacaccaaagttatattctcaagagtgtggacaatgatgcaaaaagaatttctaggcaaaatctatgtcaaggcgtatgaacaggaactcatgggagatcaactatctataaactcaacaataatggtggtgataatcaatgttcttgggaaaagtgaaaaaagaaaagtcaaggatagagaatggttcgcttatccttggaggaatcgtgtatatgttgttagactataatatgtaggggtgtttattggatcacatccaatgtttttaggcctatccagatccgatccaatcatatattgga

SEQ ID NO: 42867 - DNA, 6646 bp, Cannabis sativa
cgtgtgctcatgcgcttgctgtgataaaagagatgaacttgaatgtttacaactactgttcaggttattacacgacaagaacatggcttgaaacttttagtgtgggttagtagactgacattgacacttaaattaaaaaaatatatacatacagattgagcataagtgtcagtttataaccgagacttgtatattttgtatatttttttaatctttgacctgttattgattttttttatcaaatttgatgaatattttttgcttaaaatattatattgtaagattgaatgatatgctatcatttttttttattttaatatgatttagattaaatcatgagcaaaatactatttattgtaattattattgaaattttattaaaataaatttatgaagacataataaagaaactcaacaatctaatatcaaacaaaaaagtttataattataatttaaatataaataatatataaattatatatatatatatatatataaaaaaaataagtttatagcattttaaattttataatttcagaatttactaaaatttatttttttttaataattatattttttttttttgaaaataactcttctagtgtctgtttaaaacaaacacttatacttattagtctcagttttagtatctgtttaaaccgatactaaaggaaaaaatatatatgtacattttaagtgtcagttttaaaatgacacaaaagctcatttgtcttagtttataactctgacacttaaattttgactttttgtgactgtagaataggtgttgattctatgaaccgacactaaaagtatgagtgacagttttaaactgacaccaaaaatacatattgtagtatatttctttttaaatctcataatgttactaaaaattaaaaaaataaataataatacggaagaaaatgaatgaaaccatgcaataaaatgctattgaaattctttggttttctcttttgaattttatttattttcattcacatcgttggtggtgtttttattctcacaaaaaaatacatacaatatatatgtgtttttttagtttgcatcttattatcgttctttgaaggaaaaagcaaaagttgacacaaaattttaattgtctctcgtggtaggcatgtggttttgacttcatcttcttagtcaatggtcggacacgtggtgattattaattggccgagaccttggacggcgaaaaaggattaaacatgaacgagtatattcattgttgaattcaatatagtcccaaattataaagcaaacaacaatatctcaatctcagatgatttttctcacgcggttagtttccgacaaaaataatataggaacaccaatctctcttaatatatatatatatacacacactgacaaagatcagtattcagtatatatagttaaagaagatttatcaaactcaaaaaaaatcagtatcaataatggagtctcttaataagctgatcacccaagctctttggttcgccatattattattattaggtacttttggagcttttctcttgttgttcttgagagtaatatattgttggtggatatctccaattcgggtttaccgtaatcttagaaaaaacgggttcggaggtccgactccgagtttcccactaggcaatacaagtgagatgaggagtgttggtagtagtacaagccataataataataataataataataataataatgtgagccatgacttacactctattgtattccctcactttgcacggtggcgtaagatctatggtaagtaatgataataagaatataactaataatgtgtgattaaatgaatatgggatgttaattatttgctgatgaattttccgttatatgcagggaaagtattcgtgtactggcttgggacagagccttttgtgtacgtaggagatggtgaatttttaagtagaatatcaagtggagtagctggaaagagttgggaaaagcccaatgtatttagaaaagatagagaacccatgtttgggattaatagtttggctatggttgaaggtgaacattgggttcgtcatcgacgtgctattactcctgctttttccaaaacaaatttgaaggtacttacgctttaatcatgcacgtgcatgcttcttttatttttatttttattattatatgcaagacaaaagacaacttttattatatatatatatattattagtatatatatacacacaaatgcatttgggtccccattttggacgtaattattaaatccacctacccaccttagggtggcttctgtggtgaggctctaattatttaccgattactatcatggataagttgaaaaatgtatattttctttttttataacgattaattaaaaatattcttatattatattttattaaaatatatttactttttgaataaattgcccaacatacttgcactctctatttaaatctagcatataatttattttaacttaaatggtataataagtataagtatataaaaatggatgtaaaaattaaaagtaaagaagttatattgatttcctctttttaatttaagcacaaggacaaggaattttaatattgatttgatttggacgttaccatcggattatcgccacattaatttttgagtacgtactagtacaggactaattattgcatgcctagctaggagtcaaactatataagttttgttgaatatttatggatatccatttgttaatttatatacttcaattaatgtatttacgtatataggctatggcgtggtcaatgaaagagtcaacgaacaacatgttggaccagtggactatggtgaattcaaatattagcccatttgaaatagacgcagagcgagagctgacagccctaacaggagaaatcatatcaaaaataagctttggaataagctacgaaaatgggcagaaagtgtttgaaaaactaaaagccctacaagctgaacttttcaagtcaaatcgcttagtgggggttccatttagtgagttctttatgaaccgaaaacaaactcttaaagcccaaaagctcgggaaagaaattgaccaaattctcctatcaatcatagacactcgaagaaaatccataaaggaggaaaataattgccaaggagacttgttaggtttattgcttaaagcaaatgaagagaataatggtgatgagagtatggataaaatgttgacgattagggaattaatcgatgagtccaagacttttttctttggtggccatgatacaaccgcgttgtctttgacttggacgctattgcttttggctctcaatcaagattggcaaactcagttgagagaagaaattagagatgtgattggagatggagaagttaatttcacctccattgctggcctaaaaaaggtaactaattaatctaatataagtgattagtatatatttgttaaaattaagcatggattgataagtaactaattataattgtgcagatgggatgggtaatgaacgaggttatccgactatactcaccggcacctaatattcaaaggcaaactagagaagacataaaagtagaggaaaacatggtaatccccaaaggaacaaacatatggattgacattgtgggaatgaaccatgatccttgtctttggggaaatgatgtcaatgaatttaaacctcagaggttcgaaaacgacgtagtttatggtgggtgcaagcacaagatgggttttgtgccgtttggctttggtggaagaatgtgtgtgggtagaaacttgagcacactcgaatataggattatcttaaccttaatcctaactaggttctcctttacattgtcgccaaactaccgtcattctccttcaaccctacttactttgaggcctacctatggattgcctcttctaatgcaacccattagcgccacacatacataacatattgtaatttaattaatatttgatattacatattttaatttaaggagtaataaaaaaataacagctaattatatataatagcaatgtttggcacctaaaggtgcttaattataatatgcttatttctataattttaattttggttattaaaaaataactgatgacataagtgttcgataagtctacacatatagggtcctatatttttggtacatatttgatatatatgtcttattcgacccttttatctttgattgttttaaaatggaagacatacccgaaatttcattgagtgccaagctaaaagcaatgagatgagtctttaaattcttttatatattcggatttgaatgaatgctatacattcatagtagtggtattatcttaaatcaatatcctatgagtaagtcaggaatcaattcattaattaaaattagggaattaagaaaatagggaattcccttaaaaaaacgaaggaaaattccaacaataaaatatatatatatatataatacaaaatttataactaatttattactttatctttgattcattacatcgtctaataatattgtaattagggatgcatattacattgacaattatttaaaaagaataacaaataacgaataaagagatgcagataaaatagaataaagattacggttacattcaattgcaaagttaaaaaataataattatacaactaataagtaagtcttatatagacaactaacataaaagacgaaaataataaaaaagacttaataaccctaattaattattgaacaccctccctcaaattcacgatgttgttggaagaagtaacgagagtttacctaaaagaaaatcatatgcgacttagtaagaaagtaagcaagttgcatcaaagaagtaatattagaaggaaaagtaatagtgcccaacttcaaatgatgaccaataaaatgacaatcaatcttaatatgcttggtgcattcatgaaaacttgagttgtgagcaatttgaatgtcacattgattgccacaatacataggtgaagtaattatttcaaccaaacaatctctttagtagttgacgccatgacacaatacatagcttccgttgaggattcaaaaacaacaaattatttttcttgctcttccaagaaatcaggaaatctcctacaaagatacagaaaccaataaaattttttcggtttgtgagatcacaaccacgatcaacatcatagtaagcatgaaacttcagagaagagttggaaggtagtagtatcctctaaaagatggtacctagataccgtagaatgcgatgaacaacaacccagtggatagtagtagaagaagcaacaaaatgactaataatacgaacaatatatacaatgtttggacgagtagtagtgagataaaccaaactgcgaataatggtgtgatacaaagtaggatcttctaaaggagggccatcagaaggagaatattgaacattcaactcaaaaggatatgtcaattatagttctagtattagtaaggcgagcaccctcaataatgttagtaatgtactttgacatacaaagaaatcagaatacgacttgccgatgtgcacttaataaataaaactaaatcatgatcacttgagacaaaaccacgagacaaaataatagtagagaacttctgaaaccatgctcggggagcctgtttaagaccatacaaggcttttttcagcttgcaaacctctccatgcttatgatgaacattaggaggaggaaccatgtagacctcctcatgtaagtcactattcagaaatgcattctcaacatccatttgagatatagtccattggttattaaactgtggttggttacccttatgaggaggtttttactaatatctctattgttgtagagcatgatttacaagtttaggacattgagctttccaatgacctttctaatagttttgtggtactaaattagggacgcagtgaaagcatttataatgatcatcatcgtactaccctaaggatcaccatatatacatatattaaatctaaaaataaaagatgaagagatatatttccctcttgaagcgaaggatatcctcgaatctgttcgtaagttgtatcctataatggtgatgaaaaactcacaatgcgaccttccaaatctaccaccacatacaaatattagtgtgggataataggataaaactgtataatatgttcatgttttctctcaacacatgagcaggaacacttcttttctctttgagtgaaaaatggtgaaaagcttaacctttttcagatttcctaaattgtacgtatatataaatttaggatataccgacatattaattcaaactaataaaataataataaaaatttaattaaataagataattattattttaaatattaaaataataatatttaaatatttgaataaatatttataactgattctgttatagttttttattttgaattaaatattttagtttaaattaaatatctaataactgattgagaaaatctctcaattacttgaaaaattatctcattcattttgagagaatctctcgattactttgacagaatatctcacccaccgtaaatatatctgcaaccactttttaaaggaaaatttgactaatgatgcatacattaggccaaagaatctcttaattactttgagagaatatctcacccaccgtaaatatatct

SEQ ID NO: 42868 - DNA, 4086 bp, Cannabis sativa
aaaaaaagtcatctaaattttctttacaggtattatacctcacactgttcgaaaaaggactcctcgtattgatgtatcaaatgctgataaagatagcagggatgttaataatgatggtgttcataagctagcaatggttctgacggaggcctcacaaagaagtggttccccccatgcttcttggaggcctaacaggaaattggaaggtggttcaccatcaccacatcaagatggtggtaggatggtaatattcaatttattgtatagtaatatttttgtaccaacttacgtacaatatttttatttatcataaacctagctaaaaattaattattattcacaatttgtttggtatttagtgtgctagacctgaaatgagcagtggacagcttcagtatgctaaagttgatgacagggctagtgggtttagcatagggaacacagaaactaataataaggattgtgagataccaagaaatcatttgatgggtagaaaaggtgctggtacagaatatggtcaaaagaaaggaaagaactattttctaaaaaagctagacgataaagacaaggtaagtgatcagttggatgacatagaagaagattatattggaacagagaaacaaaagttaagtgctaagggaagaattcaaactgaggttgtgaatgtgaaaagtcctaggtccattactaaggattcaaggaaaagaagtagaaattctctttatgaaggaggtaattctgggtccaagctactccttccttcatgccccttcctcatttttacgtagtatatttttatgaaggaggttttgaatgtttattaacttccactgttactaaaacaaatttctctaatcaattttttttattcccaatggttttgtagacctttttattccctttattcagtttgactttctttttgcagatgagggttctccttttgatgccctggtaaccctggcaactacgtctttgatgatgcgagaagaaactgctgatacaggtaagaagtttatcttttgagattagcttttagatatttatcatggataatgacaatttttgccattctgtaatctcttatccttctttgaaatacgggtactctttaacatgattgtgataatttgacttgaaactcttttatgttttacttttaaatttttaaaattaagagtcatctgcaatgataaatacaagctggtgatagtgttaacagatctaacttaaagaaaatcatgcagtttgtgatgttgaagatactaattccagagcatctaaactaggaaagtccaaggggggtgcccctgagtttaatgctggtatagagaaaagtaaacagaagtttttcccctcaaaagtaaggacaataacttcaaagtttttatttatatttttatttctggaccatttatttggtttatggcaagaatgttgaacttatggaagatgcttatagttgcagccacatgaaaatgaactacaagttgatctctgtcagagtgacaatcaaaggattgaggtgtgtgttctaatgattaagagttaaataatgttatattttctagggtatcatcatattaaaactaaggcttcacaaaaaaatgattagatcatacttgtccttgtcccatctacaatttcatgggaggggtgtgtgtgagttggggagcaggggttcgatccccacaaaaaaataaaaaatattcttagcactgagaagaaactgaaacttgtgtttccttcttagctgttgttgtgattacaattctgtagttcttcataatcatagcctcaaattatgctatttgattttcatatgtgccttttctataacattttcttttgggttcattgtagtctagctcctgtgatagttaaacttacaatttttctttcctattgcataatcctattgatactggcaatactgatagttatgaacttggcacttgatttcagattaatgacaaggcaaagaggtttatgtgtaaaggcaaacgctcgtcttatccttcaagcctaccacgaaaactggcaaagcctttagatcttacatattcagaaagcagtgttaaagggaaagtgaacgactctgttttatcaacaagagaagttcatcctgcaaaccagttgaacatacctacaaaagcccggagtagacggaagatgaacaaacagagaccatttattacagaagatgtaaataaaactgagaaagttttggatgaccgacctaatttacacatttctttatttcgtaatggaagtcaaagtctcaaggttagatctctttaaatttgtcacttgtttgtctaatgtagttgattcttgattgaatctttgaattttgctatatatttacatatagatctatgtttgcaggaaaaactatctacttgcctacatcagtatcaggcacgaagatggtgtgcttttgagtggttttatagtgcgattgattacccatggttcgccaaaagtgagtttgttgagtacctgattcatgttggattaggtcatgttacaagattgactcgtgttgaatggggtgtaataagaaggtttttctttttctctgttgtgttccttccagctgcttgtttctttgtcaatacacacatgtgcttctggcagatgattaactgaccaaaggatggttaatttgcacatcttgtttatgcagttctcttggcagaccacgaagattttcagagcaatttttgaaggaggaaaaggagaagcttaatgagtaccgggagtctgttagagcacattatgccgagttacgtgccggcaccagggaagggctttctactgatttagctcggcctctatcagttcaacaacgtgttatttctattcatcctaggactagggagattcaggatggaactgtgctaacggttgatgatagtaggtaccacattcagtttgacagacctgatttaggagttgaatatgtcatggtaatccttttgtttttcttcttacagttgcatcaatttcacacattgattttaaagaataatgatgtaactgagaatgcatggtttgtgtttatttttgtcacaggacattgattgcatgccgttaaatccaatggagaatctgccgtcatctttcacaaggcacaatttcattgtcaacaattgttttgagacttttaatgtgtgcaaaatcaataaacagccaaaagaaggaaagagtgatgagcacacaaaggttgtcttagttgggaatgtggataacactggaaatcattatgcttccccatcaactcatgacatttgtgaaggattaaggcagagagaggttagtgactcctattagttgagaaccagctttaaaattatgtgatgatttgcttagcaaaagagggggaaatttgtgggtgggtgggggtctcttcaagtagagcttgtgaaatttgattatttttgttcaaatgacaatacttttttggcttatggtcaatagttcttatattggtcccttattgagttcttgtgcggtttctcttttttaatgaccgacacctctttcatggccaaaaagttatgtactcttgcgaagcagactattcttttcacatataagtcttagtgaaaccggcaatcaaactgcttaaatttgattgtgaaaacccaaatatctaaattctttacattaaatttaatgtttcttggaattatattgtcttcctcagttgtttgtgctgtgcctcagtagtaagatgcttttccagcattcattaatgggcctttttttctttactcttgtgaataatataataggattgtctctctacttcttcctactgccatagcttaacttggaagtttgatagtatagttttaaaaatcgtgaatgctgtagtacgtagttgtctaagaacattttttttgaacagggatatgcatcacgttctgatttacaagctaaacttgtgtcctacaaaaccactaccccacaaaacaaagcaaattctcagtcttcaccacttgcgcagattcgggcaaaagaagctgacatacaagctatttccgaattaactgttgctcttgacaaaaaggttattct

SEQ ID NO: 42869 - DNA, 4056 bp, Cannabis sativa
tgtaaacataaatgacttctaattttttattgataacaaatcagattagattggaatgggttttatttagggcataaaataacactatttgtgtgtagacacttcatgatgagagatatccatcgaatattaaatcccatttttcccatgacaacagccaaaaaagaccatcccacccgatcaaaagctttactcatatccaatttaagtgcagtatagccttatttggaacccttcttacgatgcttgagactgtgaaccattttaaaggtaagcaagacattgttcgtactcaaacgattagagaaaaagaaactttgagtttcagatataacactaaggagaacatcctttaagcagataagcaacatcttagaaataatcttgtatatgacattacagaggctaattgaaaaaaaatctttcatagacagtctttttaacttttggaatcaaagttaacaaagtcttattaaaagttgctgggttacctccatcattaaagacatgaagaaccactttagagacctaatttccaacaatgtgccaatgatgctggtagaacatagctgacatgccatcaatacctaagcttttatcggaacccatcattttcaatgcaaaaagaacctcatccagtgtgaaatctcacattaaaaaaagtattataagcagcaatgactgtggtaggaatagtggataatacatgagataatgcccaatgatcctcttcttgtgccgtaaaaagattatcaaaataagcttagatgatgtctgaaataccatcccttgaagtgataacataacaatgatttaattttattattaaagtttctagcatcagccttaggatagaaaaacttagtgttacgatcaccagattgcaaccattcaacctgagacctttgctgcaaatattgttctttgttagctaagagttcgtcaaggatggattctagaatttgtacactttgcaaatggccaggagctgtgttcaaagaagtttgaagttgtttgacttgctgttgcacttaagagatgtcattttttagtttcctaaatttctcaacatgccaatattgcagtcgagttgcacaattttgtatactaaaaaaaatcagagagaatatcaccagatgaattctgcaaccagcaacgagaaataatctcaacacaatcaatatcgttgagccacatcttattaaaatgaaattaagatctatgttttgcaattggttcggatgacattgagaaacataccttaactaaaaggtcttggtggtctgaaccataatggtcaagatgtgtgagtgttggaagtaagaggctgtcaggataaaccttattagtaaaacaccaatccagttattctttcaaagcaacaagatttttcttgtttttagcccaagtaaagtcatcaccaacaaaagaaagttcagataaaaaacatcggtctaaaatggttcgaaaagcacacatctgattgtcttacctaagtggcccactatttttgtgagtgtgtgaaaaaatttcattcaaatcaccaacaaacattcaaggatcaaggggagaaatatcatcaagacgattaatcagagcccaagtattcttcttattaaccgatttaggaaaaccataaacaatcgagaaatgccatctagggccatcatcataagacacataacaatcaaaatgatttgtattcattaaacgtaaagatacatcaacattgtcttgacataataaacataattcttcctttgaaaccaacaggagaaacttttaaaccattactaaaatgtaaagactgtttaaactgattaagagcactagtagaagcttttgtttccatgagaaatagcagttggggagtttgctcacgaacaagcaaacacaagcgacataatgcattctagcttatgatattcatggttgtgagcagggtttcttatcggtagcccccactggaaaggatggcagtgactcagtagaatctattgatacagaagaaacttgttgagatagggtgccatcaatagctaaatcactttgtttattgcctctacattttttcaatatgttcctgaagttattatgatcaacttaccttttgaaaatcgtgttattatcccatagttatgatcaacttcaccaatttgaactgattaccttttgtctttgtagcagtaatgataacatctgaactttagcagaaaaatccgaaagttgataaccaaatgagttgccaacgcggagatcagtaggggtaaatgtggcaacaatgatagtgataactgatctaccctttgcctttgtaatagtaatggcaacatttgaatttgtagcaaaaaagcccaaaaactgaaggccaattgagttaccaatggggagatcagaagggggataagtggcaatagtgttagtaataacatgggtgtaggaataggaattaaattggttatggatggagttaatgtcagcattagtattagggagaaaaccattagcaaaggatggaaattttgattggtagtatgatgggaaaggtgaaggaaattcaggtactatctccttaaaaacgagtctttgaggtatgttttgaggaagattaaacatttgtgagaggtgatggatgaggagtagaaccaagagccaagtgtttatgtgacattaaaggaaggaaagatgagctaatggattttcttacaagcaggttaagaaagggtaagcattggccttagaaaagtcattccgatatcgatcataccccaacttaggcaactttcaccaatcatttcagggccatatgggagttcaggatcgattctatcgtcaatcaactcaaggaacgaagcacatcattcaaaggatgtcccaatagaccacacatgaagtaaaagataggaagattttcgtaacaaaattctaaccaatgttcatcccgaatcttagggagattgaccgattttcctctcatgattggttgattgatatcaatctaatatctagtacaaatgaaagggccccatccttcatgaagagggtcctcatgaacgttaatgtattctccaatccattcttcaacctttttagcaagagcccgagatttacttaaaaatgggagtcgatgagtctgaacccagaactgaactctatgtaactctgccttaaagacattaagcagaacaattggtgagtgtaaaacaacgagattgttgttgaagggccaaggttcaccatcgagaatcctgtgcttatacactggacaaccaagagttaataaaaataaattagagtgcatttcaaagatgaatttcaaaccaacatttgttagtccaaaaatctcccattttcttaataaaggttttgggattgatgacattacatagacaacaagcaactaaaaagaattttgtgttttggttaggatgattgagatcagtctcagtaaaagtatggatcactctcttcatctccaataaagctagtatggaactcatatctttgattattaaattcataaatgaagaagactcagttagtgaaaataaataacaaaggaacatagcaaaaagactctgatcatgagaataaataggaatcagggtatatcgatgaagcatgagaggatggagatcatggaggtacacggtcggaggttggcttagttgtggaagttcatgggttgagcataagagacggagaaatgagaaataaggcttcgagggagaaacgaaaaataactacaacatagcaataaccccactcaaacactttttattatgagttgtatggtatgaaaatcaataatgattttatttttctaactctagttttattattttaattttaattataatgtttaaataattatattaggacattttacaattttgtatacattattttaattaattacaaaatatgtgcaaaaaaatttattatcatttcctcatacattttcatatataattaaaaactttttttcaatttttttttataatatatgtggtaataattattgattattatatatatggtaatattggctatgtt

SEQ ID NO: 42870 - DNA, 4894 bp, Cannabis sativa
catgatgatcatcaacaacaactcgagccaaaccaaaatcagcaagaaaaggctcattacaaggacccaacaaaacattcatagccttaacatcaccatgcataattgaaggaacacaatcatgatgtaaataagcaagagcatgaccaacacccaaaacgacatcgtatctcccttcccaatcaaaaccacctttattattacctccatgaagcattgaactcaaactcccattaggaagataatcataaaacaaaagcttcaaattcctattacaaccgaaacccaacaaccttattatattcttatgtcgaatcgaaccaagtgtacggatttcagacccaaaagcacccgattcatccaaagaccacatctttttcacagctaaggtttgcccacttggaataatcactctgtaaacgacacccgagcttcctgtgcctatgacgtttgatgacgtcagattccgtacaatgtcgtcgattgaaaaatcgagtttttgatacagagtcatgtcccaacttccgtcttcttcgtttagagctctgttggcgattcttgtacggattaagacgtagattgctagtaggattagtactacgctggcgctgatgagaattgacattgaaagcttcattaccgtttttgatggagattttccggcgacggcgtcggaaggggttagaacggttccggcgaagtagagacctttgtttgaggctaaatcggataaaggaaggtttttgaaaaatggggtgttgggtaattggcctgagaattggttgaatgagatgttgagagttacgaggttttggagatttgttaatgggtttaagtcgccggaaagtttgttatgagataagtcgaggattcctagcttgacaaggtttgaaaactgaggtgggatttttccagtgagttgatttgagcttaaatttagtgagatttcgagtgatgggattaagccaagttgagttggtatctcgccggagaagccattgatggaaaggtcaagcatttgaagctttttacagtaaaaaatctcagatgggatttgaccagaaagttggttattacaaagattgagttttgtcaactcggtcaactcacttagatgagttagttgaccactgagtctgttatctgagatatcaattaactgaagtgagttaggtaaagtagttgggaaaaatgaaccttttaaaccatttgaatgaagatcaagaaactcaaggctttgacaatttgatattgataatgggatttcaccaactaaatggttttgactcaaatcaataaagtttaagcttttcaaatttccaatctctgttggaatagtaccaccaattctattctggtttaatctcaatctgtataggttagtacaattacctatttcagttgggattaaaccagataagtcattggaaagtagaagcaatttagtgagatttttcaatccaaacaactcttttggtattgaaccaaataagttgttgtatgataaatcaagtgcttgaagctccacacaattagctagactctttggtatattaccactaagcttattttgccaagcaaagaataaagtcaaactctttaagtttccaataagtgaagggatttcacctgagatttcattgttgtcaacttcaagatgagtcaaagaagtacaatttgttatttcattaggtaaagcaccagataacttgttaacactcaattgaagctcttcaagatttgaaagcttaccaaaagaaattggtattgaaccaatgaggagattttctgaaaagtccataactttaagctctttacaatcacccaactcaattgggattgagcccaccaagttgttttgccaaagaagaagactttcaagctttttgagttgaccaattccttttgggatttgacctgagattgagttttggtacaagtaaagattttgcaactcactgcaattaccaatctcatctgggatttgacctgaaagaagagaagtgtaaagagctatggtttgaaccctttgaagctttccaattgaagaaggtaagttccctgaaatgcttgtctctgctaaacctaacataaccaagttgatgcagttaccaatctcccatggaagttcacctttgagattcttgttaccaccacctctgaaaacttcaagctttgtaagtaaaccaatacttttaggaatctcaccactcaatttattatcatagagtgttaaagacacaagctttgagagattaccaatacaagaagggatttcaccttcaagaaagtttgtattgagatataaagtttgcaactttacaagtttacatagctcaaaaggaatctcaccatagagaaagttctctgaaatatcaagaaaagtgagctcagtgtaatcactaaactcttttgggatattcccactgagattagaagaagaaaaatcaagtgttttcaagaatttgagagattgaaaatttgaaggcaatgatgaaccttgcaaatctaatgattttaagctaatctcaatgacataaccattggaattgcattggacaccaaaccaatttttacatggtgttgagtctagtgaattccatgagcttagtagggaatatgatgaagtgtttgataaggtgtttttccatgtgagaagagcttggccttgttcatcaatggagtaaacaaaaccaagaagaagagaaaagggaattaagaaattgagatagcttagaatgttaggcattttttttttttgagagaagagagaaaagaacaaagtgatatgttttgggattgtaacatgtttttgtttatagaaagaaaagaattgaagcttaagaagaagatctagatccaacaccaccaccacaacacccctttctttattatattttaattattatttatttatgtgtttttgtattggtattgttgtttaattagagctgagataagaaagagagagagatgatgcagatgggttttttttgggttttattttttgtaaaaataagtgttatagtttatatgttttttttaattataaattaaaaaaaaaatcaaatggggtcatgtttatttgtttgattcatctatataatgagatgaaaagttttttggattattcttcttcttctctactaatggatttgtctttgttttttatgcatacaattttatttatttattattaattttttactatatgcatgtaagtaccactaatttatataaaaattcttggctttgacagttgttaaaaccatctcttgtttaattagtcaatttaagccatagttaatattttttatggggttttaaacataaatattaatttatgagttgtccattgttttacaattctataaaaagaaatagtaattattaatctttatggttttttttcttcacacaattcttatagctttcaatttttttttttaataatttcaatgatttctttaagtatacattaaacttagaattttttttcaaaaacatttaattactattttttaaaaaaaaatcaaaaattcaattaattattctcaagaattaaattagttgcaacaaaattcccaagaattaaattagaaatagtaaaaatcctaataaatttattcattttggtaaaagttgcaataatgacataacaaactgatttttctttttttctttttttttcttacatataaatatataaatataatatacatctgcaaaattaatggattttatcttccaaacagtgataaaagttaaaccaactaaaaatagccacaaattgattatatttgctgagctaatttactgtatcatcatcttcttaaataaactcaaagtggtccaatattcattatttgtggtcacaaatcacaattgctaagcttgccatgtgcttaagcttgccatgtgcttatatataaatatatatatatatatatatattatcaacacacttactactattttctcttaataaatatttggaaagaaaaaaaaagttatagaaatatataaatatatattgattttaataaggttctttatgtcatataaacacataaatgagcatgttttgatgataaaaggtcaactgatttttgtaaaaaaaaaaaattgtagcaatatataatttattattaataatattatattacatgcatatgtataatatttttaatattgaattattgaagatccattttggttttgtttatgatttaatttaattacatgaaggaaaaaatatatgtggaataatatgtagtgatgtgcacatgattatgaatgagaaataagttaatattaatgttttttttttttaatttcatttaaatatatttttatattatgaagctgcaaatctggtcatgttgtcggctggtcttggcagtaaaatattaaaaagaattctaagattattatgttgctggctttgagtggaatagaccaacataatcacccatgttagagcttaattaattcattaattaattaatattaaaaatctctccaatcactcttttgcattctaatcttggatttgtttgatgcattagatcatattatggcataaatgcttttttgcatatgttatggggacctaatgaggtccatttgttttagtttttattcggaaatattattaatcgagaaaaagaataatgatatgtgtgttcaaaatatgtgtaaatatttttttaataataaattttaaattaatattattggttgaaaagattgatatattattacgtgaagaaaaaaaactcaaatacaaccaaacaaattgtccaaaacaagtcattttgttaaaataattaatggtgtcatcataaaatgaattgattttacaataaattttttacaatttttttggtaatgt

SEQ ID NO: 42871 - DNA, 1925 bp, Cannabis sativa
aacacaagctttcaatcagaaagtacgtgaggtgaggaggttgtatagaattttataaagaagtggtttctatttgataaatactgtgatgaggctcattacttggattgtaattgttaaatagaaatgaaaagagtaataatggttctgacacagtggaaaagcttggaattggatataggtcatgctctaaattttgaagggtattggccaaaccaaaccagtgtatagtataattctctgatgttctctgcttcttttacatttcttttgcttacttaatatttctgaaaatgaccacattgcacttcttttcaccattttaacagtataaagcactatgcaagtatgcaatatcatttcagcagtagaaaacatgtctgttcaggaatattgagaaatcagtctaaagaggagagccactgagaaagttcctgtttgcagcttccatgaggtactttttctgatgtgactatttcagctcttcaattcattattattgtattatagcatgatcagtagaaacaaactctttcattacattaattgctcctttctctactgatgaggtcacttggacctgtaaaattgaagttgctcagctctaaccttcatctgccttggaagctgaatctcttgctttacaatgtttttcggattttcaagagcagaacaaagccgagatatgcatgggatttgatatacagatcttttctggtatgtaatatttagtttctttggtttaatcttcatagtgctgttgtagttgatttcattggccacctaatattattcattatttagaataatatgtgacagtactgagatgaggcatttgagcaagttttacaatgctcaatatttgtctcaatccttagttataatttttagattcttttaagtttagtaccaaatttagtgacaaatctctaaattgttgtacaaaactcatttgtctgacatttgttatctaagattaaggagtaaagagtggaaatttgacattatgattgggtgtttaatctttttggtgcataatgtcaatgacagtataattctctgatgttctctgtttctcttacatttcttttggttacttaatgtttctaaaaatgaccacattgcacttcttttcaccattttaatgaatcaataaatgggcactctttagtatcatttaagcagtagaaaacttctcctgatcaggaaaatcagcatcataattgacaactaagaaacccatttaagcaataataataacataacaaatataaaaggatttattaatgttcatgggattctctaaatttattctacagtttacagttataatttttagtgtcaaatttagtgacaagtctataaattattccttcatttctttcaaacacccacttgaagccaataattctttttgatttcttagtttatatatcaactaaacaaaacccaagtctcattcatggctaattaaagattgccgttctttgcttccatattatattatagctgttaggctcttgagctctggtttgagtttgttacacataagaatgatacacatttttctcatacaaagtcttcaacttcatatattaccatttcatctttcaacctctgctctgctacaaggacaagagtcttctctgtttggtttatttaagtgtgtttttcacccatcaataaggtttttttttttttttgaaacagaacaaaatacaagagtacagaaattcaggaacaaactccctcagttgttaattgtcaaaaattacaaataccagtgctttaagggacttcttttaatgatttgatccaaattcagaatccaatctggtacaaaccttgcccaatcaatgcagaaagttgatcccaattccaataaaacttaaactcaaatgaaaaatggagtccttggttggtca

SEQ ID NO: 42872 - DNA, 3663 bp, Cannabis sativa
atgtgacacttgaacaagtttttgtttatcatatttcccctctgtaacctccagagccaaaatagtcccttcttgaactggaaatagctacacttttctgatgctctaacttaggacaatcaactatacgatgaccaagcccaccacaataagcgcaacccttgaccccgcttatgttagtaatggcatcgatatcatccatcggatcattaagctcagccaacactggtggtatcctctgctttgcctcttgcaatagatgcttcaaatctagaagtgttgtctcactctggttcttgtttatgaatgttgttgctattccagtcttaccgcatcttcctgttcgtccgattctgtgaacgtagttttcaatttctgctggcatgtcatagttaataacatgctgaatgtcaggaaaatccaacccttttgaggccacatcagtagcaacaagtacatctttctggcctgccttaaaagacgaaatggcattttctctgtcctcctgatctttccctccatgaatagacactgcttcgactcctttaaggagaaggtattcatgaatgtcatccacatcagctttgttttcacagaatattagaacaggtggtggggttttctgtaagcattcaagaagatatacaatcttagcctcttgcttgacatactcaacctcctgaatcacgtcgaggttagcagctccagctcttcccacattaaccgtaacaggctttaccaaagcacttctggcaaagttctgaattttggcgggcatggtagcagaaaacaagagagtttgccgttgatctttaaagtggtcaaacacttctctaatgtcatcttcaaaacccaaatctaccagtctatcggcttcatcaagggtgagatacctgcaagaaatgaagaatctcagtctgtaaacatataaaaaaaatgaagaaatgacaaattgtctaggggcacccactaatccaatagaaaataataccatccaagggatctaagcagggtggctctgttgcctctaagttaatctattgtctagacaaaagaaaagggtaattgttcttgaatcaagaagaccacatctgactcaatcaaaatacatttaaaaatactctcatctcttccagtaaaaaaataaatacttttatatcatactaatacagaatacttgtctcatcctgacaaaaaatagagtaagtgaaagacaacagttccagacagataaagaatatagatgatctaagctatgattatgttttttatcatttggctatcaatatgtctactcgatgttatttgtccaaaaaaaaaatcacaagataaatcattttaattagggtcctattttcatgcttcaaatttataccacatatcagattttggtattaaaaatgtagttggtggtaagagcttaaatacgtgaacctatcaaatactaatatagtgaagaaaagacagtctaagctataaatatttttctgtaactctgaaattgatatataaatcttacctgcaactgtcgagactcatttttttctttgccaacatatccttcaaccttccaggagtagcaactacaatatgaacgccccttttgacaacatccaactgtgatcgcatatccactccaccaatacagagcaatggcctcagttctggatatccagcttctctcataggagctaaaaattcttccaccacttcataagtctgcctggccagctctctagatgggcaaataatcagaccatatggcccttctcctggagcaatcggcatcataatctcctcttgtaatgcaaccatgatcaggggaagcacaaaaaccaatgtcttccctgaaccagtgaaagcaatccctatcatatcccttccagataaaatcacaggaagaccctgcacctgaatgggggtcggttgcacgatccccttggcttttaacctcttcaaaattggttcaggaaatctcatatccttgaaatttttaataggtgggggtacattgtcaccatccactatgatgtgccactgctttcgaattgcatcacactgcttcatcgacatccttctgatcggcaatggcggtttccaacctgttggcaaaggatctgtataggttatcccctttgccaattcacgaacagacattagagttttccgatctgataagtgctcaatcatttctttctcctgctgcacaatctgttctgttggagtaatctcaggagcatctcgcttcaactgggatgctttcacaagaagacttggcttggcttcagcttctttggatttttccaactcatcttcaacagttgaagacgcacccttgcgctgaaggattttctgagcttccattgctctcctctttgccacaggcacatattcaacataatcatcctcttcctccatacttctgaacaaaaccataattagtattcacactacaaatatcccaaaaaccagaaacttcgaacagaagtgtgaattagtcaaaaaaaaaaagaaaaatacatactgagtgaacagttgcatccgcacacagaaagatgcaaccattggcatactaaaagaaatcaatacatactgaaaagttgcatcccacagactttacaacaatttcatgtaaatgtcaataaaagaaactcttgtcaagtggtcagaataacaaaaggtatgaaatcaaatccccctttcatagttagtttaattatttaaagtataattacatcattaaagaatcaaaccagtatattatagcatatttcaaaccactaactaatgctctgaagtctgaactatttcagtgatagtctcatctcaactctaggttgatttaattactttaacactgatcagagaatatataaccataaaaaatgaaaagggtaaaaaaaatctctttagaaatagatgaaaggaatgaaaaaaacgaccaagcaattgaattattcaaaagaaaaaatctaaaatatatgtctaatttcttcacaagtttgagaaatcaaatactcattaatagaataatgaggacagatactatctacaagagacaagagtaattgcaatataactcaatattgaatttggtagccatgacagagcaaatcatagaggattagaggtataccaaagggcttaatgaatgattacaggaaaacccagttgagaatggaagtcaaatattgaatttgaagctcaaattaaaataacccaaatctaacaacaggtaaagaaaaaaaaacttaatataaaaaattctatgaagtcacgtaactgaccaaaaacaaacctagtaaaatatgcggagagagagagatagagagagaagaagaagaagaagaagaaatactaaccttgaatttgaaatgatgaaatatggagcgaagagatggattgggtaggaaggtaagtgttggaagcggcgatggatgagccgtcgtgaggggagactgaagagagtgtttccagtgagagggatggattcgaagatagggaaaaaccacggctcagttagggattcattcaggtttggatccgacccggaaaaaattcactttaattcttttccttttcctttttctttttctttttctttcttttcttcttcttcttcgtcttcttcttcttctcactgcaccctaaccctaattctaa

SEQ ID NO: 42873 - DNA, 2057 bp, Cannabis sativa
cactagtgattagagctagtgttccgaagctcaacttggatgatacttttgagcagaaaaatgaaattgctaaagctgtggaggaagaactcgagaaggtaatttcctgagatattaaaataatttagtcgaactttactcttggtgtgcctttttattgtattcatgcttcaattctcttccaggctatgtctgcttatggctatgaaattgtgcaaacacttattgtggacatagagccagatgagcatgtgaagcgagcaatgaacgaaataaatgctggtacagttcataaactgatgatacagtttatatgcaaagctttgttcatgctctttttaacagatgctaattatcaaaccatctaattgaacaccatgaatgaattaacatgcttctatttaaatcttcagctgcaagaatgagggtggctgctaatgagaaggcagaggcagagaaaattttgcaaattaagagggcagagggtgaggctgagtctaagtatctttctgggctgggtattgctcgccagcgtcaagcaattgttgatggattgagagacagtgtgctgggcttttctgttaatgttcccgggaccactgcaaaggacgtcatggacatggtccttgtcactcagtattttgacaccatgaaggaaattggtgctgcttcgaaatcatctgctgtgttcattcctcatgggccaggcgctgtccgcgatatagccacccaaattcgtgatggacttctccagggttctcatgctcagcagcagtagtttggtacatctaaagcttctttccatgcatgtccaattgttgatgtcttatatacaagggtgttcctttcttaatccccaacccctctttagttttctatgatgtgtctagtgtttttgtttcatgctactgaaatttgttcatattcccattatggattttataggtataaatattaaaggtgtgttcatttcatctaatttgcattattttgtttatagtgcactcaatttgcaccaagttctgattttatactttagattcaactcaatccgcacaagagttctaatctaattgacgttactttttgatattaaattatttaatatttattaaaatatatattatgtttacataaataataaaataaaatctttttttaaaaaataataaaataagttattattgctcatgtttctaataataaattaaaatttaaaaatacaatttcaaggagaaagaaaaaaaattgtatgtcgaacaaaaaaattagtttattgtaagttacattttctttatatttgttatattaaaatttgatatacctattaattttttaaattattattgtgtttattttttgatattgagggaaaagagattctaatttagactctgtacacttttttttttctttaaaatattaattatatgaactttgtcaaatccttgtgatataagatagaaagaagaagaaataagtaaaataaatatatgaaccttggttgagactgagagattgatattaacgaagataacagaatatctcaggcaagcctaatgttattgcaccatggaaacgaaaggagctattacatttacctgactgtatcctgtttatatcaagaccactgcttattctgaatattcaacaaatttacaatacaacaaacaaggtttaatggcagtaatactaaatatattaaccgtagctgaataaaattaaaagaaaaccacaccacatttttgtggttttaagattttttagtgcgctccggatttaaagaactacacaaaaaagtgcatgtgatttgaagaaatatctaaaaactacatagcttgcaaacaccctcacctcagttattactttagaaaagataaaaatgaattgaaaaagaaagaaaaatttctataaaattacttaactaagttaatctaaaagtgtttataaaatagccaattcaaatcgcacgattcgatccaatccaatccgcaaaatgcggatatctgcacttgtgcggattggatgttaattgacatgtaaaagtaatcgattca

SEQ ID NO: 42874 - DNA, 6110 bp, Cannabis sativa
agtatagtttagtagtaattaatcaaattccctgtggttcgacctcacttgtgtgagctattacttgactgcgtatacttgcgtagtgttcataaatttcgcaacagcatattcttgaaggatttgtaaatagaatatggaaagataagatagataaagtgaaatagttgccgtatggagtctttatcattcgatttagctctcttgaacacagagatcagatattgaatggagggtacattttctttaatagacgaccggttataatgaagccttgggatcctaatgtaaattttaaaaaagaagatgtgaagtgtgtgccaatttgggttcaattggaggagcttgaattgaaatactggggccagaggactctgtttaagattgtgggtgagatagggaagccggttatgttagactctgtgactagggaaagagaaaggttgaactaccctagggtcttggttgaggtgttgatggatcaggattttccagacatgttggaattcgataatgaatttggttcaaataccacagtgggggtgaaatatgaatggaaaccagtagcatgttcccattgctcttgtttagggcatactgctgctaactgtaggaaacattcaaatcggaaaccacaatgggttgtgaaacaggacaataggaagcaggttccgactgatgaggaggggtttgtgaaggtgacaaggaataaaataccagcagggaaagagcaaactgaggcacattctggtgctaaaaatatgactgctataaggaattcttttcagacacttgaagaaaccactgaagtagttgagaacttgtcaaaaatagaggtcaagataataagaggggagaaccctctctttcaaatggataagttgttatgttggaatgttcgaggagccaacaatcaacataaacaacatcaaataaagcaatttattcatgttcaaaatgttgactttgttggtcttctcgagactagagtaaaggctccaaaacttgggaccttgtactcgaatgtttttatgggttggagtttctcttctaacatagcatggcatgcagggggaaattgtaatttcttggaatcctttgagatttactgttgatattattaaatgtactagtcaattaatgcatttaaaaatgtcaacagtggatggctttaacagtttcttaactgtggtttatgcttctaataatcggattgacaggaagcttttctggaaggacttgtgtgagctagctactgtagacaattggttactcataggtgattttaatgatatacttgctaaggaggagaggattggtcaaagagttaaatcttatcctgattctgatttcctgcagtgtgtcaacacttgtaatttggaggatgtcaagtttagtggtaacttttatacatggactaataaacagcctggagaggatataatctattctaagattgataggattttagccaatcaatcctggattaatagatttgagtatgctgaagttgtgtttcttaatgaaggccttttttaccactctcctggtatcttaacacttcatcctggttttggtgagtggcaaaaagcctttcaaatactttcgaatgtggaagtcacatcctaagtttgaagcttccttaaaggaggtttggagtatgtcaataagagggtcaaagatgtttcaagtggtaaccaagatgaagcactttaaagccaaacttaaggagattaataaggagaggttctcagacttacaaagtgttgttagtaaggctaaagtagacttggacaattggcagaatcaactgcagcaacaaccattgaacagtgagttacacaggaaggagaaggaggctagaaaagtgttgatcaaagttcaaaaagactattcttctttcctacaacaaaaggccaaaattgcttggattgaaaatggagattgcaatttagctttgttccatgcttgcattaagcatagagtaaggcagaatcacattttatcaattgaaactcaagatgggaatcgagttcatgaccctgcactcaatactgatgcattcttggccttctacaaggacatgcttggttccaaaatggtgaatcgaaggaaagtgcataacagaatacttaccagaggacctatgttattgcagaacaatctaaaatgctggtataagagttttctagagaggaggcgaagaagacagcctttagcattcctggaaataaatctccaggtcatgacgaattctctagtagcttttttcaagacaattgggagactattggggatgacatatgtcaagctatgatttcctttttggattcaggtaaaatacttagagaaattaattcaacaattattaccttggttccaaaaaataaatgccctaatactgtcaaagattttagaccaattgcttgttgcaatgttatctataagattacaactaagcttttgagttctagaattagaaacattcttcctgaaataatttctcattctcaaggaggatttattaaggggagatttatagggcataacatcatgatatgtcagggcttggtaagacactataacaggaaagctaacaaactgagttgtatgatcaagtttgatcttcaaaaagcatatgacaccattgaatgggagttcttggaagaaatgcgagaaggtttaaacttcagcaggaaggtcattcaccttacaatgaattgtatcacctctcctaagttctctcttatgttcaatggatccttgcatggtttatttgaagctagtagaggccttaggtagggggaccccatgtaccctctattgtatgtcttgggtatggaatacctttctagactcatgaagaagattggtgagaaggaggactttcatttccatgataggtgctctcaacttaggttgaaatacctggcatttgcagatgatgttctattattctgtcatggagatataaagagtgtcacttatatgctacaggccctaaaattgttttctctcacttctagatttcatcctaatgtaagtaaaactgcaatttattgcagtaacatgcatgaagaaaatgtgaagaagctgatagaagtatctggtttctcgaggcaggatatgcatttcacttacctggggattcctatttgcccaaagaaaatatatggcaaagagtgtgagttactggctgaaagaatgactgttaggatcaagagttaaagctcaagaaacctttcctttgcaggtcgaattactttaatcaacttggtcttaatagctatccaggcatacaggagccaaatgatggtgtcgccaaaaaaaaaagtgatcaaagctatagaagctatctgtagagcctttttgtggaaaggacaagctatgttccatggtgctggagctgttgcatgggagaacatttgccagcctaaaagagcagggggtttgggaattaaaaagcttgaggagtggaataaggctgccatatgtaagtacatatgggccatttcaaacaagcaagagagtctttggctaatacgggtccatagtgtttatctcaaagatcaggattggtggagctactctgcttctatccatgctatttggtattggaagaagctagtagctatcaaagaccagcttaaataagtttatgacgtagcaggttttcaggaaggaagatacatcatagaagcggggtataacctgttttctcctactgctactagtctgaactggtgcaaagaagtatggagcagattgaacacccctaaacatagtgtgattttgtggttagcaatgttaaaccggttaaaaactaaagacaagttactgaagtatgggatgcaagtgaatgagaaatgttgtctatgtgaagctcaagctgaaacaagtcaacatttattttttgaatgtaatattgttgtttaaggactgtaggaaataaagacttagataaattagaatgttgtatcaatcagccttccccacttgttgctatggataggcagagccaagatttcgaaatttcgaaaaatggtctatgttgctgcaattgcagggctcgtttacaacatttggaggctgagaaataatgtgatttggcaggatgtttctttaacttctagccgaattgttgaagacactaagtgaattgttaagatgagagttgcaatgtttttaccaaaaaagattaatgttgtagataaagattggttcaatgctctatcatgtgaaattgtataaaaagatttgttgatgtctagattgtttaggcttcgaatggggtgctaataggttgtaaatactgttttgtgcaatataatatcctgatttatcaaaaaaaaaaaaaaaatcatggtgtctagtattcatatgaatgtaatattactattaatttattatcatatcctatttatttttaatttaataaaaattataaaaaaacttaaaatcaattataagacataaaatcatagaggtactaggtagtgacaataataaccgcaaacaaagaaatgctaatatatatgatcaatttaccatatttacgaattgtgatcatctcctccgaaaacataaaaaggaaaatctcatcctattagttcatacgtctaaaatatatgtaactaaatttactattacaccaattataaaactacgtcaattcatacgtccaaattatctcttattacatcgattagctggctaatagttttaattgaaattactttatttagaataactgtattttgatttttaaaaaaaaaatgaaagaaaatatagctacaatatatatatatatatatattttttgacatgaaatatagctacaatataatatagaatgaataaggcaaaatgcttagggcaaaatcgtgaaaacaaaatacgtctttggaggaagtcggaaagggaaggtgaagatgagctgtaaagtttcaatattaattaatatatcagtgaaaaaaaaaagagtaaaattcacatagattaaaaaaaaattgaaaataaatagtattattataatttaaggttatggatggagtggggagagaggcggtgcatgcgactactcgaccacgttatattgttatctttgtgtctctttgtcatccatgttgtggataagatatagcataaaaaaaagaagaagattagatcctatttattattaccatcaattattattcttattatttctttcacgttacgccctttcttattcttaccaaacctttcctctttatgttttatcattactttctagaatgtaacttttttgctttcttacaacaacaacaacaaaaaaaaaattatatccatttgattgtataggtaattaagtaattgtgtcggttcatctttatggctttcagcgcttcaacatatttacgagagcaccatcaatttagggtagttatttcatacattatttttttgattttttttttttaaatttatagtttgaattttaaagtaattttcccagtaatttctatgtaagttgctatacgatttttttgttgcgatttaagttgctccgctagtaacaataaaaaattttatgtataatttcgtaaaaaaaaaaaaaaaaaaaacctatttaaagtgtaaaaaaaaaaacccttatgtactccttaatattaaaaaaataatttaaattaatttttaaaaaattcacattattttatctaactatattttttaaaaaaatcatctataatttttttaatataattttttattttaatttttttaaattaaatattttaaatatattttattttattttgtaggtattttttttaaaaaaatgtgagatggaagagaaaaattaaaaaatatatataaattaaagatatatctttcatataaaataaaaattattaaataagatgtattgataattctattaggtacaaataaacttcctggtagataaaatggaatgcaatgaaaataatttaaaataaaatgtaaaatatgttattgtagtttgtttggagaaaaaaattagggtgttcatccgattcaatccgcacttttttggtcaaacaacatccaatccgcactaagtgcggatttcatattttggatccaat

SEQ ID NO: 42875 - DNA, 4066 bp, Cannabis sativa
aattattacatcatcaatatatcaactggtaatttcgtttacaagtcagttaaaaataaatatacgattttgtgttagtttaaacaacttagtcttgaaataaaatcgagcaatagatatgattatcaatttatcacgcaactacgagatgatttgtatgaaaataacatggtatggtaaatagttaccaaaattaggcacaataataaaatatttcaaaataattaagtacctacataattgcggatacggcaagtaagtagtaactaatcagtaatcgtgtggcttggtggtatgtaaaattagtaagaaaatattgatgtggtctgaatatgagaagtaaacacaaaatctaatttctcacacttctaaatttaataattttatttttgaaaggtctattgagatgtatattattttacaaaagttgaataaattgttgaaaaagaaaaatgtaaaaacgaacatatagtgcttaacactttctaaatgtcgtgaaaacgaataaaataaaaaaaaaaatacaatttttattttgttcttttatttatttttattttaaattattgaaatgtcatttttattataattatgtttttactctttctaaccaaacactatttaatagagtgtgtttgttatgtgagtttgagttagaaaaagtagggttagagaaaatagtcttaaatgaaatatgtaattcaagtgttggagagaattaagattatactattttaatttaaaaattaaaatacacttagaagtacaaacctttaatcattaaaatttaatttaatttgacattttcattcctatcaaactaaatctcatatcaaacgagttattatatcaggttctacataacttgatagaatatcactaataaaaagtggtattaggtgcctctaaaaataactttttggggggcatttgctgcccaacccaaccatcttcgctgccttgtggccgcgcttcatttttggccgtgtcttcatttttacagaaggaaaggagtaataatatgtgtcaaaatatattaaaagtgatggataaattttttcaacccaagttttaaatacctctgtaaaacactcttacacatgtcaaaaaagacttgactagagcagagtttggccgagaatgataacaaatttaaaggaattagaatttgtttctgtttctaggcatgtgagttggaattccctttagcgttttacaaagctttatattgtttaaaattattttagagggatatgtgattattcactgtgatttcattttcagttttatgttctcagaagggtgtcaatcttgagtttatgggtaaaaaagtggagctgggttgagcttatcttcttcaaggatgggaattagaagaaaaatttagatacttttcttatttttaatattcctagcaatagtattagtatagccatgaaactaagtttctcatacaattttgtggccccaaaattctcggtgttgatgaaacccagtcttattcgtaattttcacaaaactgtttgctgtttttctctaaaatcatcaccacccaccacgccaaaaccccaaactccactctttctaaggccacctatacactctgctaccttgtctgacctgcaaaaatggcaccaatgggccaaaagtcttgcttcctctgtgggaactgcatttgtggatttagataatggtccggactccagccttttgtgcagagagctcaagtggcttatggaagatgccactgaagaaaggttaatagcttcccaaattcatagtgaaaactttcagacaagtgttgggttaagggtgagcctggaagacctttacagactatggaagcagaggattgaagaaaggaggcctttccagtacattgttggatgtgagcattggagagacttggtgttgtgcgttgaagatggagttttgattccgaggcctgagactgaaaagattgttgatttggtgggtgatgtagtttcaggtaatgaaggattgagagagggattgtgggttgatttggggactggaagtggtgccattgctgttggaattgggaatattttgaagggttggggaagagtcattgctacagacatgagccctttagcactagctgtggctgcttttaatgttcagaggtatgatttgcaggttagttttctgctagattgattatttttccatgagcattcaagtacagatttccattcagtgcctctcaggtttttcatcattttcagtgaaatatagattaaaacattgttatttgttagtgtgttggtatgtttatacatgctgctctttcccttttccatcaaactttaatcctttcttgtcatcttttgatgttgcaaacgtataatgagttagtttagaataaatactctaaacataagtattataggcttcaaattatgaacgcatttcattgttctttgatacttgtacatgatccacctaactttaacgtggcaatcaggatgttattgaattaagacaaggatcttggtttgaaccattgaaggatgtggaaggagagcttgcaggtattataagcaatccaccatacattccaagtagccatatttctgggctacaagctgaagttggtaggcatgaaccaagaactgcactggatggtggtattagtggcatggatgatctcttacatctctgcaatggggctgcctctatgttaaaacctggtggattttttgcttttgaggtatttaatctctattttataaaaataacacctttagttctgccaaagtcaaatgcctaacatacctatattagctgcagtgtagtaacttataaaatctagtgggaaagagaactgtgaatatattggcttttcaatctccgttcttagtaaacagtgctattttcttttgttaaaaatttatctaaacttcccatattttttcttttcatataattatagaataggtatgtcaatcatgttccatcttccttatatatagtacattcagttgtgaaactgaacaatgaacatgttcaacagtaaaagtaattaagcaatggttatgtagctgattattttatgtttttgttatataaatcaatattgtacatgaagatttcttggcagattgccttgttatgataattttcaattctgtagcctggtatttcattgttgagctctttatattcccttaacacagaaaaaggcaagcataaataaatgaatataggaagcataagcataaataaatgaatataggaagcatagctacatattaagtatttaccttgctttgtgtttgcagacaaatggtgaggagcaatgcaaataccttgttgagtacatggcaaatgaagctggagagagtttttgtagtgtaaagatagtcccagactttgctggaattcatagatttgtaactggatttcataaatgattaattttttctttgaatatcggacattatcaatcgccaaagaaagaatatgcgcatcatgggatgcttgatttcagtccatttttgcttaaatgattaacaagcgatttctatatcttagaagaatgaatccatgtgaacttgcaccggaaatagtcgaattttaaaaccaagtcagtttatcagagttggttaaaggaataagctaccaagatttgatgcaagttgagctcgttagtctcgttactagtaataattgtccattggagttgaaagagaagaaatgtaaagatcgccaagttgaaattcttcctgttatacaggtgcattaataagtatggaaacaaggattaaggatcattgcctttgaagagcttgtattggatagagaaaaaaaaagtgagaacggatttgccaacaattttccaaataccatttttgacattctagttagtgccagtataagtaggtacaaggtaggagacttatggattaacgtgagccttgtgtgaatcctctactataatataatacttaggctaattagcaattttcccccctccgaactttgacatgtattaaatcatgtctcctgaacttttttggccgttaaaaattccccccgaact

SEQ ID NO: 42876 - DNA, 1455 bp, Cannabis sativa
tatataggcacactttatatagaagagatatacatataatcatttcattttacttatacgtggtatctctcgaaatccatacccaaattaggccacgtgaataaacacacttacattcattcactgcgaaagtcaccaaatgaacagcctaaaatatcagcttttgtttttatccctttattaaagtatattttaaaagcttagcttcgatcttaatcaattttaattagacaactcaaagtaatcattctatagcacaagtccaatctgtccttttttttttttcttttttcataaagttgcattctgaaatttacttagctcatccactgccacactttcatagtaaattcttttctttttcttattgtggtggagtactagttttcatattgaaagatcatagccaactcattttagcaattaatttttaagtataggtttatattaaaagtctatattattattatttagtaataaaaaaaaatgtactacattgatttgattatagaaaatagaaagagcattgctactatatatgtagtctttattatagggggatatttcttattgtcatatcatatttaatttgtattttatacagattaacatgtataattgatcaactctaacctaatatgtatatatttcgtgaggagaaattaatcgcaaccctaactcaaaccatcgtattcgcccttggattgacatagcatattcatatatcaactaaactaatttcacactaattagtatcacatatacaatttttatatacatatttttaattctgataaattcgtttgatgcatttgaataatactttgttgacgtagtttttcattaactgatttaaaaatattataaaaagtataagtggattggacttatgctatagtcatcaaaataaaaccgtaaaaaaagtgacatcgagatttatagtagttcacttcccatattgtgatggtaataaaaccacgtctacttttagttttattaataggacctaagcacaccagagtatgttctcaaaagcgtgcttgagtaaaattataatggagatttcttagtgaaactatgtgtttgtgtctggatagatgctttttcaatacaatctcattacacaattcactctaggtgaggaaaagatcaatgttcttggaaacaatgataaaagatagagggaatgagatgaacaacaatggtgtatgtaaaacaatgtccatggaagaacaacacagagagaaagcaagaaacagagcaagagaaaaaatgaaatggcaaaagctaatcaaagtgattagctacttctttatttatattgagagaagttacagattaatacaaagctaataacaataacagaaaactacctaactaataactaacaaaacagaattaactgtacagcagagttagttattaacatctcccctcaaactaaacttggagata

SEQ ID NO: 42877 - DNA, 3790 bp, Cannabis sativa
ttgacacatcagctaattttttataaaaaaaaattaaatttctaattgagtcaacaaaagtagttaacatatttaatataaattagattaattaatgtgttatttaaactttaattggtttaacacaatatagaacactaataatttttaacaggtgatcttgattcatacctaatatgttgaagatgtgtccgattcctattttttgaagtggagatagcgatcgaccgcttaatttttgccacatgtcaagtaggtaacggtcgacgatgaagattgagatggcagttgttacaagagtaaaggctaggaatgttccagctgggattttaatggggcccacttccctgtccatcgctagggcttggatggttgataagccattgaacatagcaatggtagtggttaagagaatgccggttgaccataatggaatgagtttgattactcttttaaggtcttctacttcttcaactgtgcatagtttccatgattttgtgctaccactattaatttgttcctcgttttgggtaaccaagcaagccttattcaagagtctgcatgcatatataaagtatattatatatatatatatatttgtaataaaaacttgtgaaagtataaaattattttttgtccttgatgtaaatggaattaaataatattattgggtggatgcatatataataattgtaggaggaaaatacacaacattacaataatacgtgtagttaagtatgactaatgagtttactagtaattataaaagacctgtatgcaagctagctagtcactgtacagaatataatacgtattaatgttgaccaatttatatagttgtttgttattttttttctttctgaaataccaatttaattatatatatagttggtggtgggtgcatttatatagtatatatataccttatactacaacatgtaataaataagtatatacacaacattatatgacagaacaattattcaaataaaaaacaaacctttggtaaaaggataagttctatatttggtgtaatttatcaaaaaaaaaaatatatatatatacatatatattcatttaaataatattattgtggaagcatattataattatttaaatgtgtacatattttaattattaagtgattcaaattagttattatttttttaacaaagttcacattattagttattgattacagacaatcatgtacttaattttaaaaattattaaattccacgctagcttattttataaaatattgacatgcattattattgattagttttttttttatatagtatttctatattccaatctgcgcatattaatatattataaataatatttgcagcagggcgatataattagtttaatttgtacttaacaaccattgaatgcttataaattgtatattaattatttagcctttaatcaattcaacagtaaatttgaggaccttctttttcccttaatactactttgaaattttaagggagttaatcattactattatttatttctacaatatataatttagttggatattttatatataatatacctgaaacgtttacttggtgattttgtgtgaacaatgatacccgatgtatatgtatttgttaaagcacgatcacttagtgacaattttctattccgaatagctgcaacgacaactctacccatgctcacaaatgggcttcccttaggcttaacgaatcgatagaaattctttccaagcaaaaacgaaattagtccaagtgctgtcatggcaagacaaatcccaaaccctaattcccaactaatgttatccattaggtacaccaaaacaatgtagctgatagcatttcccacatacaacacaatgaaataccaactgaaaaagcttgcttggtggttgtttttctcaaattggtcagctcccatggttgctatcgtaaaacgagagccaccaattcccattgtaattaaccccatggctgtataaagaatcaaatattgaccatttgatgggctatcacatggaataatactcgaagagccattcaaacacggtatgggcattaacgaagggattccaactataagagttaataatgtcatcccctatattaaataaggtttcaataattattacacacatctatttcacatataataccaaaataatttaataaataatattcacacctaaagggacatcaatatatattaagtttgtgttaatattttgttatcctcacttaaataatctacaataggtaaaagttaatagtcaccacagctccataaattttagttcaacacatgatcaattaatataagaaatgttaattttactagcacagtacgctatacgttggtaaaagtaacttttatcagtccatttcgcaaactgcgttagttttaccaacacatatttgcagtgactaaaatctaacttttattaccagcgcatttacgcgctgtaaaaaatcatttttgtcagcgttttcattttgtgttggcaaaagttttaataccaatgttaatttgctaatcttttttgccaacacatagcgtaataccaaatttttgcaaaacacaaaaatatgttgacgacaaagtcacatttcgagttgaatatatttactttaatataaaacatatatacgcattattaaatgcactttcaggacattgcttctatattactgacttgtttggctttcatgctaaccatgttgtaattaaaaaattaaatcctttgtaaaattatatatccttatcatatgactgtgttttctttgcaaacaaaaagatttaattacgttttctttcattttataatatataagaccaaaaagagtttatgaaagtgaaaggactgttactgcatatatgttttgacatgcaataactaaactaaactttgtccattaaaattgttaataacttaccagcaaagcgatcatagaagagatggctatgacgatgaagtttccggcaaaggagtcggcaattatggcgccaacgatcggaaaaagacagatgaaagcaaagccgacattgttgatcttagttgcagatatactcccaatgttgaactttgttatcagaaatacaatccagttagcaccccacccaccagctgctactgaaagaccccctaaatttcctatatatatttccaaaaacataaaataaattaagtataaatatttgtatatatgatgatgaaattataaaagagaatacatacccatgatgaagggaaaggtaatccagcctccatttttagaataattattattatcatcttgagctcctattccttgttctgctgggctcttaatgttttgttcagaggtttccattatttttctttttcttcttaaatattcttacactatgaaaattgcctcttatattgtgtatatatatagaagtatatgtatatataaactaattatttgttattatttcggtgattagtttaaaaaaagtcatgggtggggtgtggttgagtcaaagctatagacatatatacaaggatgacttggacagatcaacaaacgtaatttgcatctaaaatgtattatataaaaaaatattttggtaactacatcatgagctgtacaagacagttgacaatgaagatgaaattaaactagcaatttttatttgtttgtttatatcaatttgtttggctacttgccaccttatctccttgttttaatttttttttttgttaagtaaaaattttatttttttttttgaagaaattaatcaactttattaattgcaatca

SEQ ID NO: 42878 - DNA, 2214 bp, Cannabis sativa
tgtctactgaatttggcacataacattgcaaaattgctataataagacgaatcacaaatttgtaatatgctcttacaaactaaacaagagaaagcttttaaaaaaaaaaaaaactaaagatgagaaagaaacaacagaaaaaatacactaattgcattataattaagtcggtcattatcaaatttataacaaaaataattaaaacaaaacaaactaaagtaagggaaaaaagctcactaaggttaagcttcaaaaatattagtggactacctaaacccactttaaacatgttcttgcttatcatggcaaaacgtataacgaacaaaaagaaaaacagcaaggattgcatagtactgtttcttttgctattaaaggattaaaacgttacaattagattaaaaaagaaaaaatcagagatcacatactcaagactatatgttttttgttcaaaagaataggctaaggggaagttgaaacgcatgcaggcgggttttgaataccggaaacggtgggctggacattcttacactcagagctgattgggccttcggcaccactgtacttcaaatcaatgtcttgcatctccacattctggcatggcagcccactactacaaactagtttcaccgccatagctgtggacgaagaccctctaatattcttgaaactcactccactgatctgaacacgcgagggtaattttgaatcacattgattccatgggcaatactcttgatcaattagcaccggattcccaaccccatccattattatgtcctcgaaatgcaaatcagtggcctttccctcgtgagaatgaggccacgtcttgatcctcacgccgttttgggtgttcttaagcacgcagttcttcacggtcactccactgaccggctcctcgttcggatattttccaaggcttccaatgctgatgccgtggccgggtccgcaggtgaccttggagattgttatttggttgcttccttcgcccaccgagacacagtcgtcgcccgtctcaatatgtgagtccaacactttaacgtcactcgaacgacctatgtggattccatccgtgttgggactgtcttcagcggcaatgattttcacgtgttgaaacgttagattttggcatcctaatacgttcacgtggaattgcttactgtctagggatgttacttcttggactaaggagtttgttacgaagttgaatcttacattctgtttcaaaataaaaatttgttaagccattgattaacatgtaaaaaactaacacattaattattattagagatgattaattaattatgaacttacaatagggaggtccttacagtactcatcctcatcacattttttgccccaagtgttttttccctggccatcgaaaatgccaccgccggaaacagtgaggtagtcgatgtactcgaaagcgatccaagtgtcacctcctttaaagtttttgtcaaccggtggtgcctgcaatatcccttgaagattaaactcaatgggagctttacagggtccttgtagagacgcgttacttaatttgaatatccccttaggcaccaccactttacttggactactagaagaacatgcatctctccaacctttcagcaaagactataaataacagagataatatatactatcatacgtacaaaaactacgagttaataatacttaacataatgattaacagctctattacctgagttatatcatcgttaggcaatatcgttccattgtttgtcacatcaaataggctgtaatattgttgagagtttgcaatattagatgacaccaccaagaggaatgtagccattataccaattatgttgatgatgatcggcttcttgatacccatattgtttttttttatgcttgctccttacctttacgaaacttcctctctttatatatacaataggtatctttcctaatttttacaatgcatctatatatttgattccaacggtcacattaattacttgctttaattaactattatatatattaatgtaagaaatccatttacagtggcttaaacgagacgagaccttttaataggagaaatgataaaagttttataaaataatataaaatagattagaagaaagaggaagaagaagatttctgagttgtttatttcaatggtgtcatctcctatttacacaaatacaagaatcaaatattaagaaactaagaaaaagagaa

SEQ ID NO: 42879 - DNA, 2619 bp, Cannabis sativa
tgcctttataattatttggtaaattgaatatttggtatattgacgatacatttcaggtatatttgggcaatgtaacatggaagtacttcataaaagctttcaattaaaactcactgtttttctgacatttgttaaaattcttttacctgtctggtgttcattgaagctcaactacctgacctcttatcttaaaggttgcaggtttgacaaacaactcctatactccggaatcacattttgtccgccattgcgtgcaaaagtataatgttctcggtcatcatgtgcttcaagtagcaaaggtgatataaattaatgtattctgcactgaacttttgttgtgaattatctaccatcaagtacctgttaataaaaagtaattaattgttaagtaatgaaattttttcggttatatgttctcttttctcatcttcaaatttgctaaaatctgcagagaagattagatgatatgttatatgttggtcttactgaagaacacagagaatctgcaaccatgtttgcaaatgtagtcggttcgcaagtgatttcccagctcagagcatcaagcccaaaatcaaaaataactgctggcaagaaatcaggttggtatagtgaccactttaatcacagaactcgagtttgtttttattcgaactttgattgaatgagtttatacctctacagaaaggagctctttgacttcggattccaagcccgataatgataatattgatcaggtaatcgataaacttttctcattgtaaatgaaaattcggtaatatctctacaattccctcactgcttttttgcctgtatgacagaacagcacttcaaatcaaaatagaagtgaaattggttcgcctgaaaatgatgaagctgtaaatgaaaatgtaagccactttatatgattctaagctcttttcacttagacataataatccaatgtgatctggtccttcacatttcaaaattatagctttgaccctatctaactccactctagatgactgtgggagaactcatggattcttatgaggtgtgcatatctagtttacgcaaatcccaaacacaacgacgcacttcttctttgaagagaatctcaccagcaaacttcaccaaagaggtattttaaatgctactctaaatgttagacgatattcagttgttggtttgatatatggtattataagaatggcattgctggtagcaatgctgagttctgtgttatagattttcggtttgcatgtggtttacttgtgcatgttcagtttagcccatattatttgcttatacttagacatttactataatatatatagggataagttcaatgagcaaaattgtacactaaacttacaccgaaatcgcacctttagatgaagaaagattcaacggtcatgattggagcaccatagtaataattaaacagtcaagtgtttcccatgcatactcttgccttattttctaaacttcaaaaaattctacaggcgcgccaacacatctctgatgaggtccttcgacagataagatcacttaaccaccttgatatggaactctacaaatatgcccaaggccttttcgcaaagcagcacaaacgcacaatgcagagttttgttggaatagtaagtctccacctcaatttcttttgacttgttttttatggtgcttataattttcttaagcgaaatgtgttgttatattcatagtggtctctgaagacactactggcatattataaatcagaacttttatgaggtagcgccttgcaaatgactaatgatattctataatggttgttaattctactaatagtgatatgacacttcgggtagtgctagcaatattctattgtaaacactcaatcatgttgctgcactcaaaatcatttctttttcggtctaataagaggacactggtagttttaagcttcttcctattttgtgtacatcttgataattgcttcaaagaagcatcatatgcttaagttgtttcattgaaattctatttgtaatatctaaatttgcaggagggattagaaaccttgttcatcaattcatatgacatctcgggttggaagctcctttcgataggcacagttgttgtctcacttcttatcatctttatacttgtaaatgctcgacgaagaacgttgaaactcaagatatgattaatcgtgaattgtaattactatttaccttttttcaaaagaaaaattaggaaacagatgaaagaaaaagtaccccccacatttttgtatcccatgcacagtttatattgactatggatttttggtggtcaactctcatcttgtgtcttgtctctcttgctcttaaagttaaaaaagctcaatttcaatttagggacttataatttccacatgggtggaatttttggcagtttcttaggcatgtgacatagccctattcattggaaaaatgttgagaagtgagattttctagtgccacatttgatgttccaacacactagaatacattttgatcctagacaataaagttactcgacaaggacacccttcgcggaagagaaaaatgtggggcgccccacttgaattgtcggatttcttacatgagtttgtgttaggggtgttcattaaaccgtctg

SEQ ID NO: 42880 - DNA, 2895 bp, Cannabis sativa
aatgatatttaatgatgcatttacaataatgatacaattaaaatgtattttttgacgcaaaattgatgcttagcgacacaataaaatttgctaacaaatttttagtgagtgaacttttcaatcacatctcactaaacggtgaatatatatttttttttttttttaaatttgtgttttagattttttttttcttttcaactttttcagtatttagatttacatgtttggaaattgcagtgcatatatgtccatatttggagtgtgtttttaattatttaatagacaaacttcattatggttctacacattctaaataatcaaacttttgtgatccaattgctccaatttggatttatatgcaccattttaacgttgagatctcaataaaaatactaaaattagagaagaaaaaaaattagatcaaaataatatttaaatgaaaaattatgcgtcatcaatatttttatcaaattttatcgcaaagtatcgcaaacttaaaatatcacaaatgcatttgtaagcattgttttttgcatcaaaagttttcatcacaccattgtaataatgcatcattaaacatcattcatcaccttttactaaaaattaagattttatggaatcctcaaaaatgtatcgttaagcattgcaaatgaattgattttaatcaaaattctataatttttaaagtccaaattagaggaaaaaactacacaaactgcaaaatcaaccaaaaaaaaaaggtagcgtttgaaattcgtgaattttgtgattaagtaaatatttttaggttaattaatttcaaattggattagaatcattaaaacatgatttttcaggttaattaataaaataataataaatttaataggtgcttcaatatgagggaattttattgcttaaatagtgatgtgacataattatgtattgtgtggtgtagtggtaggattgcactgacgtcattccttgcttggttcaagggttcgaaacctaccatagcccctttcgaagggattaaaggcttgacctttttaaagactagcttgctgttggtggtgctatttatgtgatgggaatctttgaagtgattagtgatgatcgatctaattaaggtagattgaagtataaaactcctatagttgatgcatggttcccaggatgatcaaaataaacgaataattgaggaagggatctacaccacatagtctctattttagttagaaaaataaaaatggtgatatgacatttatggtatgtgttgtttagatgagaatcacaaacaaattgataaaaatgaagaatgaaagatggatttttggtctgaattattttcttttagtgaaagagaaagagaatataaagaagggaagaaaagagaggaaaatgatagaaattatatgagtggcaaaaatgacaaaaaaaaagttggaaggcctatattttaataatttgtatattacatattaaaaaaggaattgatgctgtagtatttgtaacacttatgtaactaatttttgtcaaaaatttctcacattagtgtttcgttactcagttataaactttcttgtttactgggtacctatttttcttgggacaaaataatgtgagtcaaaatagtaacatataataggaggttacgttattttaatacaattataaaaaatgattgcatatttttgaaaaataatgatcataaaattatgcaactttcttatttatattattattcttaaattaataaaaaatgttgaatgtgaataaataataattacaaaatagtttggagacttgatttatttacttatttataaagtgtataaatggttcaaaataagtagtttggaatattttggagaaaaattgattaaagatgaaaaaattgattgcttgtaaaactgttttttagcatatcaattctatgcgtttttaaacgatgggagcttttttaacagcttaaaatcatccaattaataccatgaatgcctactttatgattggtaacaactaagaactttatgatgatcattcatgttcatatatgtattgtttccaatattgattaccaacattcatatgacttgtatatgaatgtataaatagtggtagatcaccacatttgaaatcacacactcaaggtttgttagccagtcatattagggccttaaattacattcagaacgttgataatcaatattggaaacattctcagggaaatgttatgcgacgtttttcacaaaactggttacatgcaacatgtcacttggggtattttctgcacaaccaatttcaaaattacataaaacacaatgctcccataacgtacctccaggcgacatgtcgcccaaggtgacatgctgcctggagcaattccaacatgtttcaaaatgtgtttcataactcatcttccagccaattaacacatctacgtcattttattgaaataaatgagtaagatgaatgtttctaacagttagaaactcctccatttaaattcataatctcacgtatattttatacttaattatatgctattaaatgtgatatgcaaacaaatctaatattcaaatttgtaacttcttctatgttataataaaggtcagctcaagtattaggcaacatgagctattgcacaagatctcctatttttaaagaaaaagcatatttttttaaaattttttttattatacatacataaataaaaaaaattataattgaaagtttaaaaggtatctttttaaaaaaagaaattggtaatagaattgtggtctaatatacacacgattttttttttgtgaaaattacaccaaatatgggattctacaaaaaagtttgaaaaatatggcttttttaagtttaccacccttatatggcatttatttaaatttaaagttatatatg

SEQ ID NO: 42881 - DNA, 2385 bp, Cannabis sativa
acactctccaattctcatggccgcatcatgagaattgagtgtaattactaaaaattttacattttaaacattaactactaaaaaatattattttcccgtataattactaacaattttgccaaataagatgttaggaattcatatgtaattaccatctcatatccaaacacaccttgtattttaaaataaagtgtaattactagactaagtaattatcattctagtaattatactacctaataattacacagttacttccaaacacattcttggagaagaaaaaccatttggtaatacaatgatcaaacctcgacacattatgacattagaacatatgaagcctaattctttgagactgtaaacactacgaaattgttgcttctaacatttgcatactgatagaaataaatacctcagcctcctctttggtcattccttctttccacgcttcgtcaaagaatccatacaaataactagagccagatcctggaacaacataattttcaaacaagtcatctttggtgacgcaataaaacagtagagctggcttggagatgatatccaaaatttatgcaaaaaggattctagtttaacttactcttaacagaagtatggtaacaaccatcacaaagaagagttttacaaggtcctaaatatcagacaacgtgatgctaaatcctgctatttatgaaataaaaaatgaaatgatccaaaataattgagggacattcagtctcaaccaattaagaatgaaagccaatgcaatgcaaatataccagtagagtcaaatgagaggttcaaatgatttgtaacaatgaaaaaaatacaaaatattgtaaagcttgataacaaaaaattgagagggaaattagacaagaagaatagcataccaccaatagagaatggctgctctactatggttccaccaagaggaactccatagatcttaccaccttcgtacttgtcccatccaccaacaatcataccagtttgtaacatatcctgcaatattgaaaaagaatgataagctatatacatacaacataaacatgaaaagctatgttttaaacaataaaaatttaaccattgaatataataactacatccacattgttttaagagcagagtgtacaaaaatcatgaaggggcaatttcaatttttcttttttttagcagaagaaggttattctgacaagggaataggctaaatttcccaaccttgttattataagacaaaagcctgatgagattagcagcaactttgacagttgcaggttgccctagctgtatcctgttcacaaacattacataataattataacaacaataaaggcatcaacatataaaattatgtaaccatttatctaaaaacaaacaaagtatataattaactcacgtgtgctgatgaagaaagtaacgcacataatctgaaacaatctgagaatcagcagcctgcataatgcacatagcctcagaatcagaggtatataagcccataaatattattatctctctctacaagactacaacagtctcttcaggactaatatgcattatatcagataagaaaagctcataaaaagaacaaagaaaaagttcgacatttgatgattatttaactcttataaactaatttgagtctttattggaataattcaagctaaaaaggatttcaaaggtataattacttccatgaacacattaatgtaaaagagaaagtataaattaataccgatccggagcgacaaacgtagacattatcagtaagctgagtaatcttgtccgatgcacggttagcaacataaactcctgcacagaaaaaaaaatgaaaaaatatttaaaaaaagaaaccaaaacaataagatgaatcaacaaaatcttatgatggtttgcagtgtgttttgattcgaataaaataaacaagttataaaaagtgcagaaggaaagatcaggacaaagagttgagtacctgtgctcgttcgtgaatcggctccgagaacaacgccgccgttgtaagtaacaccaatgatggtggtgcccatggagtgtggagcatcgagattcaccttcaattccattttcgattatactcagtgatttgagagatgaattgaatacaaaggaaagaagaaaaataacgagccgattgagaaggaaggaaggtcctgatttttttttttttttttgatggttaggaaggtcctgacttgagcgacaagttctttactctgttttttcttacgagttacgactttgggcctaacttttacgctgtatggatctaagctacacttaaagcccatagtttactcttggctggccatgccctttttcttttagttctattttgggattattttagaaatacacaaaaaaaaaaaaaaa

SEQ ID NO: 42882 - DNA, 5610 bp, Cannabis sativa
taacgaccttaaaagtttaggggcatgatttggtacatgttaaagtagggaaaaaaaaaatactaattagcttaataaaaatacatttaattttacaaagcatattactatattgaagagtattaaataatgggaaatcacatattacacttcatactttatacgtactcgctgaaaatacattgaagagtaattaacgaatgacagttgaccttgccaacaaaaagataaaataatgaatggcacttgactcacgtataaaaatatttattatatatatatgcccgagaaccattggtatagtgattataatccttcagatgttgagcctttgtttgattcatctatgggctgagagttgtactgttgctccaacacattaggcactagtgacatctgcgccgttaattcctgtgataaagcatcattaataaaagaaaagtaaacgctttgacccgtgaaatgtaaggttcaatggctttttatacatgttctatattgtgatttgcgtttagacacagtaaaggtttttaattcaacatgatttttaggcgtaagaactcaaagtaagtatataataaagctatgaaaatatattcaatatatttttgaatgagaaaaggtagagagctagctatgaaaactccacccgcccccacatatgcaagtgacacaaaattaaagaaaatctatcaaatgttttattctcctagtataacactaaaatttatatattacgaccacttataccaaatgtattgcatattgaaaagtaaggctagctctaagaaataagaataattaagaagaaaggtaagggtgaatgtgtagttacaaatcagttgggccgtcgaaattctgggctttcctaaggttccaatggaggccttcatgtatgctgttgaagaagtcggtagttgagttttctagacaagctgtgggaacaggccatggggccatactaatctcaagtgcatccccaagctttaactctatcctccccttcccatcgaatgatgcccacgcatggcttctgctctttcttggcacttccacacgtatttttacatgctctggcattatcagtggtcgaaacgacagtgaatgaggacaaattggggtaaacagtattccaggaacctgaaaattataacatataaacattctttcaaaagaactatatatataacatatgaacatataaactagctaaatcttatctttataggtgtccagtaccatataagctgtcattttttagatagttagccgaactattagtcgatttgtaactaaatagtaaataaaaatcatcatctttatgaactacaaaagttactgttgtgatattatataatcagaataaattttttcattgcactaaattattttaattacattaactattattacattttagttcttaagtttcaatattcgatccaagtccatgcaatccactcgagatataaagagcaatcacacaagaaactaaagtcttctaaaagtgaattctttattgctctattagttgtttatccaaagctaattcagttgtattaagagctacgaacacttgattacgcttacaagtaattaactaacattataggtaataacagctcctaaactaggctaattgaggtcactgtattattggtcagtaattaacaaattgtcaccttgagcaatactacagatagactacaaaggattagctatttttatctttggttatcacatcagtgatcttttaagagactcacacaatgtctgaatttagagaattgctaacagaaccaatactattggtgtcgagtacctttttcggtgtaatattattattgttataattaagtatgaggtcctatataacttaagaaaataaattttagaaaatattgttaactaatcatagagtaatacctataagtgttgggcataagtacccaatagcaatactgttgaatttaagttgtttgactaaaaaggtactaaattataaccttcttttttttcatttcctttttatggtagctgcttttagctgacatgaaagaaaaaaaataaagtgttcacattttaacattctctttacgattttaagctagcaggtgaggtacgatgattctccgcggtcaattgtaacctcgttaaaaacaagtgtgtaatctcaaaaaaattgacatttatttttaattaagtacctggggatgaaccattgatcctccagcagccaatgaatatgcagtactcccagatgttgtggatagaatcaagccatcaccttggacagatgtgagaaaggaaccgtcacagaagcaatttagaaaggtgagatacgctgattcaccgcggtcaattgtaacctcgttaagaacaagtgtgtaatcttcagtttcatcatcactacttttagcaggatatttgataacacggcataataaacgatgtcgcagtgttatattaattggcccctttaaaattgaatcaagggtttctttgtacctttcactttctgaagattatcttaaagaggaactttattgagtagacaaaaaaagagcaataagcatgtgattaatttgtgatgagacaaaaacagataagctaactgttacttggcttggtggaaaaacaacacaaactcagtcaaaggataccgaaacgggtcatgaagcccagagaccctaatgaaaatggaacaacaggagggactggtcctttgaacttggatgccgcctgtaagtaaattgtaaaaggtcaattattactcaaattagatgctaagggacatcatcaatacagtaaatgaaatgatattattaaccaagcaaaatctcaatttcaaaggttgagaactctattttgaagaaaaagtttatgcaattaagacatagcactcagtagattactccaagatttgaaagagaaaaaaaaaacgcttttaaaagacaaattataagctggactctgatcttagataggctgatactctaatgtgtagaaagataatataatacataataggaatagactactcctcttattgtcaactgattttgaaatggaatcctgttaatcttattccaaattctaacattgatgagttctcaaatattatcaaatcttctttttactgatgagttctcaaagaagcatttgggtagagttgctttattaaattatgggttgataaatatatagttatttgtcattttagtctatataattagtggtataaagttaatgagtaataattgtgtgtaatccagttgaaacataagtatataattttctaataaactgaaaattttgataaaaaagtccatcccatctaaggttttcttactagaactcttttcttactcctagctctataaatatacaatgtgtcagcataagtgtatgcttttcttggtctatcaatctccatgattttttaaaattagggaacaagtcttcattaccaatttctgctatttctcaattatccttttatagattttctaaataaagtaggtaggaatgtttttgaaagatagtaatgacattaatttgtttaagatagaaagtcaaggggaaattgttccaaaagtattgaatcacatacccaaagaacagttccatcaccacctataaagtgacaacgaaatcaacttctttatgaagcagtgtaatttcagtatctgtcaagaaaatagccaaaaatatattaacatacaattaagctgcatacgaccgatcgaagtgaagtgaaagcatttgtatattatcatttattcctcaccatcaccatctctccaggtatgaacaaattcgaagtaaggtgatttttctagaagatattttctcacacgtggttccacataaatctccaagtttttataatccttcaaccatctgcatatatatgatgaaacgaatgagagtgtaaagttacattgatttcattaaaaaaaaaaaggaaaaagtttttgttgcttctaaatattcaactacattgattttacttgtactttattctttaagttgaaattttaatagtaaaatcttcctaaaaacatattagtataccaatatatatatatcatgtgtataaaaatatacaataagtagtttatagtaacagttaatgagatagttaatgagatgacactttaaatctactaacaattccttttaaaaatgcaattaaaatgatataattaagagagtttaactaacaaaacctataaataaaatgcaaatgagggtgtaatagagtgttttattcataggacacctttaacttcaaagaacccatcactacagcattaatacgaagaatgcgagaagaaaacaaaggatatttctcaatatccaaacacacctaaccatatcttcacacacaagatctaccggaggtgactttagctttgtaaatataagtacagtcatgggatgcgatgcccacgtcaaagaaatctgaaatgaaattaagtgttaagatagacaatagaatgaatacacttgtaaattaagagcttgtttggcttcataatttaaaaaatgatttctattttttaaaattgaaaacaatttttaaaaattaataagaaccgtttgacaaatttatttaaaaataatttattaaaattaggttttaaaaaactagaaaagagaaaacatttgttttcaatttttaaaaataatttttttttgtctaatatattatattttatatttttgctcgcatactcggatcctagatctggaaccatacccgaacccggatgagttcatgtcatggtatgatgttaaaatattattttttttcgtaagaaaaaatttaaaaatagttttaaaaatttgtgccaaacactattaaatttttaaaatgacaaaaaattgttttttattctcatttttaaaaacacaattttaaaaactaaaaactgaaaccagagtcaaacatgctctaaaagtttcagtgtaagggcttcttcaatgggatgctaaaatcttaaaaatagtagagtttggacactcataaattaccctaatggaacactaaatgtcattgtacatatgtgggagtctaagatagtgggacactatagactacactaaattttctttttttttttttaacattaacataatatgttcataattaaatttttatatttatatatattattgtgtgagataatttaataaaataataatataataaaaaatatgttttagtgtaatttttaatattgtagttggaattagaaaaaaatttaatattaaaatagtattattttaatattgatttaacactaaatttaaattttttctttggagttgccctaagatgataaaaactatcatcttattgtaaatagtattacaaaaactttctagacacataaatgatgaaatttattgtaaatatgatattcttaataataataataaaaagaaatttataatactatacagttttttttttttaataataataataatgttattattattactgatacatctaatgtttttttcactttttttttatttttatttacttatatttttaaaagtaatattttagttcctaataaaaaactaattaattat

SEQ ID NO: 42883 - DNA, 4787 bp, Cannabis sativa
catggtttgatcatatatatttccaaaaacacaacaaaaaacgacaatggatcattcttcttcttcttcatcaactcctcatcatgacgatcaccatcatcaaaactggctagctttctctctctccaaccataaccctctctctctcttccaaacctccttcactactcccaataaccgttagtatttcctaactacttctctcatttttctcattttatttacttatttatttatttatatttatatttttgtaacagtagaagatcatcatcatcatcaagatgcttcatcaacagatctcgccatgttcaccggtgcagcaccgaagctggagaactttctcggcggaggacccaccaccgcctcctctccaaatagtaataataataatcagtttaacggcgttgatcaaacggcggtaacggaagctgatgagctgtatgagtcggagcttaagactattgccgctagctttctccatggtttcaactctcatataaataataataataataataatattatgagtattattactaatgatagtaatctcagttgccagctggaagcgccgccgtctgcggtggctccggtgtcgtctaagaagaccgttgacacttttggtcaacgtacctctatataccgtggtgttactcggtaaatatatatatatttttaaatgagaaaattcatttatttatttttttaaaaaaaatgtatatatttttttttaataaaattactattatagacatagatggacgggtagatatgaagctcatttgtgggacaacagttgccgaagagaaggccagagtagaaaagggcgacaaggtaatttcctttattattattattatttattaattattttaagagggggaacagttttgctaacgtgcgccttgataaccgggtcggttcgggtcgggtacaataggtcgttatgtaatgacataataatggtgtgattgggaaaggagtcggtgaatgtgacaaagagcttttgtctttatatatatcccggtttaaatgggagttatttaaaatccacgaaatatttaatagagaatatttttggtagtgaatcaacggttcagattggatctcgaaagattgttttagatttcatctgagccgtagatttgtttatttatttatttatttatttttatattggagaaatgatgatgatgatatgagaaagattctgatttttgttttgtttgttttgtatttttggaccaacttaatcattggtgaaatggatatggaacttatctcatgatcagtttatttgggtaagtaaatattctttctttctctcactcaatcttttcattaatatttctaaaccttaaaatcaaaaaatatatcctaaattagctatagtgattaatatttgttgtttaaataatcttataatcatcattttgttttaagaatcttctttcaatattcattctcaacatatatcattattatttagttcagatcgattataaccattatttataaatgtacttgttcaattttacataatcattttaataaaatatatgatattaattatttattttacaaaataatatttataggtggatatgataaagaagaaaaggcagcaagagcttatgatttggctgcccttaagtactggggtcctaccaccactacaaattttgcagtaagaatattttacatatattaatttattttaatatatattatatttgaatctaaatttaattttgttaattaattaaggtgtctaattacgaaaaagaattagaagatatgacgaacatgactaggcaagaattcgttgcttcacttcgaaggtaaaaaagaaacccaatatgcatatttttttttatataatatgaaataataataataataattacattataaagaattgtaattaataatgattttttatttattttttctcaggaaaagtagtggattttctagaggagcttcaatatacagaggcgtcacaaggtatatatttttattattattattaatattaatgaaaagtattaaaataactttattagtaaaaaataaaaccccactaattaatcgatgattaaattaattattaggcaccaccaacatggtcgatggcaggcaagaattggaagagtagcaggaaacaaagatctctaccttggcacctttagtaagtttatatatataaaacataaattataatgattttttatttatttaaatatattttaaaactatactcttactacattattatttgctaactgcatttttctttttttaatttttttttaaaggcacacaagaagaagcagccgaggcatacgacatcgcagcgataaaattccgaggcctaaacgccgtaacaaacttcgacatgagccgttacgacgttaaaagcatagccaactccaatctccccgttggaggaatgtcaaacaacaccaaactttccaaaacctcacccgaacgggcgattgacaacctatcatcgcccgcgtcatccctcgtcgccttctcctcctcggccaccaacaacaacaacaacacaaacaacaacaacaacaacaacaaatctcctccaatctaagctttactcttcccatcaaacaagacctaacaacaacgacaacatcgtcaacggattattggtcaaacattttcggtttccaaaaccctaaccctagtagtactactagtactactccttccttattgttgggccataatagtcacaacctctcggccacaacaactaatgcaacaacaactacaacaacaacaagtaatggagggtattatggtaatttcatcgagtcaatttctaataatagtaataataatactaacttgggttatggatcaggattaagtagctggattagtaatagtaatcataatattaacggagggagtagtaatagtagtaatgttcataatcatcttcatcatcatcatcatcatcatgaagttgttcatgcgaaacaacctagtctttttcaaacaccaatattcggcatggaataataatgatgatgatttttctcgcacacttgttggaaaactactggcacgtgggaatctgtggtgtttgaatttgcatggaaaagggagctagggttgttgttgttgttgttattgtaataataataataatatggtggaactgacaatattcatcataatattatttttcatgagagatgagaatgtagtagtgaaatagctagtactaactgaagttgggttcttttagggaccatgtttttacttttttattatattttttgctttttctttttcctttagttttattactagatctactgacattattattattctaggtgttaaggaaaggaatcctttttgtaatccttagtttttttcatatatattatataaatgcaccttcttcatttatgttgtttattaattatcccaaaaaaaaaatcaatgtgaaaaaaattcgattttttatgttatatattaaataaaaatgtgtaaaatttaatattaaattgtattaataataataatctcacacctaagttagcatgagttattaattaattcattcattagtttgactgacttgaaaaaataatatattaatatataattgtaatataacacaagatatagaaaagaaatatgataataacattggtacaatattaatgataatgtacaatttatcatgggataataataataatatggaattacaagtagtactggtggcccttatcttcagatttgtgagagttgtgaggaaaaatgaactatttaattaattaagtgtgagttgtattagttggattcttctttaaaatttgtgatattaatttcatgagtaatatttttacaaatgcactcgagtgtattgactcttttctttttcttttagaataatatttatgcatgcatatatgaaaatttacaatatttatatcaaaatagtttaattacttaggcgggaaagaggtataaataagtggtagatcattttataaatgggaccaatatatatataaagacagagacaaagttataactcataagggcgtgcatcaagtacatataatcaattaaagatgaatatgcatatatggtaccaacttaattataagtttttctctcttcaataaagttttcattcatataaaaataaataataattaattaataaaccttaattagtttgcttttgcttggaatatttaattatattgattgatcaaagctccttttttattatttatgcaccactaattattattggtatatattttcagtatattatattgaattaatataggtcaaaagatatagtaatgagcaatgattgatacttgtatttacacttaaaaaaaaaaagtaatatttcaaaattgagtaataataataattaattaatgaaataattcatgcaaccttacttaatcaatttagtcataaaagggcgttttaaactagaagaaatggaagctttagctctagctagcctggagtctcaaaactcttcttcaacttcaacctttagtgcattcaattgaaaccaattctcttttagttgttcatggtttgaagaagttagctactgatctctcagcttttcatgccattctcaatgatattcacttttttgtgtttgattttccacgagcatagatctctcatgtttttagatttgctaacaaacgaaactcattttgttggctaagtttgttcttatggactacaaaaaatcttacttttag

SEQ ID NO: 42884 - DNA, 3014 bp, Cannabis sativa
  modified_base (57)..(69): a, c, t, g, unknown or other
gcacgcgtgactattttattttaggggctttttcatttttacacttcaaaacaattnnnnnnnnnnnnnttttgcatttttatggaattctacatagaaatttcaattgcaactagcgttgtaacataaattgcaacaaaaaatcatatagaaatccctattgcaactagtgttgcgaccactttaaaaaaccaaaccgtaaatttgaaaaaaaaaattaaaaaatagtatctagggtaattcccttttattttatacgtgtgtgaaatagactgtttgaatattattttctatattgtaaatttttttgaattttttagaatttgtaaaatattttaaatagcaataacgtacatgaaaataaaaaaaaaattaaactaaaaaattcttctaaatgccgaaataaatagagggtacatcaatatattctttttaaagaaaaatattacctataatatatttggtatgatttcattaaaaaataaataaataaataaataaataaataatctgtactctttcttctgtgcctcctcttgcaacttataattaactaaaatacacataatattactttccaaaaaaataaaataaatacacatgattaagggtaacgtggacctccccaaattgtggagaattttgtttttaatttgtatgttttttcgtttttgctattttttttttttttttttttgctttttctaatttttttaattatagtttgtcccatcttaatttctttctatttgttttggccccgtgaatcctaataagtttggctcctcattatttatttatttatttttgtgaggggcaccatcatatttagtgcttcaatgaataaatatgtacgctctatattgttttgaagtagtatgtagtgtctagatctaatgctgggatcttctctatttgataagataagttttctcttcttatataaacgaatattactaatttatcttttcttaattttttggaattgatattatttttgttagtatttttttacattttaagttgttcaggcagaatgtttagctttacttgtagcattggattgggcccttactgtgggactttctttacattttgttgaatttgattgtttagcggttgtaattgtattttccaaacgcacttctttcctcaatgaacttggttcctttttagaggatttagctagtttaatgtccagtttcctgaagtatccataatccatgttcgtcgaacagccaatggggatgcacatggattagctcggtatgcttttcgggtggatagagaactagtgtggtttgatgagattccttcttttattggagtttcttaagacttaaagtttgtatgatattatgatttttttttcaatgaagttattcattgctaaaaaaattatgtatgctttatattataataacatgtatttttagagtacatccaaccaaatcttcaaattattgtggcgtggcatatcattttctctttttcacctattcaaattattgttggcgtggcatgatagagttgagtggctaacaagacagtgtcattttgagggttgctttgttgtggaatcgcaagggagggagggatagctatgttatggaaggagaatgaggtggttactcaggctggtttctcaaacaaccatattaatgttactgttaaaatggaaaggaatggtgtttgtctttttactggtttatatagagaaccaaaccgtaatctaagacataaaacatggtcgttgattcgtgatttggctgcctctgtcaagggcccttggtgtgttatgggcgatgtgaataatgtctgtagggtaaatgataaaaaaggtgggcgtccttatcatgcagctcttattcaagtttctaatgatgctctttataatagaagacaacaggatttatgcctggagggctatccattcacatgggagtgagtaacagggactgacaatttggtggaagtgcgccttgatcgtgcattggtcaaccaagagtggttatcgtgcttctctatggctaaactctataatcttaaggtgagcttttctaatcattgtcccattttcttggttcttaatcctgatgttccttcattttctaagcgcaagtttagatttgaaaatgtttggtttaaggactcaatgtgcctccaaattatccaggattactgggagttttaagggggcctgaatttgaaggaaaaactattattttgtggtgagaagttggcaatttggggttaggatattttgggtaatcttaagaaccaaattgttgtgtgcaagaaggaaatcaaaaagctgaaaaataagagagatgttgtttcgtgccaattatttaaagaagctaatgatcaattgactaagtttcttgggatgaaggagtcttactagcgtcaaagatcaaaacaactgtggcttaaagaaggagatcaaaataccaaatattttcatgcatcggcaagtgccaggagacgaaacaattatattacaagcctctgcaataatgatggtgaattggtcgattgggatagcggtttatcagaggtaatggctgactattttcatgatttattttcttcctctaatgtggatttggaaaatgtggttgacggagtccgttgttctgttactactgaacataatagtgatcttctcttgcatgttagtgttgaaaaaatttgaagtgcgttgttccaaatgcatcctgataaggctgctgacaatgttgggcatgatattgtgctcgatgttcagaaattcttcaataagggtctcttcctttgggcattaataacacaaaattggttcttatacccaaaaagaaaagtccatctatgcgagatttaagacctattgtgttgtgtaatgtcatctataagattgtgacaaatgtgattgctaatcggcttaaacactttcttgattcaataatctctgagacccaaagtgcgtttgttgttgcgaaaattattaatcactacgcaagtatacgcaatca

SEQ ID NO: 42885 - DNA, 1582 bp, Cannabis sativa
cattgaagagaatgtaagtaacactcaacactattaaaatgatcaaaccccattattagcattgtgtagagaagagactaatcgatattgttttgtgtttaggacgaggttttgattgctggattcggtagaaagggtcatgctgtgggagatattcccggagttaggttcaaggttgtgaaagtttccggtgtgtctctcttggctcttttcaaggagaagaaggagaagcccagatcttaagctatcatcatgcatgcatgaatgtttttttaaaccctaaaattgttgctgtttctttttagtgttatatgaagaattttgagtacaatttttgatatttggatgttgggttgaattcactagtagttattgtcacccttcttttgactcttatttatttagctactctttttctgatgagctttatatgatcaaacttcaaatcaaattcattatcattattaatacttgtcatcttaattttgatttaaaaggcctttcactcaattctgcattggcaacacccctaagagaattattataagataaactgttcataaataagtgaaaagatttatataataagtgggtctatttgttataaactgtctaacaaaacaaataaggtttatgaatctattttgttataaatcttcatcatgatatttatatgctcttaatgagaatgttacccaaaaattggtgtatacttaacctttttacttgcaatgaaacctttgaactccccaacaaaacaaatcagctacctcaatctactttgttataaatcctcaagctctaaaaatgcctaagttactttgttataattataaattattaaattattaaattgttctctttcccttactttatggaaggacaattggtctaccaatattctctttcatattgggactcactgattggattttcaaaagacttttgtacctccgaaaatacgtttgaagttggttgagtttcgagtatactttaacttttagctaaaattcattaaaatttttgagatatttttatactaaaataaattttttttttttcaagtaaattaaaaattatgttttaattctaaaattacttctcaataatccttttaaatgaagttaaggaattcctaacacccatctctccaaatttatttttcagagggtgatatgtatcaatttacattctacttttatcttaattttctaacacttcatctgaatttcctgattcacattttttggtttatttataaaaaatttacacaaattaaaatatacactatccaaaaaaaaaaaaaagaaaaaagaaaaattagttgccaaaattatcaattggtttcgttgtatgtattatccgatattggcctcctcttatttatccgctatctacacaatcaagttttgataaattttcttttattcaatataaatatttcatgacaccttaaatttacggtttagtaatttagtgaattttactactaaaatttgagcttagaaaattaaagtgcaagttgagagaatttaaccgccaaaaactcttaactcacaccaaattttgtactttgatgaaa

SEQ ID NO: 42886 - DNA, 3600 bp, Cannabis sativa
tttctccccttacattcttgattttgcaagaacttcaccaccttctcccatgttcatagctcctggcctagtccaactctctttgaattgatcttcagtcacacctgtagaaaaaaaaaaaagttctcaattttattcatttgaatttaaatttacattattaagtgcatggaaggaactatatgagtaaagagtttttaaattgaagcttacctttgcccatggcagcagttgaagcaatacctccctgaacagttttgagatacctgtcgtagtaattagcaccggaccatttctgatgagccagagtatcgactccatgcttcctctcctctctttggatcctctccacgtaggccagcataccacgagtggcgtaatccttggcgaacgtgtcgatcactagtgcatctgcgtggaaacctgccagcgtaatgaactgccacacgtatcccagcctcgctattcttggaatgaactccttcatttgaacatcattcattcccgacgcgtcccagttgaacgacggcgatagattgtatgccaacattatctcaggctgcattgattttactccttttgcgaattcagtgcactccaccatgtctgggctcgccgtttccatccaaatcaagtcagcgtgaggagcgaaagcccaacctcggaccactgccgcagacaccgaccctttaaacctgtagaacccttctctagttcgtggcaaatcccagtcccagaaaaggtttttgagccccaattgatcggcaacttcacgggcttggtcgtttgacagacatttctcgtagcttgaatgcttcatccactcgttcagcttccatgacttctcattttcattgaaatttgcgttcttgattgagtccatcacgtgttcagagaaagtcttcaatccagccatcttggtccaattgtcctcaatggcttgaagttccggtcctgtctttcttgaagccatggcttccgccaaaacggtagctaaacctttacccttcagttgcggattcgtgacaccgagaatgaattggtggtccctgttgtccacattggtttggatcagagtcgcacccaccgcatctgttcgagccactaaaaccgtctccacccccattacgtcaaattgaagcctcgcagctacaagcctattaatatgttcactcacagaaacgagcactttcccagccatgtgaccacatttcttggtaacagaggactggtcctcaatgtgaacacctgcagcacctcgctcaacgaagagcttgcatagcttgacagtggcagtggtaccaccaaacccactgtctccatcggctatgattggcttgaggtaatcgatgtatggggttcgagaacgttcctccctagacatgctcatacgggcctccctttgttttctatcgtggtactgttgggcaaagaagaggtgttcgaccttgtttggaacggtgtcgtatgggtagtcagcaagatcaggaccaggctcgttggtggaggtgtgtgttgaagagcactgccatccagagacatagatagtgtccaagtgcttggccatcatggtgacttggacggggtctagagcgccaaaggttcttgaggctgtgccgttggcttggtgagtcttgagagtgtgccaaagctttttggccaactcattcgagccatagctctgttttaggttaccacgtagggctaccacgtcttttgccgagtatggtcttcgggttagctgaaacctctctgagctccaccaggcttgcacctctgctacctctgcttcaaaccttccttcttcctccattatctgttaaaaaaaatcccattaatataatattagaagtatacataaaagtagccattatttataaaacctcaaaaacacttcacattagtttagcttcatctgctactaagggaagaatcaaacaaattgttaccccattactgtttggttcaagattatcaatgaagtagaaagggaaaaataatgatataatctaactatagtattaaaacttaaaagaccgatcttacttttttaagtcatgtaataacatatcaatttattgttacccttaagcttgcatgtgcaacacatattataaactactaattaaacagtatacttctcacacgtcttcataatcctggacacaaatatggagaaaataaaaaaggaaagaataatgggtttattacaaatttttatgtaactcaaaaactatagaagaaaagccattgatgaggaaatgcttgcaagttgcatatacaagtatgatttctcatagattgacaactcaaactttagttgctttttcagctagaaagaacaaagacaataattagctgagaggaacaactaaaagaatagctattcatatgcttagaaagctcaccattgaaggcactgagaaagatgcagccatggctagaacttgtatttggttacgaaagcagttttaatatctgtaaaaacagttatgagaagtgaatagaaaagctcttccaactccctcaatttataacaagatcgaaggaagaaaagggattatcagaatctttttgtgtgaagaattaatttggtaaaaataagagacatgatgcccttttggataagaaagaaacaaaacccaagaaaattccaacttggtttttcacatttttgattttatcttagcaataaatatttttcattgttatcttgagatagagaaaaagattactgaaacttgtcttgcgggagctgcatttgcagggcacgtatatggtggtggcactattcctaactatatgcgctgtgtgccgccatgcttgtcttctagcgtccgttttccatgatgtcactctttttacatttaataaattattatatattcaccaattactgcgtatttctttctttgaaatatattcaccaattaatgattatatatccaatagcttaactgcctaccaatttcacaaaataaacagatacaaacaattatcgataatcatattgatatttttattatataccatagttaggttttttatgctatttaattaaaatatggaaaacataatattaaattcacctgtgtcttttaacgtttctcataaaaatttatttaatcttgtgcggtacacattttttttagtggaaacgacccaaaaaaaattacaacggaaacgggtaagagtcattgccatgtcaaaaattcacctatgtattttttttaggaaaacagtaggaaatgaaaataacaaatcacgaagcgaacatacaatcgctccatatgcagataagataggttcattaacttgaatatccgttatgagatttaagcagtccgattctacgtgctgaatttctatgttattatctcggcaccagcataatgcttgtaaattgtaataaagcccatccttcagctgtttttgggggcatccgtcttggacgattcatagccatggcagccactacttatcccgagaagtttcgaatcaaagcacccatttctgtttttccttttttacttgaaacaacaccatccacattgatcttcagtttcccaatagtgcggtacacatttctgttagtatagc

SEQ ID NO: 42887 - DNA, 2081 bp, Cannabis sativa
ctcttaagtacctacatagcaattgttatagtttctggtgcccaaatattgtagggttaaagaaataaaattaacaaaacatctagctattgagatagcaaaataaaatcatgaacaagcaaaaaactttaaaatttaagcatacttagattgggactcaatcattacctgcaatatatcaaaggctgcacctttcacaacctccatcattggccttacatccataccctttggtgataacaatttcattctccgagcttttccacccagcacctaaaaacaatggcagatttattggctgctgtaaaatttcatccaccaaacaagtaattacacacatacataccatacatatcactataaatatcagaaaataatgcaaacctgaagaagtttatgagtggttcgagttggctttggttcctcttgtgggagttccttatcttttcctctacttttttgaccctttctccttctagtctaaacttccacattcaaaatcaccaaaattatattaaaattcaaatacccaattgaaaattttcaaaatttaaatgaattgcaacatcaaaaatgaaaaataataaccttaagagaaggttcggataagaactcatcaggattgagaccatatttctcaagtaattctttcttggcctcttcacttactggtacattcccagatgtttctaccattaacccaataaattaaattaatttcagaattaaataatgaagagttttccttttcttaagaacaaaagtcaaaaccattaatttcaaaaatttacttgaagagaatacgataatggttgattgcgttcgagtcctgttgggtctggcatggagattgaagagaagaagagtagaggagtgtgagccaaggtttgtttcagtatgtgatctgagggagtaaagagatggaagcaatgaaactgccattggagagagttgggagctcaaagcaatgaagtagagtgagtttagtcacagcctctactggaactggatggatgaaccagacttcatgaggcccaattgtttccttcgtaagcccattgatggaatctttgtaatttttctgttatttgtgtttatttaaaattttgtacaatcatatatttttgtaatcttttttttttttgttatttttgtatatttttgaaataattccaaaaaaatttcaaattatttcagaaatatacaaaaataaccaaaaaagttagaatttttaaaaatactcttctttaatgttttatttagaatttacaagctaaaatttttatttacaaaaatacatttataaaattttaaaattataaaaatacactttgtttaacaaaaagtaaataactaaaaaataacaagaaatcaaattttcaataattataaataaactataaaacaattaaaaaataactaaaaaaaaatctcataattattataaaacaacaaaaaaaaacgtttattatagatggagaggatgtaattatcatttttatatttttggtatttggaataaaattataacatagaaaataactttattgttaaaattattatagtatcattttttattaacattatttataatttttttcaaagaataattttagtatttgatatattaatttttttttttttttttgaaaaattcttccaaaaaatagaggaattgaaatttaggattttgaggtccaacccctctactcttttctctcatctaaagaaataatgaattctacctccccttctactctctccctccaccactttctatccacctatctcttctccttatcaaatacaaggtcaattttagtgttttttttaagttaaatatgatataatctataatttagattatatttatcaagaactttcattgatgtagatttcaatttcaaatataattcttatatcattttccaaattcaaaatcttaaaaccatgaaagatttcatcagttgattagcttgtgctccacttttcactagatcattttgaagcacctagttaataagctgaagtggtcctcagccgtattattttccaaatcaaaatcaatgatgtacttcctg

SEQ ID NO: 42888 - DNA, 2276 bp, Cannabis sativa
gtggcggtggtggtggtggtggaactccaagccctggcactggcggcggcggcggtggtggcggtggtggtggcaatggaagtacagcaacatgccctagggatgcccttaagttagggatttgcgctaatgttcttggagggttgatcaacgccaccattggaactcctccggtgacaccttgctgtactcttatccaaggccttgctgaccttgaagcagccgtgtgcctttgcaccgccattagggctaatattctaggtatcaacctcaacatcccactttcactcagcttgcttctcaacgtttgctccagaaatgccccacgtggattccagtgttcctaataaactactacctacgtacgtaccaaaatgattcaatgatttcttctttctttttctcttaatacctacccttttggttcttcaccatatgatatatccacttgatatatatttacatataataattattattattgcttttatgattattttcttaagtttaaaatcctacctatcatgtatcacgtgatggtttttaaatagtgtgtgtgtttgtgtgagtctttaatttgtacgtggaaatctcccatttcctttcgtttattatggctttgtttgatttgtgggtgataataaataaatttaagcatagtatttgtgttaaatttatgcaatcattatgatcaatgataaatgtcctttttttttatgttttcttggattgaagtttaatttaaatttatatatttctatatattcatgatgcttaatttacagattaattaatttgtcactttgtgacaaaagaaataatataaattccttgatgtgtaccactctagtttactactatttttaatatatatttaaaattatacctataatattttctatatagtttgacgaacagttacgatacaaattcgagaataactaataatatgtatattgatatgtattccatatacctacgtagtatatatatacatatgatgtttctccaatcaattatatggaatgatatattatatattcccatacgcatataaaaggtacatctttagatacagttcactcaatgtatatttcaataaagttaagaagaaacaaattgaaaaaggtcttctagattttgtcgaatgcaaacacaacatattcatgtcccatcataggggtaagcattcaaacacacaatccatataactattggcattcccgtggcccattctcttttttatatagttatagattattgtatgaaaataagagaaaaggatattaaggattccagcagcttttccattctatattatatacgtcaatgtccactacatcgctttcaattatggagtacatatagctccatcatatatttatggtaccttcttattacccgtgactaaagctccggttgaagagaaaactcaaatatccagattatcatttaatttatgtatgttgtgtgttaaataaagtgatcgatttcttttgtttctaaaactaaattgctagtgtaaaaataatttaattttgcaaggaatatgtcgacagtagtccgtacggcatgtacgtacctgttaagtatccacaagaaattaaaagtgaattactttatatatcattatttgattttttttttttttaatttacagattgagttgctctagtagtttttatgtaaattgttatgtgtattttaattgtggtttaagttattttgttagtttctatatagactattttgtgaatttttgtaaaaatacaaaataaaaattattttgaagtgtaaaaaaaaatcctaaattaaattctaaagataaaatttgaaaatttgatcacaattagttgcaagtaattataatcacgctaaaataccttattagtaattagctagttttttattataaaataattataacaatgaaataaaatcaccatcattatactgtagttaatttaattaaataggcttgttacattaaacggaaaaactaaaagtgaaaacctgatgatgctttaacttttctctacttatttacttgaacttatataatgttatgtattctgtgtctataatatatatgtaagcccaaaagattcaaaaaaaaaaaaaacagttttgttagtaaaaacgaaaaagaaacgaagtgctagtcaaattgtaaaaacaccaactaataaaaatggaaataataacaaaaacttctcgtctatataaataataaataataggaagaaagatatatatatacctggatttctgtggtg

SEQ ID NO: 42889 - DNA, 4359 bp, Cannabis sativa
tgtaatattttaaaaataattttgtgggatcccagttatgtaactttaaattattttggtttaaagtaaaatgtgtatattattgcaagttatttatttaattaattttattatttattttaaattaatcacttggcttatagaccccaattaatgggattagtagattgtaatcattacatgtggcatccatctgagtaggatattacaattgtccacctagatcaaatatgtacctactagcaattctcattgcacgagccaaatcaggtttagtacacaccatggcatacattagacttcccacacaactagcataaggtacattatccatacttgttctttcttcttctatgataggtgattctttctttggcaatttgaagttagatgtcagtggtgtagaaactagttttgcattgttcatcttgaacttgtctaggactttgcagaggtagtgcttctaggacaattttattttccctagtctctcccttactatctaaatccctagtattttcttggtttggccaagatctttcatcttatattcatcctttaactgagtctttaatccatctatgtcaaatctatctttgccaacaagtaggatatcatctacatatagaagtagatacagttttccatttgagtacacacatgggccgtagttgcttttggtgtatctaatcctaggcatgaactcatcaaatctcatgttctactatctaagagcttgttttagtccatgtagagatttctttaggagacatacctagtttggattgttactttcaaaccctctgggtgcttcatgtatatttcttcatacaatgtgccacgtaagaaagtcgttcttacattcatttgatcaatttttagatcttcttgatcatcttttgacattatagctcgaattgatacttgtatgacaattcgtgagaagatgtcattgtagtatattccctcttgtgttaatccttttgcaaccaacctttccttgtatcttattggttcaattcttagaattccctctttatgtctgaaatccgtttgcatcctacaaatctttgactaccagacatctttactactatccaggtcttgttctttctcaaagaatacatctcttcatctatgacattgagctatttccttccatctttgctattaagaacttctcggtatgttgcaggttctgaattgtcaatttctgtagctgtagccaaggcaaatgaagtgaagtgtactatgtctacataaccaaatctctcaggtaggtgtatctctcttctttctctctctctctctcttgccaattggtatgttctgagtcccccttgagatgcatcttctctttgttttgatctttgagctagggtgctagcttctgtttcaccatgtgtgttcttctccatctcaaactgtatactatcttgtttacttgtttgaactggtcctgaacctgagctgattttcataggcatttcattttcattaaagatcacatcccttctgattatgcaccttttgtgtcctggttcaaagcaccatagtttgtaacccttcactccaacaaggtaaccaaggaagatacattttagagcccttggctgtaatttgtcttgtctgatatgtgcataagcattgtaaccaaaaatccttagatggtcacagttaggtggcttccttgtccatttttgttgtgatgttagaaatccaatggctgtagatgggcatatattaaccaaatcacaagttgttgaaacatcttctcccctaaaatatatttctaaacctactccattccacatgcatcttactctttccaaaagacaactattcattctttttgcaagcgcatttcgttgggcatttttcacaactattttatgccttgtaataccttccttgatttaatttcaaaactcttttaatcaatactcaagatcattatctatcctcgatttcttgaccttctttctgatctgattctctatcacctttctccaatttacgaaagtgttgagtgcctatcattgcttttgagtaaaaaaatcaacacctttcttgagtagtcatctactatgctcatgaaataactagctcctctaagtgtcttgattctcgagggaccccacatataaaaatgaatgtaagccagaggttcactagaggtatgtatgcctgtgttgaactttatcttccagcttttaccaaacacaaactgttcacagattccacgttgaccactaagttttcctttcaaaatttcttgcttttctagttatttcattcctctttcactaacatgaccaaatctctgatgccatagcttagtctgtttgaggtcttgatgttgtttaaagctgatgttgcaacgttggttactgatgatgcactactagtaactgtgtcttaccaagcaagtaatatataccatttttgtattcacctttcatgacaattaggaatcctttcataacttttagacaactatcatcaatcttaatagtacaaccattagtagttagtataccgattgaaatcaaattccttttagcaagaatgtacttaacatttgtgagtgctctctaaatgttgtcatgcattttgatgatcacagatcatatttcttgaactatgcaggccctgttgtcaccaagtaagacaatttcacctatcttttcttctagttgactgaataggttcttgtcatgacacacatagaatgtgcaccctaagtctaaaattttttcttgactagtgtcaacattggatgcaatcatgacatctgttgattcatagtcatcagagataatgctggcttcacctctctctcctttgtccttcttgtccttttattgtctctattcttcttgtttcttaagaaataacatttatccttgttatgactatctcttttacagtagttgaaggatttacccgttttggattttgattttgatctatttccaccatgacctcgattcccattgtttttctggtttccatgatgtccatggttgttattgtcagagttcttgtggtttcttgaatcctttttatcagatcttcctcctctacagaacaacacatcaccatttgaatcacctttgtcttcaaacttcttttgagtctctttcgaattcacctcaaccttgacttcaaaaattatttacctagaaattgaccctggtgacgtaaaaaccaatgtttgacacatgtcaagaaagaaaatatcctagagttgagtattcccgagtcatagtagtcgacctaaaaggggtccctagccttgcacccaagttgactctaagaactttggaatgggtgttttgatccgccaagttgtttctaacttataatctttcagtattttgaaccaagaagacaagaataatccaagtctaaggcttggaaattgaaaagagatgaaactacatcccgaaagttaacttggcgcctagggttttcacccagctcctaggttgacattcccaactatggtttgagctttcaggtttgtcttagtgaaaatggctcaaaatttgtacttagacatgaataagacctgtcacgaacatgttaaagtcattggatcggaattggaacacctgtgcacccggtgcctgggcaacctagtgatgcacccatcgcccacgttgacatattgtcaacttggggcgcttccaaccgcaatattgaagaaatatcctgatcattttattcatctccatccaaaataaggaatcaaatgctttcaagaaagaaacaaatcaacctggaagctaaacctaggacctagtgcccattttaacatattgttaatcggggccatttccaacaccagtttagaagaattattttaggcatattctctgtttttgtcaaaaattaagatatgggtgctttcaagaaataaaaggagccatttgggagccagaactgggacctagtgcccagattgacttggtgctgggcctagcgccgaggttgacatattgtcaacttgagtcatttccaatatgtttttatgagaagtcttccaggcatattctctgttttcaccaataactaagatacaagtgtttttgggaatcacacaaaagaatttgatgggtaaaactgggacccaacatccaggttgaccttgtgcctgggcctagcacccaggttgacattttgtcaacttgagtcatttccaactgttttctcaaaaagtgtttttggtatcttttctattttaaaaaataaggaagatacaaattattccgaggagcaaacaagattctttgggagccaaaacaaggcctcagtacccaagttgacatgggcactgggccctacgcccaggtt

SEQ ID NO: 42890 - DNA, 3564 bp, Cannabis sativa
  modified_base (1957)..(1976): a, c, t, g, unknown or other
  modified_base (2028)..(2031): a, c, t, g, unknown or other
tgctttttgaagccattcattggaaaaaacattaaagataaaaaaatgcgtctgccgggagtcgaacccgggtctattgcttggaaggcaattatcctaaccgttggactacagacgctttctgaaagaaaattcattataacattatatataagggggcgtttgatacaagggattcaaaataatcttaaacccttataaaacacacatcttaaacccttcattcaaatcaacctactgataaatttataaattttcaataaaattatctcatattaatttattaagtaaaaaatgcagcattatatgttttttttaaaataaataaatcaatttcattatcaatcggctaataaaaatggcccttaatccattgggaacaggctctacaatgaaaggacgatcacgattagaacatgaatagcgagcaaactaataaactgcttttgcagcattatattttgattagtagcaacctgaaatatataacaataacaaaatgttgaataatgaatcttaaacaatttttcctttattatttaaaccttcattttttttctttacaagttttctatatgtactcattttttcttaattgtctctaaccaattaatcaagtattattaaaccctattcaataaacaatctcatattcttaacaaggcttgatttttgtaactttgtaaaggcaatgccattaatctgtctagctctttctcttgaaagtttcaacactcttccaatctcttcaaatgatttgggatactctccattcaatccaaaatggagtctcaacacatgagcttccctctcactcaattctgtctccaaaagcttcttcatttcttgcttcaaaagctctctctttaccatcttttcgggtattgtttcttctggccccggcatgatctcctaaaacaaaacaaacaaaaaacatgtacaaatcaacttcaatttgttttgactatgtttgattgagtgtttagtgtttttcaaagcaagtaacctgtagtgtcattcgccctctatcggttactgcgcgatccaatgaaattggggggcggtttctttgtgaaactagtctcactgttgagacatctagtttgagttctttggcaacttcatcataagttggtgaacggtttaatcttctatttaagacattgtttgcttctgtgatttttgctatcatagcacacttgttcccctgcataacaaaagctatccatacattcactagttaccaactaaccaataaaaacactaaaatgtatgtatattctttttttcaattttttatgtagaaaatgtatacttttctaaaatttgaaacttcaacctacaaaaaaaaatgtaaatacatttttgatatgggaactgctaaaatgtatcacttaaatagacttaaatagactgctaatacaatgtaatatcagtaaattttaatattattttttagggaaggccctagatgcaaaattgacttgcctatacataagatggacctttataaactaatagttaggggtggcaatttgtcggtgtatcgtgtttgggttgtgttggggttttgaatttattgtaaaactgttgatccgaacataatccgcaacacgaaaaatttatacaacacggatacaaatacgactcgaataaatttcgtgttgtatcgaacttgcaaaatcttgtgttgtgttcgtgtcctgttagcaggttataagctaaattattgtgtttagtgtcatcgtgtcattaaatttaggctaaatagaatttttaccccctgaaactttggcatgtactaaatcatgccccctgaacttttaaggtcgttaaaattaaccactgaactattgagattgttggatttaagaacttttgtctaatttcattctattttactatttcagtgattgtttatatactaaaccgtgctccacagactttgatatctacnnnnnnnnnnnnnnnnnnnnttgacatgtactaaatcatggcctctgaattttcatctatgttagacttttnnnntaaaattagaaaaaagtccataaatccaataaatagttccaggggtatttgtaacgaccttaaaagttcaggaggcatgatttggtacatgtcaaagcttagagagaaaaaaaatcctaattaaccttaaatttattcagacaattgacacgaatatgacttgtgatacgaaaaatttataaaacacaaacacggcccgtataatttttatgttgtgttgaatttataaaatctcgaatcgtattcgtatcaaattcgcaagttgtgtcttgaacttccacctgatagagctagaaactaacatctatatacatttccttagtgtaacaaatttaaaattgtatggtaactaaagagtaacataagccaaaatccaaaaaagggttgaatagtaaattcacaatgagaatgactcaccggcaacttgaccattctagatttcttttgtatggctttaatgatagcttgtctaatccaccaatatacataagttgataacttgtaccctttatgtggatcaaacttgtgggcccctctaagaagtccaatgctaccttcctactaaatgagaatgatttcattattgagataaatcaaacccaatagttagaatcaaaatatagtaatatggaataattaagaacctgaataaggtcttgaaaggttaatcctttgccttggtaaccagaagcaattgaagaaactagtctcttgtaactccttgtgattttctcttgtgattctctttctttacataatatcttatctatgctctttatctccatcttcatagccttggccaactcttgtgaggttggctcatgatctttatcattcttcaatctttgcctagctacttctagttttgctccctcctttaacaatcaatgcaaatttaccaataaagctcaaatctttagggtatatataatgtttttttcacattgggttttgtaacatatgggcaaacatgagctaaatctagttttgctctttaatatgattacaataaaaactttacactaagctaaatctttatcttactcataaacataatttgggtttataatgcttttttcatattgggttttgtatttaacattaggggttaaacttaaaaaatcaaactttataatatcttaaagtgaaatactaatggacggacgttccctaatattataagaagtaacatattattattggtgtattttaatattagatctcatactttttttttttttaagaaattgttaactaattataaagtattcagttgaatactttaaaatactaaataacaatattctaaagtatacatgcattataaagtataaaaattaattaaaaaaatacctttaggatgaaacaatactctgcctcttctcttgaactcaaaaacccagttgagttcttcaaattttcatcacttttttcttttctcaaacttttacttctctttctccacgtaaccaatttattactattaacattcgcattccaactccaaatcatatcaccaccaccacctacctc

SEQ ID NO: 42891 - DNA, 2337 bp, Cannabis sativa
agagtctattggttaatttatcacaccactaccaccacaatcacaacacaacacaaccagaaacaaccatcaaccatcccgttctgtagctttctctccatttccactctctttcaccctaacttgtgactctttgtttccatttgcttatgcggtgttggcaaatggactaggaaagagcaccgtggtttaaacccagaatctcagaaacctcgaacccaacttcctgaaacccagaatcctaaaaacccagctcccctctccaacctagaaaactctaaccctctctcctgctcgatctctctcgtttaagtcacaactcatgatctcatgcaacccagctctcctctccaacccagaaccccaacccaaatgccccactaaattcactcgctccacactttctcatgcaactcaaaggccaaaacaaacaacctgtaatcttgatagttcatagagcattgtctatcaacctcacaagtcaaacaaataacataaacattaatgaaacaaataaaaaacaactttcagaaaggatgccaaaaaaaaaaacttgcaaatatatgtaccatcacatgtaataaagtaaaatattatttctacttattgattattaattacctataaaatctcttgctaacttgggcaaagttaactagaagctttcttaggagtcatatttatttgcattttcagtttttctatttcttaacaacattatattgatgcatgaaaatgattaaacatacattgacagtgatggtgtacatctaagatacaacattattagtcttagtcatttatacaatagaagattattacaggggctgcattgctgggtaaggagctaagaagatgagactcgtaacaaaattagaaatctgcacatttgatccgcgcagagatccctaactccaaattcagctctcaataatagcttattcatctgccatggctaactccaatgcataatcatctctatcctgtaacatccatgtagtgcggaacataagcaaaagtgaaaatgtacgattccatgtcaaaaagaagtttggggatcaaaagtggattcagaacttacaattggtcctcgagcgaaatatcttccaaactgaagccaatacacctgcatgtgccaaacatttcaagttctacaatgttaagaaacagtaaaaccgaaaatgcaaataaatatgactcctaagaaagcctccccctgctcaaataatatttactaggtttcaaagttctctgcaccaaattgaaagggcgaaactatttttgtgcaaaagaaaggcgcaaatatccttgacaacgataccttaaagaagctaagatagcacagaatccattctaagttcataaaactatatagcttaaagtttaatacctcatcttcatcttgtgtttcaacttcaagatcagaggatggaaagcccacgcaaagaagtgcatacccctgaattttcaaaaagcaaacataagttttaacaatttcatttattttctattcaatatgtaacatcaaaatttgcaaattatcatcaaccaaccttagttgaaacaatgtcgtatagggttacttctaattgaaggaatgtctcatagtgttactatactatctatctcatcaatttattacatttgaacaacagcttctttcgtatgcatcaattttgtagtccaattccaaccataatttattgccgtaaccttccaactttacagttgtaattctaagcaacatcaagaggtcttccttacctgtgaagtcatgctttgtgaatgacctctttgtgattaagtgtgtgtaagctagttttttcttttaatatattttatttgtttgtaacttgcttttattcacaatgtacttgtacaaaataatgtcaatatgagccaaatttataggcttgcctttgctttcagttcagaagatatgccaagggcttcaggctgtctaagttctccagactttactcgtacggcacagctagtgcagcaacctggcaaagaaacttatcagaaactataaagaatagcactaataatgccaggcagcagatattgatggtcatataggggctagttacccacttttgggcttctaaagctccaaaagcactttgactgttgttgggtttccagtgaatttcaacttttagctttgaaaaagggaaatttgaatttccatacttacaaaaccccattatttttttcccaaatacatacttactaaaattgttaatatatgccaattttactaattttccaaaactaaccctcccatttgaattcaactctcagccgactctctctctctctcaactcaccaac

SEQ ID NO: 42892 - DNA, 4420 bp, Cannabis sativa
atatatatatatactatacattcatgcacagatactgtctccccttgttgcgcgtgaactcatcaagtaattaaatttaaaaccctctcccaatattctattcacattcacagagagagatagatatggggtgttgatggtgtggcagtgtgtgatctgctgtggtcaacctaaactaagcttaacatggtccttcaccagtttttcctaatctcaaggcattttctttctctatcaatactttccatttaaataaaaatcaaaactttggttcaagtttcagtctttgagttcaaaccaagaaacccaccaaaaaaaaaaaaaaaacagagcaagagagaggctgcaaagtccgatgatacgaaaagggtttggaatttgaggcaaatgtcttccatgccgaactcgaggcaaaccttcttcttcttctttctcactcttcttcttcactctccttttactacttccattgctgtaacaaacaatgaagcttctctcttattctcatggcttcaatcttcttcttctttttcttctttctttaattggaatattcatgatcaaaccccatgtaattggacagccataacatgttcttctcaaggtttagtcactgagataaatataaactctgtacctcttcaccttccattgttatcgaatctttcttcttttaaatctttacaaagactcgtcatttcagatgccaacatcaccggaatgttaccggaggatattggtgactgtccggagcttaaagtcatcgactttagctccaacagtctcgtgggttcgattccaaggagtttggggaaacttaggtaccttgaagatttgattcttgactctaatcaactcactgggaaaatcccagttgagattggtgactgttttgggttaaagaatcttcttttatttgataatcggttaagtgggacgattccgacacaactcggaaaacttaccggactggaagttattcgtgtcggagggaatgaagacattatcggaaaaatcccagatgagcttggaaactgtggtaacttgacggttttggggcttgcagataccaagatttcggggactttaccggtttcactaggccggttaaaaaagcttcaaactttatctatttacaccaccatgatctccggcgaaatcccacctgagataggtaactgttctgagttagtgagtttgtttttgtatgaaaatagtttgtctggttcgataccttccgagattggtaaccttaagaagcttgagcaattgtttctatggcagaacaatcttgttggggcaataccagaagagattggaaattgtattagcttgacaaatattgatctttctttgaattcaatctctggtactattccattatcattaggaaaactttctgagcttgttgagtttatgattagtaacaacaatatttctggttcaatacctttaaatcttttcaatgctactaaattagaacagttgcagcttgatactaatcaaatttcgggtttgattccacctgagattggaaaattgtctaagcttaatgtgttctttgcttggcaaaatcagttagagggaagtattccttcatctttggctagttgtacaagtcttcaagctttggacttgtctcataatttcctcactggtaccatacctcctggcttgtttcagcttcggaatcttactaagtttctcttgattgacaatgacatttcgggttctataccgcctgatatcggtaactgcagctctcttgttagactcaggcttggtaacaaccgtatttcgggtggcatacctgcaacaattggtggtttaaaaagcttaaactttcttgatctctcagctaatcgcctttcgggtttggtacctgatgagattggaagctgcacagagttacagatgattgatcttagtaacaatacattggaaggtcccttgcctcatacactgtcttctttatcaggtcttcaggtgttggattgttcatccaatcgattttcgggtcagattcctgctagctttggtcgtttggtttcattgaacaaactcattttaagtaagaattcattctctggtacaatacctttgtctcttggcctttgtttgagtctgcaattgcttgatctcagcagtaatgagctcactggctccataccgatcgaattgggtcgaattgaagctcttgaaatagctcttaatttgagctggaatggactttcaggaccaatcccatctcagatatctgctctcaccaagctttctatacttgatctctcacataacaagcttgaaggtgatttgaatccattaggagggcttgataatcttgtctctcttaatgtttctcataacaacttcacaggctatcttcctgacaacaagctcttcaggcagttatctccaactgatttagaaggaaacaaagggctttgctcttcgatttcgataagggaatcttgttttctaactgatgtaggcaaggctggaatggctaaaaccgaaaatgaagtacagaggtcaaggagacttaagcttgcactagctctgctgatcactcttaccatagcaatggtagtaatgggagtaattgcgatgataagagctcgaaaaacactcagagatggcgatgatgattctgaattgggagactcatggccttggcaattcactccattccaaaaactccatttctcagttgatgaaatactaaagtgtttagttgacaccaatgtaataggcaaaggttgttctggtgttgtttacaaggccgatatgcaaaacggcgatgtcatagcagtgaagaagctatggccagcagctgcagccacaacaagaggttttgttgatgaaaagtctggtgttcgggattcattctcagctgaggtgaaaactcttggctcaattcgacataagaacattgttcggtttcttggttgttgttggaatcgaaacacaaggcttctcatgtatgattacatgcctaatgggagcttaggaagcattctacatgagagaacaggaagtaatgggttggagtgggagctaaggtaccaaattttgcttggtgcagctcaaggacttgcttatcttcaccatgattgtgttcctccaattgttcatagagacatcaaagctaataacattcttattggtcttgagtttgagccttacattgctgatttcggattagctaagcttgttgatgatggcgattttgctcgatcctccaacactgttgctggttcatatggatacattgcaccaggcaagttttcttttcccttcaataactttactcaaatagtagttatgaaatatatagttcaggaagaatatttaacatcttgtttttttctttcagaatatggctacatgatgaagataaccgaaaagagcgatgtttatagctatggagtggtggtgttagaagtgttaacaggcaaacaaccgatcgatccaacgataccagatggactacatgtagtggattgggttagacaaaagagaggagggattgaagtgttggatgaaagcttactttcaagatcagaatcagagatagaggaaatgatgcaagcattaggcatagcattgttatgtgttaactcaacaccagatgaaaggccaacaatgaaagatgtgtcagcaatgctcaaagagattaaacatgaaagagaagagtatgctaaagttgatatgcttctcaaagcctctcctccttctcataatgctaatgataatggagctttgggaacttcatcttcatcaatggcaatgcaaaaaatgttcccaaaaagcaataacacaagcttctctgcttcttcatttctttactcatcatcatcatcttcatctaatgccaaaatgggattgaagtaattatgttattgtataagtcatgatcaagtttcctcatttagtttttgttctttttctttgttctagtttttgttttattgatgtaaagattaaaaaaaaagaagtttatatgtgtaataaattggatgcaatgcaaggaaaaaaaaaatagagctaatagaagtgtaaggtttttttttttttttttgccttgtctctttattatcactattaaagaaaaaaagggttttttttaaaagcataaatgcaatatgagtttcttaccatttcataattcaatcccattttcaaatttcaatattgcaaaatactaatttttgttctctaagaacttaaaatgtcaaacaaacctaaaagtgcattatatttagagaaatgtaaaggttaataattgtgtcttgtacgtgttttattactaatctcacttattttatcttacttaaataagaaaaatgctaaaagaatataatatcattaaataatcgtaaacgtcacctttaaataatattagacaccactgatactt

SEQ ID NO: 42893 - DNA, 6342 bp, Cannabis sativa
tctttacattgctttatcatatatttattgctataaatcacttatcgcttatgaaaatagactcgttgtcgttagctaaaagcgaggtcaacaattataaacttttggtataggtttggattatggaaaattagtcccactaagtgtttgatgaaattatcaagtgtgaaaaaatgtattttttgtcactttgagtgctcaaacacatgtaattttttcaaataccttgtttgattactcgtgtcattgaattgtgtttgtcttgattgaatgcttgacatgtcaccatgtaggagttctcatggtcgagaacttcaaatgaccaaatcccattattaaagtatcttgtcattgctctaagcatatagccccttatgatggactgttaccacgtcatcactagtgtcaatggtcatctccatgggcacgccattgtaccacgtaagtggaggttgcgtattatcaagcataaggttgcatgggcaactctgtctatttttccatgactttagaattacacatgagctccaccaaaaacaataaagacatttttttctctttttttgaatgtcttctcttagtttaataggccatgtcacattttccaataaaaaaataagtaatccccttcttgccataatttctttctcaggtcctaactttctttttgtttttgttaattcttaatttaagggaaagatttttctacatagatatttgaattgcacattagttgattttaagttgagtttttatttttcaaagatgaagtagtttattgatcttagtttaatttatgagtactggtactgttctttttagttccatattttatgtttaattagtattgcttgttaatttttggggtgattttcaggtgttgtgcattgtgttgtttctatatagttgcaatatagtttacttatcgatgatctaatatggattaggtgtattatgtgaatgttatgtttattagtttaagtatagttttagggcagttttattttggtttctatttttttatatgtatatattatgtttagttttgtttatttatatatgcaagattggaaatgtaacttttacctatctgattatttcaggtccaactgcatgttttatcttttaggttcaccattcatgaccttctttgttgtaacacttcaaacagacttttatttataagtttcacctacatgtttaagtataataatcaaatattaaacttaaatgaaatcgaaaaacaacgataacaaaattgtataacaactaagatgttagtaaggtaaccattggacaacgcgtaaacaacggactggcaactatgtatgaactatgtatttagatattgttaagaaaatatttaatcaattgtttttaaactgataaataaagacttgtagtttgaggttattttacaaacaatcaattgtaaaaacattgtaaatcaacatcaactcaactaacgttaaagtaagtgttggatattgaaggatattgaagcagtttgtaggtcctttctataaaaaggtactcaagagagtgcaagtcctggattggtagcttgggaaagtatctgtaaactaaaaaccaggtggtcttggatttagaaacatcagaaactggaatattgctgcaatgggaaggtatgtttgggatattgcaagtaagaaagattgcttattcgataagtggattcataaggtgtatttaaaagatgttagctggtgggattatgatccaccttcagattgttgttggtcatggaggaaaattgttggagtgaagaacaagctgaagcaaagtattgatcttgctggttttgtgcagcagagatataaaattcagcaaagttatcagcttctatttgaaaacaatgagaggctttcttggtctaagacagtttggggtaggttgatcccaagcacaagtttactctatggcttgtgttttaggaaagattaaacaccaaagagaggataagcaaatacaatacaagcatagacctgacatgcttattatgtgggcaagagaagaaatcgaacagccacttattctttgaatgtaagtatagcaggatcttcatgaaggagattaactcttggctgcagtggggaacgaggacaactagtatgcagcagctagcaaaaaacatcagcaagagcagagcattatcgactgctaggaaaagcattctgagaacaatccttgtcgggctggtgtatcacatttggaaagctagaaatgaagttctttggcatcaaaaactgtggcatacaaaggttatcacacaaagaatacaacatgaatgtaagctcaggattttgggactgtcaacccagctcaaagaagaagacaagcaatggattttgaggatctaactgtcatgtaaaaactgtaattactgaaatataattgctgtagggttgatatgtagaacttaaatgtggctgaaattaggataatagatagaatgttgtataattgttaaggtatagagctaaaagaagcatgatggaagtgtgatgtaaattgtaaagatttgtttgagcaatacaatgactcttattcatcaaaaaaaaaaaattaacctctccaagctactaagaactagaatttagggattttggtgtgagactccatttttaaggcacccaacaacttttagcaacaatcaatgggaagtaattttttttttttttggttcttatgtttagtttagaatgttattttcatgattgatttatgggttgttgttatttttttgttgttttgtgttgaaatggttgctgtctggtttgttctagttatttctgcattttttttgtctagtctgatggggcccgataggagcctgatgctagtctgatgggttacttagatctaaggtcagggatgatgacccgactggcccaattatgcctaatgctagttcgatggtcaacttagacctaacggtagggttgatgggcccgataggcccgatatatgatcaatgttagtctaggacctaaatctaggactgatgggtctaaatataggcctgatgggtctaatggtttgcttggacctaaatctgggattgatgggttcgattataggctcgatggtgtccgactgggtccgatgctttatagatttatggctttttaaggacctttttatcacttttctgttagatttttgttttaaatttgtaatggtgttttttttttttatttttgtgactggttcaactatttttacgtttgttatgtataatggtgtttgggagcttcagggtagagattggtttttaactgagccaaaaatttgacatttgagattgatacgaacgtaagctactcacatttagttgatcttttgtaagaagaactcaatgttgacaaagtgcagtatgacttaaaattgaaagtgaattacaagtacatcaaaagcttaattaatgtatctatcgccctcctgaaattatttattgattggaaatgataagcgtgtaaggttatttttgtctatgcttgccaaaaaaaaaaaccagatgaatttgttccattgtttgtgactttagaagaagaagaatgtttgtatcgatcctagtcccacaccaagtactgttaaggatactcgtagaaaggttgggagttttatcccataaacaaatccagaggtgttagtggtcgatgtgttacctaaattatagactatgatgccgacaactgacattatagcacaaatgccctttcatgatgattttatgatggttcagaccctaaatagtatgttgaaggcaatgatgatgtaagagacaaccaaaatacagaggtccctattgttgtagctttgaacttgactccactatcgtaccaaatactccctaggcaaccgacacagaaaagaatgccccatagaaaaaatcgccaaatacctggtactagagtagtcttctagatggcgctaggggaaccattgatgctagaagtcctagtgatggtagaagaactagtgaagttggaggaactactgacggtagaggtcctaatgatgttagagggaccaatgatactagatttagcaatccattttcttctttgacaagttacggtaaattcaaggagaaaatatttataaaagaagacatcgagtatcatacctatgggtggcacaccaggtggagagttacatctaggagaggttttagagacaaagatcatttaaagatggttgttggcttgtatgcaatgaagaaagggttcgactacttcgtaaggaagtctggtactgttgtttggtacgttacatgtaaggatacaaattgtaggtggagattaagagcgaagaagaacgtactttctaacatgtttgaggtgactaaatttcaaaatgtacataaatgttcccttaatttcaaggaaagataactgtgaagtatcacctttgatagttgcccacctaattaatgataaattcgcaactgacggctcagatcatttggccactgatataaggaaatatatgcacaaggattttgggatccaatgagttatgaaaaggcttggagatgtagagagaaggcactacacctagttcgacatacacttgaagattcatactcaaaattacctggttacttgcacatgctaaagttgagaaatccaagtaccataacggattttgtggtagagcgtggtcgcttcaagtatcgtttcttctctctgggtccttgtaggcgtgggtttaggtttggtcggcctgttgtatgcgttgatgggtctttcttaaagactaggtgtggtgggcaaatattgtgtgcagtggcactagatgcaggcaaccacattttttcgatagctttcgcggtagttgatagtaaaaaccaaaactcttaaacctattttatgagaaaattgaaagaagcggttggtgatgttaagaacttagccttcatatcagataggcatcaaagcattgttcatgctttagagctcgtgttccttaatatacaccacggtgcatgctaccaccatattactatgagcgtcaaccacaagttcaagactggcgtcttcacgaattatatgtacacatgtgcctacacatattcaaaaatagagtttcaaagataatttgaaaagatttagacaatgaatgttgtggttgcattatatcataaggaaattggatttgagaaatagattcgatcgtactttccaggggtatgttacaatgtcatgacgagtaactgggctgagagcttcaacaacacaactaaggatgcaagagagtttttgatcactgcttgtgtagcattcctgaggtctaaagtccaacagtagtttgctacgcaaaacgaaaaagctgacaagtggacgaagaccctagcactaaaaatggaggaggacttggcattgcgatttgagaaatctcggtatttgaacgttgacacatgtgaaccttacacattgaatgtccaccctggaggatcaattgagattggtgtcatagtggacttgtaagaacaaacttgcacttgcggcttgttccaaatcatgaagtttccttgtcctcatgcatgtactgcagctcaacaataacgtattagcatgtacacactatgctcaccatattacacaacaaaatattggaggagcacatatgaaggcacaattatgccagtttatgacgaggatgattcgaagttgcctgatgacataaagaacatgacagttggagtgcttgttgagaagaaaccagtagggcgactcaaggtttgaagaattaagtcaaactgaactgcttgtaatggtgaaaggattgtgataaaatgaatatgtagcaagtgtggtggcaagggcacaatagaaagtcttgcagctactgatgttaaaaatgaatgttaaatttagtcatattattatgtgttgtactattatgtattcttgttgaattattattggactttgttaaacattatcatttgtggcataaacaggttttcatatagctcctgtaaatttttgtatgtaaaatatcactagcccgatgtaggtcaaatgcacccgatgttggtccgatttgatttctggacatcctttgaggacctatcggaccatatatcggacctagactaaaactataaatttctcaagactatagggctctaaattgggtactacatcggacccatcaggctcatactgcattttataatttggaaatagcattggacactgtattgggcctgattagtggttaaaaatacacttttatttattttaaatgataaaataaattgagttttaattgatattttcatgaaattattgtaatatattttataaatga

SEQ ID NO: 42894 - DNA, 3998 bp, Cannabis sativa
acttataaaaaaatacaataaaagaataaaaaataccgcctgacagtatttttgtaaaaaaatggcaaaaattagtataccatgtaaatttcccttctatcagtaaatggtctggagaaaacaaagggaaaattgaaagaaagtttacaataatatatttgatgttatttcctttttttttttttataatttttgctgtgtttttaagtaattttttggttactattagtattgataataaacaattagttactttatatgaaaactttattttcgtatcatataaaataatttgagaaaaaaaaatattaaattatcaatcagaaaatgaaatgtatattaaatatatagtaggaatgtgaactaaaaagtggtagttttttgtgaacattatgaggtacttctcaattaaaatttctaaaacttgcataatcatgtaattttcaggaatcgattacaaagcccaataggcctgaaatgagcaaatacctacgaatgaagttccccactttttgtatcgacagcgagtggtgtactgtttgtgtttgagaaaacctggagagaaaaaaagaaggaagaaatggcttccaaaggaaacatcaatctcagtagaaacaaattgatactctcagctctctctatacaactttctttagattctgtaagcttttttttttttctttcatttctttagattatctattttatatatatatatatttttttttcattttccgtgctttaaaatttcgctcgattgatactcgtggtttgtaaagttcggggaactgggtttcttttttgtagtctgattattcagaaactgtaacttagtttctcattagcttgaatttcattaggtgggtgtttttgacttactgttacaatggctcatttgttagtgttttaacgatttcatgcgtgtcaatgaaatgggaaatttctagtatcatgaaatattattcaagtttaaatgttggcaaggttatatgtgtgtgtacattaaattggtctgttgtcaacaggttttgcttttcagttacagtgtaccattgtttcactgtcacaaagtaaatgttaacttcaaatggccgtgtaatggtatagatgcagcatgtttataccgtgaaatgtacaatggacagttacaaccttacgtttcaccttgtttttggcatatagttgatcaactttcaatatgtctctgcagaatcaattttcaagcgatgttgtcgaaaatgatatcaagagcatgtacaatatcttgaaatcatcaaaaaatgagaggcctactgaaaacaatgaccaggttatatgaattctttgttgcattgatcacttttttattgttgcattgaacaataatatttttgtcatgttaatcattatgtatcgttcaatttctgattttagatgacaaagtggatagcatttgcggagagtttccctacagaatccagtgcttgctttgaagttctcaaaggattaaatgaagacctggttctaaaatctgtgcttttgggaaatggattgaaaccctctgaagctgatgttattgttttttcagtgatacattcttctgtggtatgcatattattaagtagttgctaagatgcataagcgttacttaaatgtttttgactttgattgtaacttttttgacagattgagctttcgaaatcagataaagaaaagttgccacatcttatgagatggatagattacatccaagtaggtcacattctgatcactatatggggcatataaaattaagttttgtagtgttggttttctctgtacatactattcttaatttgatctcatgtttcacctgtttgttttagttacttctagtgtttacacttttgtgtttagtattcatttctagtaatgcattgggtattaactattcataaactcaatgctatttgttttcttctttcactttccttcagagcaaggtggatttggggaatgtattcaagaagattctgcatgagaagaccccatttgagcctcatgtgcgtaagcattgacttattgatcttcattttcataacctatatatttttatactgcagaacagttgaggattgtattgtgcatatgaactcatgtgagtttagtgtgattattattatgaattttgaaagttggaagtgaatgaactaaactttgtcatgatgactgtgcaagagagaacctttttcattttttctttctttcaaaaaggatatatcccttgagcaaaattgtgtcccacttagcaagcaatccaccatcctcactttcatttttaatatatatgtatatgtgtgtattaatattagtttcacagttgcacttacagggaaccaaggctgctgacaaggtggaagtagaatcaggtgccaaaaaagttgcagaaagccctaaagttgcagataagccagaagcagaagtgaaaacaaagaaaagtgaagatcctaaggcaaagaaaagtgataatgcggtaaatgtctttcagaagattattttgtaaaagtcaaaacttctggcttggtagcaacagaagctattttagttcatttaatttgtacaaaatgtttagcaaatgaaatggaaaaaaaaggtgcaagataaatcttgcagagtaacttatggctacatttgaggatttaagatattaagtaaagggttgattggatgcatttcctatgttacttttaaaatctgggacttgttagagctaaatataaaattcatatgtgtgatactttcatgaaaaagtatgcaccatatggttctctaatatactagcactggagtgttgatggtaacttggaaaacttatattagctttaaagatttaatctggataacattttatgatttgtttctcttcagtttaaatatttaggaggaaaacagttttttttttttagcactttcatttgtgtgtgatgttgttgataatttgactgttttatcagattggtttgtcttgtccttaatgtatatataaaatgtgtttctgtaaataatgcccattagatttcaattgctatctttgtgcattttttttatcatcgtgctgctttcctctaaaatgttatagaactcgaattagaaaatagcagcaggaaatgaaagtagttgtatcaccgaatggaagtagtgttagtatttattattaaaatctgataattgtattatactcttttgctaatattcttttgggatattaacataaacagaagaaggcaacaggaaataaggaagcttccaaggagaagaaaaaagcacctgaggcggaaacagttgagaaagacaaagaagtcagtgttagtttgttgaatataaaagttggtctgatttctaaagcatggaaacatccgtccgctgataggtatgtcgatttttttacttctccttgttaacttttgacagttactactcaaaagcctatcatgattgcttgaaatattgaagtgtatgataaaaccgagaacagttccaaaatagatattatattattgaacgccaaaatgactacagtaaccagccaaaaattcaagtcacggcactcttccaaggagcatcagctctgaaaactcaatcataccctttcctaatttcctcctccatatatatatttatatccttactaggggcaaatgacatgcgaggcatgtgattagggttttttatatatcttacctattatatatagtttaagaaaataattacatgggactgaagagacttaagagtaattatggtaatagttagttaataatatactaatattatttattgggtttgtaaagattgatgaagtattaaaattgataaagaggatatggctgaaaatacttattgagagagaaaataaaaaaaaataaagttatttttaattttgtctaattattaattaatttattctaatattattttctatactatatcagtatctttgaattaatgttgagttgtttaatttaccatgcacacaaatt

SEQ ID NO: 42895 - DNA, 2503 bp, Cannabis sativa
agcggtggcaaccatgtggaagagctctgcctcatcggaaggagccatcacaaccatgtttgggaggcatgccatgaaagttacatcaaaagcaccacaatgtgtagggccgtcggccccaacaagtcctctgtccattgcaaatctcactggcaacttctgcaaatcaacatcatgtactacctgtggcataaacccagaagtttttaacataaatatgccaatttactacaatgcaagcaatgatggaaatggaagaaacctttgacttgcctgatcataggctcgctgcatgaaagatgagtaaattgcacaaaacggcttaaggccctcacaagccaaaccagcagcgaaagtaacagcatgctgttctgctatcccaacatcaaaacatcttgttggaaaacggcgaaggaagagattcaagcctgttccaccacccattgcagcatggatggccacaacatctttgtctgcctctgcttctgcaaccaaagcctcagcaaagtatgtagtgtatgactgtgtgttagaagtgcctttgaattgctttccagttgctggatcaaacttggccacccctgcagccatatatgcaagtgttatctaattaatattatattccttcatacttcaatctaaaagatagattcagcaattatagtggagtgtatatgtaccatgatacttatcagcagctttctctgcatatggatatcctcttcctttctcagtgatgcaatggatcaagactggacctgttgttttagtgctcttaacctcctctagtatggaaacaagatcatctatattgtgaccatcaactggaccaatataatagagtccaagctcctcaaacaatgttgagccagaaccacttatcattccacgagcatattcatcaacttttgcagccaattcatgtactgatccacctatttgtttagtaactccctaaaaaaatattgttcagaaacaagtcagtttagattcaatcatttgatgatagaattgcctcacaatattcgattctatcgattacttaccttggctacttctcttagttctctaagaggcctgtttgattgcagcctactgagagcactactcaaagctccaacaggtggtatgggcccatcaagagaggcagtaggtaaagaaacctgtttattgtcgttaagaataataatcatgtcggaatcaaggtacccggcattattcatggcttcataagcttgacctgctgtcatggcaccatcacctatgacagccacaacattattctttcttcctttaagatcccttccaacagccattcctacaccaagatgaagaaatttaacatatgatattagtagctaacttaaaataagatgagttaatattatctatgtatgcctataaaatcagaaagaattttcaccatatcatgtggtattcacaaacaaatacaaaaaattcaaaagataaagctatcatggaatagtaaaaattattgtaacctttccatatactgtatcattcttatctaaagttattgtaaccttttgagagtgaaattaaatcaaaggttctttaatgcatagatgagaccaaaaaattacccaagccagctgagatggtggtagaactatgaccagtcccaaaacaatcatattcactctcagaccgcttagtgaatccggctaacccgttggtctgcctcatggtgtgcatcttatctcttcttccagtcagaattttatgagggtaagactacaaaatcaataaaaagtcagtcatatttaaaaaaacatacctcttcttcttcctccacttttttttccttttcttttttcttttcaatacttctttatggaaacacatagagtgagattgaaacctgatgaccaacatcccatagtatcctatcctgaggagtattgaagacaaaatgaagagccacagtaagctcaacaacaccaaggcttgagcccaggtgacccccggtgttagaaacgttgaagatgacatcagaccttagttcatctgatagttgtttaagctcctggaattaggataaaaatattcgtaaaaatcttatgtaagatactaagtattaaagctgttcttggtgttatataaaacacttcaaagaaggggaaaaagaaaaagaaaatcatacttgagttgcttaagaactatagataggcctctgaggcatcagtttataccttaacagagagatttttcatatgaattggataatttatggtgtccaatagaggagttggtggtctccttgagtgatattctccactttctgacagtgatgcataaaccccactttgtattttcctgacctgctaaacaaatccaaacaaaaaagccataactttcagtaacttctttttcttttcttttttattttttggtagatataatgagattccaaattaattttcttttatatatttcattttggatttatgtaagcatgctttacccagaaaacataaacaaa

SEQ ID NO: 42896 - DNA, 1290 bp, Cannabis sativa
actggttgaactatcatatcaacatccatgacactcggtcaacaaaccaagtaattcaattgaaatcaattctttttatctccaatttcttacacaacattcattgaccatcattatagctagagtataatgcatcctttgattattatatcagagaataagcaaacatgctacgggatttgcatactagaatccaaaatcatcacttttactacctaaaatctacataaaggctcaaaaagtacaaattaacagaaaaatgaaacttgaatacattcaaaacaaatagacacatttataacatatattacacaataaaacttttagattagaaaaaaaaaaataaataaataaataaaggcaccaaccatgggagtgttgataatgtatagtagaggcaagaaaaaagtagaggcgtaaatggcataaaaggaagcatcataagatgcttggactagggtagacaatcaacaactaactaagtagacctaagtaatgatgataagcataatgcaccctttgattatttgacatgaccacacagacttataaaaatatataagaagacctaagtaatgatgataagatcaattcttcacctagcattttgttctgttccatgatagttgagaaccatgtgttgttaacagctcctgcaacataaatcatcaaatgtgattattccacaaagcaaagaactcaaatcaaattcttagaggcactgagttatatctatctatataatagaagcatgaataacctcgtcgatgattttttgtcttcttgtaattagttatatgcatatctattatgtatgttatgatgaggcctaattatttcacacctcgacccagcataatagtgtcacccagattctctccatcaataaagtttggcccaattcatttcgttacttttttgagcaatttttcccactatatatctcatgcacaaaaatatcatattaacgtaaagaatgtggttagccctaacatgtaaagttcatcgtcacgagacgagctcgactcaatgtactgtaagtattagtcaatacgttcatgttaattttacatatcttatgttgcgttattgtgtgtacgaatttagtttgactagaaattttctttgtgtttagaagaatatgtcttaaaattttatgggtaggattcgatcaatggaatattttcgaaaaataaaaattaaggaaataattcaaggtattgctatattacgtaatttaagtttgatttttgataagttgtacttactttcatttaaaaaaaaaaaaaa

SEQ ID NO: 42897 - DNA, 1513 bp, Cannabis sativa
acaaatgcaaaatttactgtcaaaatttcaaagcttttcctagcaaccgacgaaaagaaagagcctttttcccagcaataataaaacacaatagaccacttcataggaaataccttctcttccatttctcatgactaagcagatttcgggtaataaaaattccagccagctccatctgtatcgacaatctctatcagctttatctttatcggtaatctacgacaacctccatcttggcaatgtgaagaaggtaaaaatttcaattttattgctttttgttttgattatttggaattttaatttgcttttgtttttactttttttgtttgtttgattttgatttacatgtttatcggcattcttcatcagcaacataaaattttaggtgccttgtttttttaatggggttgtactcctttctttgatgtctcatcttccacaacatctcgaacacatgaaactatgtctacttttctttcttttttttttttagaaaagatcggttatcataaatcaaagaatatcttttacaacaacagaaaagatagccgaaggaattttctcaagccaaatacaaatattatcctacattaaagcatgtttcgctaatccatgagcagcttgattagcatctcttctaacatgacgaacacaaactaaaagaaaattggataaatgttgatgaatatctgcagccgaatcatgaaagtgagacttaatggttgttggattgttaatagcattagcaagaagcaaagaatcggtttcaataagatccaattgtatattcatattctgagctaaaagaagaccatgaaacatggccttaacttccatttcttgtggccgatagcgaccccgcactaacttagacataactgctttgacacacccagatgaatctcgaataatgataccaaaaccaattttgttgttagatgaatcataggctgcattattgttcattttgaggcagtccagaggagaagctcgccatttaattggagttgcatctccaccaggatgacaagctacaacaccagaggaagagaaatttgcaccatctgcaaatggaatatctgcaacaccagcagaaaagcattctacaccagcagcagaaggaaaatctgccacaccagcaggaggagtaccagaaacactaggaagactatttccagtgtcaccagtagcataattaccagtaacagagtgtattgaagcagcagccttatgataactgataagataagctaatgccttagaatggatttgtaaagaccgcttagtttcaatttataattagcagataattagggtttaattatgaaactagaatattaattatgatttatcattttatagagatttatttgaattcgggatgtattatttatactatatatgaaattttacgttttttatgttttgtgtcccgcaacattggaacgcggcgtttggtcattagaatcacattttagtaattttgtagttgcggggcaatatagttagacat

SEQ ID NO: 42898 - DNA, 2785 bp, Cannabis sativa
  modified_base (57)..(62): a, c, t, g, unknown or other
  modified_base (502)..(507): a, c, t, g, unknown or other
  modified_base (2029)..(2029): a, c, t, g, unknown or other
ttacgaaatttttacatgaaaataattttattttcgttttgaaaatattttatttgnnnnnnttgtgaaaaattaagcaatttttatttttatggaactcgattccgatggaaaacgaaggggatatgacaatttgaaaatcggggtccatttggtgtcgagggtggtgctcatgcgcgccagaccctcgacaagaagacctcccgcacgcgaattctcagacatctcccttgtctgaaggcatgtcacgcccgtgtcatcagacaagagatgttgcgtgcacgccgagggtcaccctgcacctgaccaaggtttctcggtgaaggaggcagcagctccttcatttcgcacgggcatgaatagcttggctgcacgtgcagccttgcttccaaccatcacccaattttgcgatttttgtgggattttccccaaatttcaaattttgcaatttttaaatcctaatttcaaaataaaatatattttttaatatatttaaacttannnnnnaattttaaattaataatatttaaggcaaggaagaggtctgagagattgccagggaagggaaggacgagggcaagaaaggccaatcctaaggctccaagcacagaagacttgtctacttccatcatcgatctaaccaaacttatttcgatcatggaacccttgcaatatgttctttgggagatcactggaggggataactctcattgcgatgggtcggtcatgatcaataagaaattgcctgattcctcaaatggtggagccaacaaaaagatgaggatagacaccaaggaaaatgtcttacaattggtagctttgaggcggaaggctgtggtagctcaatctcagaagggatctaattcttctgatgggggaagaccacccacaaggagtaccagatcatccaaggacaattaagatcagcctctgccacccccagcgcctaaagttattcctgctactgccactcaactattggttggagaaattttgtagaggcaatctttattttcttagcagtataattatcaataatagacccttacctaatgatttattctactgcagtgaagactagatcttggtgaccagtttaaccaaactattgacaatgaaaattcacaaatcacagcaataatgaaatgtattgaatttagtgttagttcttctagtactacaacgatatggagtatcttctagcactactgaaaaattttctatttctcaattatcatgttttttcattagtttggttgatatataagtctacaacttgtaaatttttttgacataatatgtcttcaataagtttatatgtatacttattgttgatctaaatatcttatgtagctctgacatttttttttactgttttgttgaaacatgttgatcaatacatttttagtgttcataaatttctcttgctcatgctcctttatcaagttaaaatgtttgtcataaaggttatgacaactctatgtagataagtcaatcacttttcaccatgtcattaattgaaattagtacaaaagtgaaaagtgaatctcaaaataattttgctaaaatgatgattttctattatatttttgttatatactttgtaagttttgagagctcatgtatttcatatggaaaatgaactccaaactcctctattatcatttttggtgaaaaaaaccctacactttctctactttttaatttagaattattacataaaaaatataaatttacactttatttacaaaaatacttctacaaggtatggacaatatttataccttttatatgattttaattaccaaaataccaattacactatcacttacacaatcagacgatggttacaggatagttgatgcgtggttgcgtggtgattacatcagacaaaggtttcaatcaaacgatggttgcactgtggttgctgggtggttggccgaaccttgcatcaaatgaaggtttcaatcagacgaaagtttctgggtagttggtgggtggttggtcgaaggttgcattagacgaaggnttcaatcagacgaaataattgttaacaaaatatttattctactgtaatgcaactattgtgaaatattataaatcagaacagtatttccacgtacgttacagtttctacatgtctctttatgatttaatttggaaaataacgaaaatacacaacgataaatattttactgtaggattgatgtaatttttttggattatacttaagttggattatttggaaactccagttcaactttttgagatctgcctttcatggatctgaatattgaagccacaacattagttttatagaaattaaactagattttcagttgaattatagttttgtagtagtttttcaatattttttttatgaatttgaaacagtccctgttttgattgattctggttatcttctcaggtgaagtcactggaattaatagtggttctctttctggttcaattttggttttagttgcgttgggttgctgcgtggttgcgcgatagtagcccaagaagcatagatattgagttggtggtgtgtgtaagtggaatttgtgtaaaaaaattttattgggcagtatatttgtttatttggccagctgaaagtatttttgtaatatttttattttttttggttaaaactgaaaaaaggaactcgtttgatattaacatgaaatgagcaaatttaaaactcaaataaaaaatataatatgttataaaaataaattaaatatacgtgcattgcacgtaacttcaatctagtatatatatatat

SEQ ID NO: 42899 - DNA, 1433 bp, Cannabis sativa
aaaaaaaaaaattacatatttgattaaaaatattatgtggggttggattaaaaagttcattttttaccttgatatgtgttgttccatgaaatctcctatggaagtagcagagtaaggcttcaaataaccaatggtttcaccaagaaaaggccaacccatatcccctggtggaagattaaacctcttttgctttcttttaatgagaataaagaacaagaatagagctaaaattgatggtaaaagacataaaactagctctgagtcagacattgaacaacctgactgactcttcttcctcttcttctctcttcttcttcttcttctccttcttcttttttatattaaataataataataaaaaaagaatgatttttgttgtgaattttggtttgctgtcttatggagaaatggaataagatatgtgtttgtgtgttttggggaagtgagttcttctgctacacttgttaaaaagtagctcccattttcgacctttataaaatccactcattcactctcttctctacctcgagagatgatttcgatgaaaacaaatttaaacataaaaattaaaaaaatataaatatataattgtatctatgaaagagaaagaagggaaagccaataagcttgatttcgtaagttcttttttcagtttttgctcagaacgtaataaggagtttggattatcggttggtcatatatctcacagaaccacgctgttttatattagaaaattacaaagttgcttttttatttttatttcggaaaattttagggcaccacttttggcttatgacaggtgtctttattcctttgtatttttattttaatatatttttaatttttagaaaacttttaataatttattacgctaaaaattaagttaacacattcaaattatacatatttgtatttttgtacgcatgcaattaacacgaatactgttgttgtggacaattgctagtgtaagtgatgtggttattcggctagattgtatcttaaataatagaaaaatgctcaaactatggatcattttgcacctttgttgattattggtgtggcacaagatggtgctaaagtttataaggtgagacctcaataaatcaaattaagattaatattaatgttgcgttgcttgctaatactcttcaatttggttttagaatggtagttcgtgatcatatggggcttctaattgaagctatgagagtgtgtttttgtggagatgtggcattaatttgagctacttgagattaagggtatccatgaggtattctgaattttaaaaaaactaattacttttactgaaaaatatatttttataaataaaaaatttcaatgtataaaagtgaaattttttctatattgacgtatttttgtaaaaaaaatttaaatttttaacatatgtaaaagtttttatatataatttttag

SEQ ID NO: 42900 - DNA, 3720 bp, Cannabis sativa
atgtcaagactttgaccgcttggatttgttagttatgttagttaaatttctattatgactgtcttgtctagttgtcaagtctagagtagagctcacctatataaccaaccacttaggtaaattgttagtcggttagttagagctagattgtgagtagagagagagagagagagagagatgtggtgagatcaagagattgagagagagatttctccgagtgttggaggttggattattgcagtagtgttattgtcaaggcctgctcctggtttgtaatccatctgagacatcatcaatggctaaaaactgaaacctctttaattcattgtgtttattttaattttatgttcttactatgtttaatgatttgttcttgacattgaaaatgtcttagtgttgtttgtgcaagttgatgagattggaattagaactgtgatcctaacaattgacacaaagttaccaagttgctttgaacttgtatttgcttatatgttccttatcatttagctataccaaacaaagattatactacacaactttcaaacgaacaatgatagtgtaaattcatgttttactacattaacttgtaaaaggcaagtgtataaaaaaatactaaacacacatcaatccactttcaagtttaaaccaatcccccaaagaaaaaaaaaaaataaaagggtgaaagaaattttcgttctttcttacacacacagactgaaaaacttgcaagttgcaatacaatcctttctatacataggaaaagcccccactttaaaaaaacactgaagacaaacccatcaattgtgacaatcatcttgtccagccaagttttagtagcagaacgattatatgacctcagtcaaactgatctcttccactgatgcagccccctacatagaatagaagaatgtttaaggttgcatgtacaagccaactcagtgacaaagagagccaacgtaagagcctcaaagaaaagaactatttcaaacaaagttgaacatttaatccaaaagtttgaagtgatttaccatattttctttgttctcttgcagtgcattctctgggcgagtaggactaactgaacctgcaatcacatacgagcattaagaactatgtacagtcacatgctactcccaaacttaaggaagaaggaagacataccttctttatcagcaagtttctttccctttttcttcatcagatccttttcttttttgacttcttgcttaattggtttctggggtttcttagtggacttattattattggctccagtggcagtaagagatctcgtgtttgccaagtcttttgccacagatcccctagttctgcttgtggggttggatttctgagtagtgttctttttggttgaacctgcaactggggaaacttgagcagcatcaatgttcaacgcctttagtttcagttcctggttccttgtactcacaatggaagacgtgctccgggtttcatcatcagaggagcggcttccttcttcaggtacctgagaaatggactcagacacctgcaactgcgctgaactttctacaatattatagctcccgaacaattcctttaaaggctctccaagttcatcatctaggtcatgacggcgtgcataggatgcaagctcatctttcactcgttgaagaggctatgaaatcacgtaagagagaaaagaaaaattgaacggggtcaaaattaactcgagcatttgaaatcgggacaatatgcatagaaaatagaacaacaactaagacaatctacaacatgatactaatataaacgtcgtaaaacaaaactggtcaaagttacaactttatgtacctcacatcctgcctccaaggctagcttgaaaaacccaagtgaaattgagtgcttgttggaagattcggagagtttaatctgagaaagccaataagaggctgaggacagaacactgaacttctttcggcttgttgatcttgttaaaaatggtgtttctgttctcttctgaatattttcagacctcttcattttaacctctgcaattggagtgatactgctcgctagtcttggggctggacttgcagaagacttggctggaatagaaagcctcctaggtggcttagcagacttgtccttgccggagagatcaagaacactaacacttttgcttacactcgatgtaactctcatccttaatataataacaataagcacgtctccatcaaaagataaaacgatatgaagaaccgaaaccaggtaaaagcaacaaacgaaagattcaaaataatataatccagtccatgtcgtctcataacatttcatgcacaggaaaattcaatggtttttatatatatgatttcaaacatgcttctaaattctgcgaagagaaaaaattcaagtttcatttatttcattacaaataacatagcaaaaatcataatttttagttcttacaatctgagttccagccttgatcggtgtggtttacttttattaaaagacaatttgcactcatatcattttgaattgatgatatcaaactttatgaactttctatcaaaactaccaaattcaaaattctattaaaaaaaaaacctcaaacaactactacaaactcaattacttcgtagttcgtagatcatacaaacaattacaaaaatacagaattcaaaaaaaaaaaattattaattgaaaataagcagaaagtacctcttagtggaggagttggggatttcagaactcgaaggcttttcctccttcgttttagtccccgatcgcaacgcgtaacgaagaagcttggatttgccattgttccctaaaacacagaataaaaaaaaaccaaaaataaataaaataaaataaattcataaaatcaaaaccaaagcagcagaaagaaaagttacccgattgaaaagtttgagcgtcctccataattgagagatcagatgattcagatctttctacgtcgttggtgatttttgcttctgaaattggaattattaaaaataacggtaatctctataatttgattggattaaagtgaactgaaatgaaattctcgtatttataatggagttgctatatgttaataaataacttcttacacaaaagaagagcaaagcaaagactattattcttggtcttttgggcgggagatggcctaagtggaccctacaaagttaaaaactcaaattttttggttaaaaaaaaaaaagaaaaaacttaaattcattgccacgcgcccccatagtgaaaaaaaaaacaaaaacagattaaaaatattgtcagaaaagaagaagaagaaatatgaatgggtgtggtgagctggttgatctcaattttcttaactacattgaccataattggatggtcaatattttttattaaatggaatataatatattttttaatgggaaaaaatgtgatcgatgtaataataaatatgtaatacggaaattggacttatcttaactagaataagtggggtgggtggatgacacgtggcagggattgagagtgggttgcctttgagcatgtgtctgactctgagtgagatcatgatcatgattcggcactcttcaacggctggcgctgctatgtgggacccacatattgtgtatgttatgaagaaaagaaggaaaataaaatttaaaaaaaaaaaactctgataaaattcgaaattcgaatttcaaatcgagtaccgttgagactgcttttgcggttttaagatgg

SEQ ID NO: 42901 - DNA, 5508 bp, Cannabis sativa
aagtttcaatttctgggtgcttgttgtgcttgtagttatagctgtttgagctgcaaacactattttcttgttgaatgaaacatggttgaaatctttaaaatttggtttctatcttcttcttcatttttgattgatgtgggcaaaggggaaatgagatatgaaaaggaaagttcagtgggaatattggttttcgtttgagttgagattggagaatatgttcttgactttaacaatgggaaattatgatacttcataatggtataagagtcttatgatttcttagatttgcaggtataaagaaagacgctgggatctcaagcaacttgttgggtctggtggaatgccatcatctcattctgcaactgttactgctcttgcagctgccattggtttccaagaaggctttggaggatcggtgtttgctattgcattgatcttagcgtgtgttgtatgtcctcttgtccctacattttattgtcattcgcaaagaactcatacaaatgaaaatagttcattatataatttaaaagagttgaactctaatttctggaggaaacattatggttccatacttcttgtcatctatgatcagggcttataattctcctgttttttataagatagttcatgttctgttcttgtagggagatctttaatgtaagatgcttgttgcaggtcatgtatgatgccactggtgtaagactacatgctggacgccaagcagaggttcgataatttttcttctctcattttcttttccagcctctgtagtctgtgttgtattgctatttctttctgttcatcagtctctcttttgaggctttgtctagaattcagagttttagaagctttggtttcaagtgtttgcaagttatctgttagctttgtaaagcttctcgtggtttgaattggttttatataaccattatgtatttattgcaggttttgaatcaaattgtttatgaacttcctgctgagcatcctctagctgagagcagaccacttcgtgaacttctaggtcacacccctccgcaggttcgctatattgtttcctaaacttgattataattagaagcacacaaagattatgagaaagtattcttatacattaagtatgcagacattgattagctccagaccattaaattttatcttactattacacactcactggctaaaataaattaatattcattaaactaataatgcatttaatggttataggagctcttagtagtgttcttacttttgatggattttgtctcaaatatattacaactacttctggttcattacttctacactgttagtattttttagtgtctaaaattcctgtgttctgaacaatcttttggcttcatagtcacatgatggattgtaggacttcttatatttatgcctatactatagtttcatagataaatgatgcaataaagttttttttgttctttttgataaagatgtaataaaacctttttgccttgtgactttacagccttgttggttgatcatcaacatggattttaatggcattgtatcatttgcaggttgttgctggtggattgcttggaattgccacaggatctatgggtcatttgcttatggttttgactggccatgcttgatgacaaataatataccatttagtagcatctttcatggatggatcttcacgagtcttttggacaatacaactcaaagaatcataacaaaacatacatggtttgttcaggtttaattaggaaaccccctttttgtccattttatagcacattcttgggtcagaactgttctttacttgtacaaaaaactagaattgctcattggtaaatgtaattccattaatttctggcttatgctcaatccatttactaactaacttaaatgcctgcaatatgtgatcaaagcaaatggtaagcaaaaacatcagggtaaaaaaatatatattaaatttttatttgattttcgaaagtcaacaatacaaaaatattgcctatgagtgtcgggaaattcagttgacactaagaacagcagaaaaaacccttttcatttcctttacaggattcccaacaagtcctgatttcacacgccaggagatgtgatcatcaggcctaacaaggatggctcctttgtcagtcatcttgcataaatcccaccatgaaggcgaagtaggtgacatccttgtctcgagaacatctatgtaattctcccaaggtgccataaacgccttacttcctacttcaactccttcggtactatcagcagaccagagcacacatactcttacaggcaccttgaattcctcagccacctctaatgtagcacgagcaagatggtacgatgactcggtaggtgctataatgagaagaaactcaactttgtctccggaaataagatctagtgttgaaattatttcctacataattttatgacatatcttaaagagtcaaactttggaatagtcaagtggttatggaaacagaattgataacaagcaaactaataagcagcttaccttactagaggaatttgataacacccttacattcatatggggcagcttgcaccctggatctgcagttggaatataatctctccggcgtccagtaggtgcttcaggagtccccggcatgccatcactgtcgggaacaagtgctccttcaacgtacctaaacaccagtgtctagaatgagaaactattgaaaagatgtttgttcagttgatgattataagtggtagataggtggatgatattgttaaagttatttagtttcatagaaagtcattaagtatgatacctgaaaccaagatcctctgcagggaactggagttgaaggctctttccttcatcaaatatttgtcttagcttagcaagccttgaatgaccaagtgggttcttttcattcaaaagatattctgagagctgtgcacggcctattgcaaatattccgtccaaaattgccctctgtattccagatggcaaaacagcaccaactccattgataacatggtggactgcaatcaagagtaaaacaaatagatacagttttctaaagagaaagctataatgattattaacaatgctgcatataaaaggctattggttgctttggtttacctgagtttgcaacagtaggatcaagaccaagtgcagcaggaactgccatggctgctttgaagttttgaacgctaagcttcgtgttgagaatggcaatctaacattaacagataacaatgtatgtaggaaactttaatattggatttaggaaatcaaaaggtatgaacaatacaagtgaaaaagataaaccaataccggcctacgttctgtttcataagtattaagcattgaaatcggtgcaataccctttaatacagaagctattttccaggcaagattatgagaatcctgaattccagtgttcattcctgcaaaaaaatcatgggctctgagtgttattaataaaatagtcgatagggcttcgaaaataaattaactgatcttccattaagtacaacattagcaactaagctacaatgtcaaaatcaatacttgatccatgctatgtaagtaggatttcatactcaacttttaaccaaacaacttaccaaatcccccagcaggagggaaacgatgagcagcatcaccagcaagcaatatcctcttgtcatgacttagaaacttctcagccacttcagcatgcataacccatggctttatatcaaccacatctaggtctctgagctttcgaccaactaatttaagaattaactcctcacacatctagaagaatttgatttaaaaaaaaaataactatcaaaataaagtatgtttcatttcaagcccataatatgacatgaccattcccttttctcatacttcaatccaataaacacccttgattcaagcaaaactttcatagagtatcatacaactaatattttattagacaaaccatctctaatgttaaggagtaccttaggactgaaatcttgaaagttctgctgaggtggatagaatggtatctgcaagaacatgagataattataacatttgtaaatttatagtaagaatgcttttctaaaatatatccatttagaatatggggtacctggaaaacaaattcaccttcattgagatcatgagcaacaaggaccccaatggcttcagtattgaaaatgaaaaacagcataccaggtctctcactaagcaagtattgtccaaggtctttgctcataaaatggacactaataagcttttgcaactctctttcacctttcatatctattcccacaagcctacgtacagtacttccagcaccatctgcaccaacaaggatattacacttgatttcttcctccactaactttccatccttgacacaagaagcagttacagtaacatagtcattattagcatcaatggctaaacactcatgccccatcaatatttgcctttccctaatgatcccatggttaaggccttccaatccttccaatccaccaacccggaattgaagattctcaagctgcttaagtagtaaccttgacaatttatactgggagaagtgtgcaacagataccgggctaataactcgctcaaaatctggtgataatgtttaaaacacaacagacatgttcagtatcattaaaatgttcacattttctgtaagaatgcaatgatatttaaaagctacaactatcaagaccttagaataaatgtcatgttggccaatatctgaaatctaataactaacacttaatgtgtcaatatttaaaagttatagaatcaactcagcaccttgaggtttcatatggtcaactgagccaagaattgaaccagaaagtgaagtacaatatatgaactttctccataattccactggtggttgggatctttgaatcttctctgcaaggccatccaatttacgaaacacctaacaacaagaaatttaaaatgaaccctgaaattccaaataacccatttgaattatatcttccacctaaaaaaaaccaacctccatggttcggttgttgatgaagtgtgcctgtggatgttgagaaaaagtcttacttttctccaaaaccgcacatttaacacctaaaagataaacaaacattaacatatgatcaaacccaatttcaacattcaaatcccaacataaaggagaaatctgatcatagaaatcttccaacacaaaagcaagcagaagagtttaacatgatcgagctaagagtatagagtgtttgtacccaatttggttaaaattatagaaagaacgagacccactggccctgctccaacgattaaaactggaagaaccgtgtcttcgccattgttgaaaattttcgtgctcgacgacaatgtccttctgtaaatgtacccaagtgggtaagctttgattctggaatttccccattgttgggcattgaaagttttgataaaccttgaaaaccccatgacccaaaagctgaaacagaatctagagcgtgagcatggccatggccatg

SEQ ID NO: 42902 - DNA, 5864 bp, Cannabis sativa
ctctagtgaaagaacacccacctagccacattatgagttgcaaaattacaatttttactaatatgttcgaaattacaactcacaaaaaaaaaaaaaaaataaaaaaaataaaaagaggatctaatgatagctaccttttctctgaaaatgtaatttgaatattattttgcataggagcagcaaatttatgctaaatgtaacatttgctcactttctttttcataatgagatggtctttgaacaatcacaactttgttttaaaatggcatgttcttctacaagtaatatacaccgataggacctatttgtgccttaaattacaggcaataattaagaagaatatatatttgatctaaccaagcaaaagtttaatttgagaggaacaaaattgtaggttacatttgaagggacaccctgctaaaatagcagactggccagtctaaccactcaataagaatgagcggtgcaaacactggaatgcaatgcaacttctttaactgcaaaaattaaaataaacataaaataaataggcaactacaatcaaactgtactgcgaagagtagcaaattatagcactagtagagagaaaaacattgcatacctgtcttcatcactacttatttcggattcaccgtcatcatctttataaataacatcatctacatcatcgtcatcgtcatcactttcatctatgttatgttcttgctgtaatggtgttttgggctgtgatgccttgttaatctgtccaccaaaagcatattaaagaatttgcattaacaacaataagatcagataaaggtttgtccagagcaaaggaagatggtaagaatgtaaattactgacctgtgctacaataagttgcaaacgtccagataattgtaacaaagattggatagctgatcctctacttttggaaacctgttaggaaaaaaaaaattctaaaggtcaggtaagtgatttcatgatgttcgaggagatactgcatattttcggtgaagcctccgcttaaggaaaacatgtaaatcaaaaaaatttctaacttggaacaatatattgtggggcatattatgccaactgtaataggaggctatggcgcattaaagataattgatgtagtaaaatgtctcaaattcgtataccttctttttcttttggacaagaacacagctttaaaaagttatttaaaacacgcatgagtatctcatattctatcctaagtatgatagtggggaagcaaatgaatggcagagatcaaatagaggatcgaaagtaacaggacttaaaaacagaaacacctctgcaacatttaccttgaacaaggacttaagcatctgagtcactggttcttgagacgaaagatgatgactatgattaaccaatatgctgtaaatccatggcataacatattttccactgcatgacctattacaagaaaataaaagctagttcaaaataaagatatcacctcaaaatatagcattaacaacaatactagctatacatgtaaacatgaaaatgtggaaataaaagaacacaccctgattgccacaaagccatcaagactcccagtaacttgcatgcatcaccaggtgctttagatagcactattgccttcatctggcagaacacattagcaaaacaccagtaagttgatttagtgccacaccacattctgaccgagaatgctaagaagacataccttcttctgtggtacatgagctttgagatcaatgccttccagtatagtagagttttgtcttgacattgaagtaaaatcatcagcttcactgagcaatcctaatgatcttagacgctcctccatgcaatttgctactgagtcgacttccatctctaatgcatcatctacacaaacccacaaggacattaacaaaatggcaaaagaagcacattataatagtaatgattgcacaaattgtaaacgctgtattcaatgacattctcgaaagaattttgttaaccttatcattaccttctccctttcgaatcccactgccaaccaaatctttcattctgtcatcaaggccagttttaggtttgttctttccatcatgagagtcaagcaccttgggcatagagagtaaagcatcaccagcatttgcacggtccaaagcaataactgcttaatcattggacaaaacaaattaggtacaatgcaacaacaaaactatcacaatactagaactataagtattacaatctcacatgaataataatgcataaaagaagacctaagctttaagctaacacaaatactaaagtcagatcacaaagaaaatttctgcagaggcacacattaagaacaaatgtttctagatataatactcagagggaagtcttgtgaaacagaagagcactatgaaagagtttcaaaaaacattcatgattatgcttacctccattttgtgcatctactcgcttagatttcacatatgactgagtcataggtaaaaggaccccttcacgggaagtactcaacttgatgtctgtgccataatgcaccaaaattttctggaaggatggctttataagtaaaccataagcagcaaacacctgactggaagcaggtttagtagaattttgcagtcttgcagcgaaaatagtaggaactgcacccttgtaattcttgatggtaatgtcctcagtggatattgatatttttgtaggcttggcatttcgtaagtcttcaatatttagtccaaaccacaaataacaaacaccaacttccgaaatggccaatacatatagaccggcatcatcaacttctccactatagacgcacttattatccacgaagacagcagggtgctccatagcaagaacacagcttgctgactgcttttttccaccaccaacattccaaactgcaacatatctttcaccaacagcagatgaaaggatgtacttcccgtcttcagaaaaaatcaaacagcgaatggctccctattgaattattaagaaacattagcaaatcccattggagatggagagaaagtatgattcagcttcaagaacaaaatagtcaatagcatgtgttgtattgggtgtatagattggtctaattataactgaataagactcacaggatgcccagaaaacttttgcatttttttgtgatcagaagaattgaaaatcttcaattgcccagctccagttgctataatgttcccatctgatttggagattacacaagaagagtatcagtaaaacaataaatactagaaccaatcttttaaaatgccaaggaaaggaatcacaaatccccaaaagcaattgctatctaaggccgataaataagaccctctttaaggaattataaagtatcacttaatttgcaactttctttattataaaaatgaaaaatagttcccatctcagctagaatttttaaactatcaatgccaaatcagttagcccctctcagttacagatgactttcatcactgtttctgatcacaattcacaaaaactacaggtaattatgcacatctagctaagccaaaacattgcatctgagctcaacacactctcagaaaacattacattagtttatgaggcaatcataaatatttataggtacacacctggagaaacagacattgatgaaattgctttagtggaagctttgaacttctccagtagatttcctgtcaaagaatcaacttggcataccatcccatcagaacctgctgtgtagacacatgaaccatttctagaaaatgatactgcactaacacccctgcataacaggaacattgagcttagtataataataacagagaaggagaaacttgaaaagacttaaaatggtttgagagctcacccaggatggcagtcactgactctccatttcagctggccagcagacacatcaagtgccaaaacatcaccactaccagtccctagaatcaacatagagcatccaagcttcctttttttctgcttaaaccatttacattattaacaacccgaatgcgcttattaaataaaaattagaacactagttctttctaagagtcaaatatgaacaaaaacaaacaaatgagaagaaagggaaaaacctttctttccaatgagagccatttcatgcatgtataatcaaccgaaagatgcccttttggtctttcgggttttgcaagcaagctactctcttcagaagccaccatatccgtaaactcagtctgaacctgacccttcactgtgtcccatatctataaaccccataaaccaaacatatcaaattctaaaacaactcaattcagctgcttcatatgaataaagaaacaaaatccgcataaaaactgataccttgattcgaccatcgcctgtactaatggcgaacaaatcctttgaaggactaaaggcagtcaaaaggtctctgatattggaggaccccattttcgaaattttatgactgccaaaaaaacttagcttagctagaatgcaagtccttcagcagcttagcttggctgatcaataagcagagcacaaccaggttaaggtagcgaatgaagaaggtggcaatggaagagacaaatacaaatagagaggcttatacctctagattttgtgttacgtctaaaaggcgcagttttcccaccttgcaattcagatcggactctttttattttcacataacttaagatgatgaatattttaaacgagtaaaaatatgcataataatgccaattctccactgaagaggttatatcctttcatcataaacaatgtcctaattcatgtatgcacttaagctcctcaagtataagcatggacaaattaaaatttctcttctaaatctaattacataattactagtagtaacaacaaaaaaaattaataataaaaaaagaacaacacataccagattcatatatctgcattgttaaaggaaattctcttatagtactccagatttctcttttttatgttctaacttagtttgtaactagacctaattagaatgtatcaaccatgcatattacacctaatgcccagaacgaaaaacaaaaaaatattaacatgtctcttaaaaaataataaacactgacttaatatttagttaaccatgtctctttttgttaaacaggacagaaaagcagcaaaacaaatactgatatagtacaatatacagttcatctccaactccaatatacagtccttccttcatataatttattcaacctcacaatttattttcattctgttctcatattcaaccttgagagaaaatttcctatggaaaaatatatgcctcagtctacaaggcgcaaaacttctcacattaaagactctacaaatattttttttcatagtttaatccgtttcaacagatgtcattccacttttcttttgagtaaagcattcaaataattttctttccaaacagatggtatctataccttgtgagtgtgaaaatagcaatcgttccgtttaggttgcagcggtcgccgtggaagatagagaccggagagagatgaagacggacgggaaaggaggaaaaaagaaagatagcaggctggcgccgccgaggagaaggaccaccggagagagaaatatcgaacagtgagacactttttgaatgagtgaatacgtgtgtgtgtgtgtttaggtttgggtaccactacgaggagaattcttattaagttgggcttgggcttgcaaggaatgagcagcctctatttgtgaaagagaaatggaagtaaatggtctatttttagatatttctaacctatagataattaatgttcctttcttaaaataataaagcagttcttttttactttttaatacctaaaatactctttattatataaaaagtattatatgttttattcctttaatag

SEQ ID NO: 42903 - DNA, 11491 bp, Cannabis sativa
attatggcaattaagagaaagaagctcgaacagattcagaattcatcagctagttcaaatagaaagttgaacgccataccgtgcattttcttaacaaaatgttcaaattccacaaagttgtgtctttccatgagatgtggactgaccctaaggtaggtaaatgatgaaaaatgtcttctgtctggatcagaagatggcttagcgtcatctaaaattttgctatagcctacttgatcatgacagggaagagaattttcattggcaaccggtacacagacatcccatgctgcgttcagcacctgaaatagaggttcattgtcaagcattgaaacaaaatttaccaaagaatctaaaaaagcccattgctagacaacttcctatctttgccaaacaattcacattctttccgaagggaaaaagaaaattgctctgccatgaggcttttggttggcacatagtttggaagttaagcatacgggtcagatcatgcaattgtttaaactttagatcaggaaattatacataaatatatttatatagatctttgatgctgataatgagatttcacaattttgaagcttacttgccaaactaatccctcagggtcagctagggcctcttggaagtcctcgtgatggtttagcatgtgcagttcagcacatgtgaagttcagagcagccccgtgcttgcttagcattgacataattgcagcatagccatcacgattacatgaattatagaatccggcagtcagttcagcagcatgacttgccgtcttgtaccaccaatgaatacctgatagctgctcaacaattaaaatatagcaaacacttgatcaaaaaacctaaaagaaatgacttctatggctccaaactcaattgaattctcctttagcttgggcacacaaaagacccttagattaagaaattttatgtctagaatgtgcacattgtaatattcatagagtcaaagttcagccaaatcgtgttgtttctgtgatacagtggaaaaaaacaggaaataagagaatattttattgaattggaagtggagccagagcaatcaaacagaaaaaatacacaaaataacattgattgaaaacaataaacaaaaaggcaagttacctttgtagcaatgcaggtgccttcaaaagccaattttgcaagacaaaggactcgatcaccgtgatcaactaaaaccttagagtaccaattaaggaagaatctcccatagtagccatcataatcacctccgtcacaaaagaaaccagtttcatgaggccgggaattataagaacctgcattatctggtcctctagcccaaaaggagtgtcctctttcctctgctgccttcctcagactttttagcaaatattgatcgtaacactgcatgtattcaaataatttattgttcaatgctcaaatataattgaaaaagcttttgatacttaaaatggtttttttaaaataaataaatacatatataaataatttttttctcaatcttttttttctttctcaaagaggggttttactggagggatgtaatttcataagagaatggttgagcagtcatgtcacactaaaacaaagttctcaagaataagatccaacttttacatacaaattgtctcctaatcaggtcttgtaaggggttgaatgctaatgtaatgacttgatattattatgcacaaggagccaagacaccaaaatgtgtgtaatatatatacaactacaaaaatataggtaagcaaactttaaggactggatgataaactacctggaattcaccaatgccaggatatctccaaccatgcttaactggacaagaagggtacctcagctccccacatggacctagtccaacttgaatcatggagataataccttcttcaaagaactcattaaattctatccggaagcttctcatgtagtcaaagtagacctgcatcaatcttaagatttattagagcactagtaatctattatttactgaaatacaaatacataaaaaaaaaattaaaaaaaaaaagaggagggacacaggagatttataaatcagggcactgcatggcaagaaaaggtattcaaatctgcatgaaatgtcaaagtttacagcttgctaaaaaagaaaagctaaaattgagtgactgaataggggactgaggtccttcatgacaagctaggaaataatgataaactttatggtgtttcatcttttttgacaattctcaaaaaaattactgttgtacacaagaacttggcaattactaaagcaggcacttaacatcgtttcatcatgtagaagataaaagagaagaaagtaaaatcacatgtacgcaattaaacagagggggaaaaacagagagagggaaaaaagaaattatggctttaaaagtacaactgttcttgtaccatttagaaaaagtcacatttaaacagtaagcagtgttaacagtcatcctcataattaaataataaatagaatacctcaacagctgtccggcctctaagaacacgctctttgtctattccccacgagagacattcaggattccgccttccctctctatcagtgaaaaagatgtcaggattgttgcgaccaatttctgccacccaatgtggcagtggaatacaaacatcatcaccgacattacctccacactcatggaatgacatcataacctgaaataagagattttaactatcaaacctaaaaataaatgccagatccaaaacagcatcatctgaataaggaatctaaatatgcatcataattattctgctaattgattccatatgacacgaaacaaaacatgtataagcacatcaccaacctccaaacatcaatatgctccacaagttggcttttagttagatcaaggggatccattactcagaagtccacaaaaataatttcaaactacagctacaaaatatttgcacacgatactcaattttcatgtatataaaaaaacttgaatgagaataaataaatcccctttcaaagaataatgctagcatacagagcatagaaacttactcaaaatctgtcaactatcaatggtgaccatttgtagtaaaaatgtgatttaagtttttagtacttttccgtgagatcagataatctgatttaataaacacccataccaaacaactataataaaccaatcaaaaggacaaaacacaagcttcttagattgtcttctagatactgaagcatatggaaatcattttataaacagttacttttacaaaggaagtgaacattagtatggccgtggctctatagtattcaccatgaaaaaaaaagggacatcagctagaataagcactgaaaaacagtaaagctcatttaaactcacttgtaacttgagcttgagctcacgcaccatctgaaagagtctcttgtaaccattccagttatattcctggggagcatgtgcctccacaattccccaccagcaatcaacagaaacaccatccacattaactgatttcagtacccttaactgcttgagtaagccatctggatcaaccagttcacatttcatattaacaacacctaactgccatcaaaagagcaagtcatgaaaagtaaactaaaaattaccagaaagaaatttaattatccaaactacacaagtaccaaaaagaattaataaccataaacaaaggaaaattaagaagaaagctaataaattgggaattgggatggactcaaaaagcaacagcgtatgagttagcataaggaatatcatggtaatgataaaaggtaagatggcagctaaaaagatgcatgccactcaataaaagtcaacagacagtacaagaatgggggtgtcacgtgtgtatgaaaaactaaaaagaaaaattcagccgaaatacaaattacaaaactcaccggtaacattacataaactggaatataaggggtgccagaaaaatcacgctctgataacttcggagatatatcaacaacctgtagaacaaaatagaaaactgctaaacgctaaggccataaaggaactcacaagtttcataaattacatcaagataaaaggaatgctacaaatttaatatgaatacaggtaaatcaatatcacagattctcaaatagactatacataatctgcaaacaaatgaaagaattatttattatgtgttcaagatgtcatacgagctatgagtagtgatcataaaaagatcatgtcagcgtaattaaaatcagcaacgacatgccaaaagagtttgataatgaagtatgcatagtctccaaagacatttgctctactacctgcttgtcatcaatgggatcaatggaacccacaatatgaggatgactctctgtttgttcccctccatcacccaccatagttgaagtttgagaacgagcacttgtggaaatatcgtatggtgatgagcagggcatataaacacctttcattctatttgcattaaaatccacagaactttgatagccagcagcacaagcttttaaggaaggtagagtttgctgtggtgctgcatgtccagatgatgaagtagctacagtagaattgacaacagcatgtcttgaaccctgaaaagagaagagaatatctatctttagttaactcattccctaacattcttcagaagtggctatcacaataacccagcaaaagtcctacataactaatcatgtgtccataaaatgcataatggtccatgactagcacgtaagtagaactacaatagttccgagtttcacaatctggttctggccttctaattctcctgtatgttaaataatgtagcaaaaaatatggccttctaattctcctgtatgttaaataatgtagcaaaaaatatgaccaatattgaaaaatttcctcgtagaataattacctgaggctgagatcttgaaggaaaagtggtcccatctggaagaacaacccagccagcttctcgtgcaagagctgcaattacatcatttatatcagccctaactctaagattataattcccatgcctccgtaaccccgccaagatttttgcagtgatagctcttctatgccgctcccttaattttgttctctccttctcttctagtggcctacacctacgagctcctcctccacctggagtacttacttcttgtacttgctgtagctcttgaaactgatgattattattgctgctactagttggcatgcctccatcaaaaccgaccattactgaagcagaagcagcagcatgtttcctccggtcttcgtcatcatcatcctcctctttaacatccatttccatttcttcctcgtcatcttcttcactagctccaattaacttatgcatttctgaagccataataaccttcttctcttttaatcccaattatcctcacaacttaattcatgtaacaacaatgccatagtctgaactgaatttcactaattgttgataaataacagtaagcattgcgatactatcacagtataaaaaaaataataataaaaataaataaaaaaataatgataacaacaaatcaaagataaaattaactcaaaaagaaaaagagaacttattgaattaagcttaaactcaattctactaattctataggagttgaaacagtcaatcatcttccgttgcaaaaaaaattggttgtgattagagtaaattatcaaagaagcaacaaaaaacaaacaaaaggccaaaacttctctctttcactgtgttgacatctgctacagtttcagtagcaaccaaaaagaaacagcgaattctcttcctaaacttaatgaactttttcccatataacaaacaagttttatggaaaagttaaaaggtgtatattacctttttatatatataacaaactggacaggttttccagctttttgaccgaaaactgacgcttcaaaatcctaacattttcggttgtcttccactaaagcttattcaaagaattctcaaacagatccaccttttcccacggaagaaaccctaaccacctccgatgaagtccgcacggaaaaattccggcggccggagtggaggtccttcttcgtctcagaacggcgaaccagatctccggggaatgagaccctaagaaaccggcggacggtggcgggtcgggtcggagcagatgaaaaggaagaaacgtgcgaacatgcgagtgagttagggttttggggtcgcgcgtgcgagagtgtgcgaatcgggagtttggcacggatggtgcgtgtgtgtgtggtgtataagcgagcgaagctggaaaatggtaattgtgtgatggacacgtgtgaggcgtggcaaaaggcatggacatggtacatggattaagattgaagtggggtgggcacgagattttggtggactcactcactcactcaatccgactgtatcacgtgacctggattttagatagttcattcaaaaatagctaccttgatagaaacgagagagagagaaaaagagatggcaggaagagaaattccggcggaggttccaaaaattgtgtggaacgaggcccaacggaggttcgagacggaagataagaaggcgtatttagagtatgtggagagagagacagaggagtatggtggcaacggtagagataaaggtaaaggcaaagtagtgatggaattgctccacacctttgtcccttcttccaagagaggcttaggtctggcttctcacctctgtgttgccgcctttactcacgccaaatcccgctcccttactatcatccccacttgcacttacatctccgacacttttctcccgaggaacccttcttggaattctcttgtgtattcagaagatattaaagcaagtagtagcatgtaattgtgttactccaaaaaaaaaaaatgattgtgttatagcattatattgtatttgagttacaattcaattccaatatcgttttagtattttgtgctacaaaaaaaaaaaaaaaaaaaattgtttaaggggctctgaagtttcattgtcgttttggagctaagtatctttgttgtttcagatatggctttttcctgttttctttgattcttttgtggttagatatggttaattagaaacatcatatccaggacctacaacttctggtattttaattcttaacactatccagcataaaaagaacaaaattaatgggctattgggtaattcgttccaatttatttaattttcggaatatcaatagaaagaacaaaattaatgagctacatcctctggttgctgctgctaattaagtgctgaccaacctgacatgatcaagccactttgaatattaaataccaatagatgaattgtaagacagatgcagggggaaaggaaaacaaataaacgtgtgatgaagcttatgttattgattcatcggaattacaatcagcttttaccatttaagcaaatagtctcttctttgcaataatgaaattgctttctggtaattaaataacgtagtctcccacaatggttgaagaaaaatgtgaatatcatatgagttgttcatcaaaagagatgagttgggtttcacttgtaatcaatcttgtggtgcaacttcctcatccattacatcggcatgcattgtttccagatcaacttgaagatctgaaactgcttcccctgaaagtggaagggagactagtgattaaagcgaaaggcgaatacatgaaaagctccctagtccatgtcattcactagaatcactacccatagataaactcatatattgccgctagaaaaatgcagacatgcggcaaccaattgttcttgggacattgggacgatgaagtcttgtattgcatgtttatgaaataaatagcatatctaaccacaaaataagttatagcttgcaatattcagccaaaaaaaaaaaacttgcaataagcagacttagcagagaaccgggtaagaatgacataccatgcatttgcttaacaaatcgttcaaactcggcaaagttgtgcgcctccatgagagcaggactgagcctgaggtaggtaaaggcagacaaatgcctcccatctggatcgttcagaggcttggcatttaccaatatcttgttatagccatctctatcatggcaattaagagcattttcactagcaactggaatgcaagcatcccaggcagcgttcaagacctagatatgcataggcaaatgtgtcatgatcaaagggattcacaaagcattgtccaattcaaactaaattaattcatggcagtaagggaaatagacccatggttatcactgaattttgtattgcatcccacatcagcacatcctattacttaacagaaaaactaagatgaaggaacctcacacgtatacatacctgccaaactaatccttctgggtctgccaatgcctctggaaagtcttcatgctgatccaatgttcggagttcaacacatgtgaaattcagagcagcctcatgtttcttaaacattgttgcaattggtgcataaccatcacgatttgcagggttgtaaaaccctgcagtcaactcagcagcatgactggcggtcttgtaccaccaatgtatacctgatagctgctcatcaagcaaaagaatgtttctttaaaagttgcagagctataataccattttatcaagtaaattgaatacagtagattcactttttaaatgagtccggcagactaacctttgcagcgatgcaagttccttcaaaagctaaattggctagagaaagtacacgatcaccatgatcaatcaatgtccgagagtaccagttaaggaaaaatctcccatagtagctgtcatattcacctccatcacggaagaatccagtcttatgtggtgtggaattataagaacccgcattatctggtcctctcgcccaatttgagtgccccctcacttcggctgctttggtcagacttttcatcaagtacttatcatagcactgaactgaaatagtttgcatcaagggaagaaaaaaaagtgcacaccttttcaccaatttaaaagaaatagctgaacagaagtacctgaaattcaccaataccaggatatctccaaccatgttttgcaggataagaaggataccgtaactccccacatggacctagtccaacttcaatctcagagataacaccatcctcaaaaaattcatcaaattctaccctaaagcttctcatgtagtcaaaatagacctgcactaattgtatgatatataaaagacaaaagataattcttagagatgtaactgcagaagccaaatgtgcaaatatttagtgcagctaaagaatcttacctcaactgcagtcctgcccttcaaaactcgttctttatcaatgccccatgtaagacattctgtattgcgttttccctctctatcagtgaaatatatgtcaggattgcttaggccaatttccgtaacccaaccagggagtggaatatgtacatcatctcccacattgcctccacattcatgaaaagacataacaacctaaagtgcattgaaaagaagaacatttagtatttagacaaaatcaacctttgagtttttaaaaggcgctaataaaatcaaaagtaacgagaagaagatgaacaaaaagtaattatttgcacaatagtatatataagagaacagacatcatactcaaatgcaggtgacaatatatgctaaatgagcatattattaaattaacagtgaatacagattattcacctgtaatttcagatgaagatcgcgtacaatctggaagagttttctgtacccactccaattataaacctgtggagaatgtgcctcaacaatcccccaccagcagtcgatcataacaccatccacgttaatggactttaatattttaagctgattaacaagaccttctggatcaaccaactcagagttcatatcaattgtacccagctgccagtcccccatgataacaagtcaatttggtaaataacattagaggggaaacttagcacagcagcaagtagaacaagaactgaattcgagaactcactggtagcatcacatatataggaatataaggagttccagcaaaatcacgctcccgaatttcggcaggcttatcttcaacctacgaatgatgaacaaatttttgaaattgatattaaacagtagagaactacatattaatccccaatcaccattgattgattgtggataaagtgaacctccctttccttctcctgatttctttattgcctcattcactacatttaagaaataaagtataaaaatttaaatgcagaaatactaaacctggctttgaaaggtggccacagaatcatcgatcaagggatgatcatcctcggttctctcttctcgttcatctttgagtaccgccatagtccgaaactgggtatcggtagcataagtaccgtacccagactcgcatttccatcggcaatgacttccagctacagagcttcgaaaccttgaagctaccccaaaagaagccagaaaggtttgcgcatttgaaaaagaagaagaagtcgtagtagctctgaaaaaagcattgggtggtctcgagctacggaaaatctgagctgaagaaatcgccattctagattttcccaaggaaaggaacagactcgaatcttgtcgtttatttccaggaaattttttagagaagaaacgggaaaggattgctttcacttaaaaagactgaggggaagtgaatattttgtactttggcttttttgtggacagcgatggaagtttgaagcttttctctttattcactttctcactattttcccgggaaaattagcatggaagttacacttcaattttcctttacgtattttctacgatattatcgggaatccgaaaagataataaaagagaaaatgagaacccgtgacaaatgaagatggatccaagaatcaggttgatgtggtggtgttgctcttagacaaaacctcatctgtcgtttctttctctacttttcaagttaattgtcgtttaagttgaaccttggtgtgaatgtcatagatatttgtgatcgacataaaaaaaatctaattaaagagtcaagagttagagtgtatgtactatgtagtaagaataggggtggtaaaatgggcttcaacacgtggtacgcgaatacaaatacgatataaattttgtgagttatggttgaaaaattaaatgcggttcgaaaatggtcaacacgatttgacacaaaataaaacataccaaacatgatataacttatttaatacgaatttaacataattcttttaaataaaataaaataaaaaataattaagaataattagggttgtacaaaaaaatttataaaccctccaaatcgaataacctgcccaaaccaaaccgaaataacccgaaaaaattacaaaccgctcaatttattaattgggcgggttacaaataggcccaatccgattttggattttaattttttttttaactttttagtttttattatatataacatacataattaaatgtataataatataaagttatat

SEQ ID NO: 42904 - DNA, 2826 bp, Cannabis sativa
aaccacatgaaagtaacaagaaaaaaatatcaaaacaatataaaaaataatatacaaataacaaaaaattaacaataaaataacaaggtagttttaaaggtgaaaaggagcttagacaaaaggacctgttatcccctttgttttttgttctaatcatggactacttgagtagatgtcttcaagttgctgctcataactccctttttaggttcaaccttatgtgtaaaagcttaaaaattattaatctttgcttcactgatgatttaatggtgtttaacaaagggtcaagacaatcgatattggtgcaaaaaggatcttgatgctttcagttcttcatcaggattgcacatcaacatgtagaaatctcagatttactttggtggtgtggaaactaatgagaagctcaacatcctccaggttcttaagctgtctgaagggaccttccctctcaaatatttgggagttcctttaagactaaccaaatggaaggttgaagactgtgaagttatcatcaaaaagataatatatagactgttttcttggtctactagacacctctcttttgtaggaagagtccagctgatccattctattcttcttggtcttcacaactattggatgagcatttttgttcttcgacaaagcatcctcaaagagatagagaaattatgcagagggttcctttgggatctttttggtaacaggagcgaaattcatgtagcaccttgggagaaaatttgtcttttgaaggcttatggaggtcttgggtttaaagatggtgctaaatggaatcaagccaactttgcaaagtatgtttgggccatttcagcaaagagatattctttggattaaatggattaataacatttatttgagaacatctccttttggtcctatgaattgaaacaagacacgagctggtattggcgcaagctctgccactttagactaaaatttttgaggctgatattaattcaaaaatctttgcaagtaaactcaaaacaagaagactttataacagctctcttcaacaacaagtgtactaccatagagctgtttggaactcatagacgttgcccaagcattcgatttgttgtatggcaaggtgtgaatcatcaactttaattagagttaacttgtgaaaatttcaagttgcaatggaaaatgtagattgttcggtgtgtgctgctggaatagaaactcatgaacacttattttttgagtattctctgtctcggcaggtggtcaggcttatttttgattgactgggcaaaaatgcttggtcattggattacttgggatggtttaattggttgtctttgtcttctttgagtttgttgcaggctatagatatctctatatttgcagccacttgttatagcatttgggtcaacagaaataattgtatatttgagggcttttctaatatagtgtctcatatagtgaaagagattaaaagtttagtgacttatagattacaaattgttaaacacgggaatgtatctagagtggagagattatacttgaatagaattcaaatgtaatagggtggttgttgggctgggagcattgtttattgtagtgctcccattggttgcatttgtttgttgattaatgaagatttttctttcttgataaaaaaaaataacaaaataacaagagcaacataaaagtacataaaaagtctatattttatgtaaataaaatctaaaaaaccataaaaatattaaatattttatacagaccgtattcttgtaattttttgttattttgtattttttttttaaaattatcccttatttaattatacaattaaaaagttaattttaaaaaaaatccataaattgtgtaatttatactatctaaaaattatgttgaatataacatgtgcacttctttatttattttttttcttctgacaaatctaacataatttctgcatcattcattggtactatattttgctaggtaagagtttttaaatgttttttggattattatatgatgttttttgaactttccatatatagaaagagataaactagaaacgacatctcttatctcagtgacaccaatcttaaatgaatggaattgagatgtgaatggaatataatgaagtagagccactttgaggttccctatgaaatgaaacaccttggaaatatatttgtctttaaacggtggaagagagaagaatttgaaagtttaaaagaaaaagttatgaagagaattgaagaatggaaaactaagctcctcccctttgcgggtagaaagcaggttaaatcggttgcgttaagtgtgccaatttatactatatctaattgtaaggttcctatctctacttgcagagaaattgatggtatgatcaggaaattttagtggacggggggtaatgagaaagaaagatttcttactttggtgagttgggatagactctgccttcccctttctatgggaggcttgggattcagaagacttgaggatataaacaaggccttattgtccaagttggcctggcaggtggctagtggtagtgaaaaactatggatgaaatgccttattgccaaatattgtaaatgaaaatctttttggggtactgagatgagggggaacgattcacccatgtggaagggaattatgtcttcaagaggtattcaccgtagggtagtttggctttgccaggaaagggtaattcgattgatttatggaagtaaccttggattccttggctcaactttgaagaattcattgaatttatggtgtatggattcggtacctcttgaagatggtaccctcatttgaagatgagggggaacgattcaccca

SEQ ID NO: 42905 - DNA, 4627 bp, Cannabis sativa
aaataggaaacaaaagagagcaacacaatccaataaaagccccaccggagacaacaagtgctttttctgttgcacagcttgcaccaccagcagcgagtccgactccatgaccacaccagcagacacacacccctcaacccactttcccttcacccaactgagcgcatcctttaacgctatagcttcagccaaaaacgggtcgggctgaccataagttttaaccgccagcgcatcaatgaataaaccattatgatcccgagcaatccaccccaaaccgaaaattctaacatgaatgaaagttcaagaaacattatttagtacatatcaaaatttgaggggcacgatttggtatatatcaaagtctggggagcatagtttaatacataaacagtcatggaacaataaaattaaatgaaattagacaaaagtccttaaaaataacaatctcaatagttcaggaagaatttttaacggctaaaaaagttcagggggcatgatttgataaatgtaaagttcgagaaaaaaaattgctaattaacttttttattttttttatttttcttaatgcaaattaaactcccctagttaaaatggtttcatttaccaaactaaaatcagagactaatagttgtgacaatgataatgctttttgaatatcgtcgtcgtctcaggtgagcctccgttgtcggtgttaccgctcagcgattggagactgtctgaatttgagggtcctgaacttgaagctccaccaactccgcaatattaccgaggtatccaattctcattaaccatttccccatatgttttaacgtctgcaatttgtctttgaccttattagggttttctattttctgttgaaatgctctaattattagtctgatttttatagtttcaaactgagaaaaagaaaattttaaactcacaatacagaacagagattaagtgagaaaatatatgatacaaaggcacaacatagtaacttggtagaaaggaatagccactgcataatttgctgttacactaaaagccatatcagttagtgtgaggtattttgtgtatttttcattgatttgatttttgtgaagatatagaatggcttattggtaactggtaagttattcaataaatcagttggacactatcagtttcattactttaacaaatcagagcaattgctaagtaaaagctctaatgaatgcttcatgttattttgaagttactggatgaatgttggttataggaaattcatccaattggtagattttagatttttaagtatagtagacatcttttggtttttgaaataaagattaaaactactatatttctctttgtccttctctcttaaaattcttaggtttttggtagcaaagattatttgtccatgctctcttgcagtcatttacttgtatgttgaaatcttgtgttgatggattgtctgatacatattgtgttcggctctgtgcaattggtcagcttgcacagccttgggtccgggcctgtgaaccacagagagaatgcattttgacctaaaattcttgaagactacaacaataatgcatactcattttatggttctgaagaaaatatattaatcttgttatatattcataatgattcggagaagctttctttgaaatatggacaattgtcatgtttaaaaaatatatatatttttttgtttttctattcaagaatttgttgactgtgaaaggttgtatttgctttattatttttgggtgtacatttgaaattcacaattgcataaacacttactggtttattttatgtgattcagatgcttgaatggtgtttattttggatgggataactttcaatggtaatgctgttctcaccaattagagcattcttgcttagctgaagtttttgtcttatatttggaaactttcttgaccgcggaaatgaaaagattgtttgtgggatcttttactttgaaacgaacgatatcaacttcacctcatctttgtgagagagttaagcaaacaggtaatgttcacttcaagtaatatagttgagattactgttatatacatcatctctagtttaatagatcaacatttagtgaagttgctagttttattgctctagtatttactgtgggacatttttgatttaatattatctgtattttttgagcagaaaatgagatcgtgcaaatgttctacttacccactgtaagagattcggtgcaaaacttgcctatgaatggaaaactgtcgagaaaggatccttcagttcgtaaattggatgaaaggtttacaaggatcttgaaaattttcgagtggggacccgatgcagagaaggcaatggaagtgctgaagctgagattggaccaccggttagttcttgaggttttgaagatagatgttgaggtctctgtgaaagttcagtttttcaaatgggctgcaaagagaagaaattttcagcatgacccaaccacttacatggctttaatccgctgcttagatgaagcaaggttatttggtgaaatgtggcagacaatccaagagatggttcgagctgtatctattctagatcctgctcaattatctgaaatcgttagtatattgggaaaggcgaagatggtgaacaaggccctatctatcttttaccaggtaaaaggtcgcaagtgcaagccaacaactaatacatacaactcgatgatcttggtcttaatgcaaggtcatcatgaaaagatccatgaactttataatgagatgtgtaatgagggagactgttttccagacactgtttcatacaatgcacttatattagcatttaagaaattgggtcgttatgactttgccattagattgtttgatgagatgaaggagaatggtctacagccaactgcgaagatatttaccaacttattggaagtacatttcaagttgggtaaggttgaaaaagctttggatctttttagggagatgaaggagagagggtgttgccctactgtctttacttacacagaattaataaagggtcttggtagtgctgggaggattgacgatgcctataatatctataagaatctcctaagggatggttgtaaaccggatgtagtactcatgaacaatttaattaacatctttagtaaggcaggtcgcttggaagatgcccttagatttttcgaggagatggagtctcttagatgtatacctactgttgtgacgtacaactctgtcctgaaagctttatttgaattaaaagctccaatttccgaggtttctgtgctgtttgagaagatgaaggcaaatggggttgcttctagctcatttacctactcaattcttatagatggatattgtaaaagaggtagacttgagaaagctttgttacttcttgaggagatggatgaaaaaggttttcctccttgtccagccgcctattgcagcttgatcaacagtcttggaaaagcaaaacggtatgaagctgcaaatgagttgtttctagaattgaaagagaactgtggacgttcaagtgctcgggtgtatgctgtgatgatcaagcattttggaaagtgtggccttctcaatgaagcattggatttatttaatgagatgaagagacttggttgtgatcctgatgtttatgcatataatgctctaatgtcaggaatggtgagggctggcatggtagatgaagctcattccttacttaaaaccatggaagaaaatggttgtattccagacttaaattcgcacaacattattctaaatggcttggctaaaacaggtggcccaaagcgggctatggaaatgtttacaaaaatgaagcattcaaagatcgaaccagatgcagtttcttataacactgttcttggctgtcttagtcgagctggtttgttagaggatgctgcaagacttatgaaagagatgaatttaattgggtttgagtatgatgagatcagctactcgtccatacttgaggcggttggcaaggttgatgaagttcacagattcacctcttaagtgaaagaaagagacttggtatgatatcatttctcttgtacttgttttactcttgcaactgaaaattgaatcttgtcatagatagtagtttcttgacctcaatggatgtgcttgattcttttgttggacaacttgtgataaactcaaaaacaatgttgattcaaggtttaacttgtagtttttcaatgatttgcaatgcagacgcggacatggtatcacgtttccacttttcttgtaccttactaactgtgtgttcttgtatatatgctcattgcccttgattttgaacggtaattctgtgtaccaaagtaatttatttcttacatttcagcattatctacttattctcttcatagagatgtctcatgagtaatttcctaccaatagttggttcagtttctattctcaaaggaataggatcatccctcaaagcaaatgctatttttatttaggcattagtaatattatcatccaaagcagagctccctagactatcttcatgagcattaataaaacataataggaagttgcataccgaaaagtccccagatttttgtgttctgttttgctacccttagttatcgaactatatttcaaatttgtttctgtgttctttaaattatgtagtggaa

SEQ ID NO: 42906 - DNA, 5018 bp, Cannabis sativa
tggggtggccttggaaactgtaagttttttgatcgaataaggctattataattatctcacctgtgcactaatcttcttcacctggtttttgtttactgctagtggctgaacccaaagaatcaatatacttgctggacaattgccctcacgactggctctttttacaatgcaaggctgtggtatggcttacttatctagttttatggcttccaattctgcattctattaacttgttatagactgttaattctcaataggctgcgctaatgatagtatacctcagtttcaaacacaattttttttaataataaatatggaaaatatcgaaaagaattagagaagtggcatttttcttctataccatcttggaatctttatgatttgatgctgtaacttcaggtgcatcatggaggtgcaggaacaacggctgctggtctaaaagcggcggtaatagcttctaatcgaattatgcatatccttatcttttcagttctttgttttgcctctgcttgattcactcattcttccacccctttatttattttaatcattaaacatttatctgattatgttttttttttttaatttcatattacagtgtcccacaaccattgtccctttctttggtgaccaacctttctggggagaacgagtacacgctagagaagtaggtcctgcacctattcctgttgaccaattttcacttccaaagttgattgatgccataaattatatgattgatgacaaggtaattatttttggtattgtgctttaagaagattttattatcttcattgaatcacacatcaatgattccaggtgaaagaacgcgctcttgagctcgccaaggccatggagaacgaagatggtgtgacaggagcagtgaaagccttctttaagcatcttcctcgcaagaagcccgacccagaaccagaattggtgtcatcaagttttttctctataagtaaatgtttcggttgtgcctaaatctcaatttcccaatcgactgtcctcgttcattggttttacctggtcgtaatggacctcttttgataccccagatatatttatatataaatatatatattttatgtgtagtgttgtgcattaggctctgattcctacttccataacttgtaattatatatctatttttgtagtcaatattcattcagagaaaagcaaaagttgattttctttccccccatgaattttatgtacgttttctaggcttaatgtttgtcttccctacagtaaatccatttcagtgtaatcaaccataacttgtcttatgatgctgctttcttggacaactgtatattcggtatgttctaagtctcccatgacaataaaattttctccataccaaagttgcagttctatgcatgcagtcattgaagggtaagatttttctcacattatcatttaagaagagttgtggtcatcatcatcacacagataattgctggtgtcgttttgtgttgaaaaattgcacattttactattcttccagtgccaattactgaccctgtacaactaatctcaaggatagatttttaattggcaggttagagactggggaatatagtctggtatgtatctccaattctctgtaacaggttaacttcttaagagtcaaattatagcaatataatttatctttctttaaatttaaaactgttgcagaaaattatatgttggtttctttacattaagtacttgaccaattagagagagagctcaatgatcctcagcattatttcttttcccccattttgtcacattatgcccataaaacaaatctagcatggtttgtttttcgtccaaacattggtgtttatatttcactttgaactcttacgatccttccaaaaaaaaaaagagacaaaaatccacaggaacttagtagaactattaactatagtaaccccaactgtacagagtttcacggtccaatacaattagggaacagagtgatagggggccccattattaagagtgcaataaatagttaaacaattccacgttagatggaaactaaagtaggagttgagagagagagtttgagttttgtgttttggtccatgtcttttgtttgttgaagaaataagagccgtcagatttgtctacatcgagattacaacaacaatccaaataaggtggccacgtgtaagggagcatcaacatggagcttaaacttaaaacgtattggattccattattcaaacagagagtgacgttgatatatcagtgcatgcaaggtaaaaggaatggggtttgtgaaaagtgacaaattgcatgagattggcggtgggattgggaagagatagacaagagagcagcaaggaccattggctaatggctactggtgcttaattttgccccataactatttatagaaaagcagaggattgtagcagtataaataagctcatctcaaggcaaaaaagaaaagaaaaaaaaaagaaaaagaaaagaaaaccactactgagttccagacacaagtgggtgtgtgatgtgaagactgactttagctttaaagtcccccccaatccacattggccattgaaggtatcacaaaccctgatcatctctttaaaagcttacctcttactctgacataactgatgacttatattgattccacacacactatataaatgtagtaatatttaaataaaaataaaccactcacttacaactttcttaaatgtgaaaaatgaagggaccactctactcctattaatcacactgatcttcatttataaggtggtaacagagtgttttgccacttacaagagtagtgattagatagggaaagaataagtggtggatatacatgtatttagtcattaatgacattaaaaattatataataaaacgttagaaatggaatttaaaaaaccgttgtaaagcccctgaaaaaaaaaaaaggaaaatgtaattgtcagagagataagtggggaaactatatataatccaatacttcctatgcagcctgttgtggagtgattggtgagaagtttttattcggattggaaagtgaaatttctctctctttttcctcttcttcttatctttttcttttttctgtttccaacccaaaagcccatacatctctttaactcgaaatactctatttaataattatacttaacttgccaagacttcacattttccaactcttttacaaaccttctgaactaccctttttatctacactttttgatcagttcaaaggccaaacttccaacccaatctctacacctattccccaagtacaatttttcttcaaagaaaaaagagggttttcttgttatcctttctttaactctatttgggtgtcttaaaaatttaatctttttttgttctctccttttcccactttcagaaactatggaagatgaagagaaatcaatccaagttagaggaagcaatgtagaagacacaacatcaagagtgttcccctgtttgttctgtacaagaaagttttacagttctcaagctttagggggtcatcaaaatgctcacaaaaaagaaagaacagcagctagaaaagccaaaagagcatctgaatacaccccattaaacttctcttcacaccctcaacaaaccatggtttttgctccaaatcatcatatgggccattttcatcatcatcatcattctcctccaatgtatataaatgctcatgcctctaactttcgctatttcccaactacaactactaataatcacaacactactactactactactgctcatcaattcgggtcaaatggagcaccaaagtttgagaatttcgtctattatggtgggagttatccatgtgaagaagatgaaaaaagcttcttgaattggcagagaagtataagatataatggctttggtggagttgggtcatctcaaaatggatctcaagtgatgaatcatagtatcattagtcataataataataatattgtcaattgtgataagggtaaagatccaaaacttgatctttctcttcatttatagattaatggttggtatagtattattagtatggttagaaagttgagaattttgccttatttgaatggagagatgatgagtatgaaataataagcattctttttctttttctttttttatttttgggacattttattgttttgtttttgtgatcaatcttcttgttttgttgcaaaaattaatgattgttttgtttatttcatgttatctattataacacactaacttcaacaaagcttaaaaaatctcctcttcaattttttgatgggtcatctcatcatcctcttcattctactataaacttctcataaaatctttaaaaggacgtgatatcctttctcttttcttttttgccggaaaaagctagaccactttttgggttcacattacattgaatagaataatattacttcatactttgccaaaaaagaaaaaaaaaataggatattacttcataaaagggaccgtacgacatgtgaaattgtgatgcgacatacactatcatacgacacaagacattgtgatgcgacatactcaaagcaaatcttaccttaaaagtgcaatttgtatgaacaatcatgtcatctcatgtatggttgctcataaaataatcaatccaattcataaagtatatttatatgtactcatgcagattgaattaaattggaaagtttaaaatttgtatttgtgcgaattgaatgttaattgacatataaaagtaactgatccaatttcaatctacacatttatatgtatgtttttaaatatatatatacaattattatggcatccgaatgagttatgaaaaaatacttggaggtgcaaaaaggaggtactacacctagtttggggtgtacttgaagcttagtatttaaaattgttggcttacttgcacatgctacaattaagaaatctgggtatcattatagattttatgcctgaggatggttgcttcaagtattgttgttttttttttttgctaggtccttgtaggtgtgaattta

SEQ ID NO: 42907 - DNA, 1350 bp, Cannabis sativa
atatatatatataaatacaaatgttctaaaggtatgggccacaaactttttgattaattaataaaaaaagcttttgccgcgagcataaactttttacgtacgtctacgtatgctgtcgttaattttgagggaccgtatgtaatatgttgttacaagtcttataatcctaaattctataataatgtcatttgcgaccaatatttttcattaattattaattaaggtgttttatcctttatgtgttcactgtttatttttttgtaagtgatgtgggccgacatagtttttatttattaaggaatattcttatcaactgtcctaattaatgaccaagagataacatatgcgcatgataataaaagaaaaacatgctaacactatgcattcaataattgcttccaacgtgatcatatatatacacaaaaattgactgtgatgagtagcaatagaagtagtactagtactttaattaagcttctaagccagacacttgcaaaagctacacagccaccaagacgggaaaaagaatggacctccaacgatataattagcttctacctttcaacgccttttaaacaaaccaattataacgttgtttttttttttcagcaaagaaaaaggcatcaatatacaaacgcatttattacgaagaagaaacaaacactttccattaatgatcacaagtactgattaaaaggaaaaaaaaaatatgtacatgttggagcacaaatatatagttttgctgggtgatggtagttaccaccaaattcattacatataaaaaagctagctaaagctctctctaaattatacatttgaacatatatatatccagtggggcccctaacttgttcagcagtaaaacaggtacatgaagctgctgagaaaatataaggcatacctcttcaacatgacccaaggaaaaaaagaaagaaagaaaaactctccaaaacacaattttacaaggcaacgtgtgtcccgtttatcatgacatcgttttcagtttacgtagtagagcccacgtgtgtagtatagtaaaataataatatatagtttaaggagagaagattagtgcatgaccaagcttttagacctagctttattaattaaactaataattttaagtgttattatgattgcatggcaaccaaaatccggcatagatccgaaagtctagactgcagggccaagaattctgaacttaatctgtcattttctgtccatgcaacgtgacactgttgggccatatgtcccaaccggttcttgaggtcccggttctctgctttcagctggttcacctgttcagtcagctcctctaagtgtctcttctttcgccagcgtgaccgccga

SEQ ID NO: 42908 - DNA, 2008 bp, Cannabis sativa
cacaatggaattttgattctctgtatacacaaatatataattatataaaagtataatataaatgacatttaatttttttaattcattatctcaacttatataagaataagattatatatatatcacgttctcaaagaattagagaatgatcaaaaaagaaagtgcgaaaataaaaagaaaacaagtatgaatgcctttatttttagtttgttggctcgtgaactgtcttctggcgtaagtaaaagtaggatattatccaacaatttattcatgggtcaactatatattctttctttttcttcagcaaaataacacacaaaagcagagaatttttggcagctatactaattttctttctcctcaaatatttacttcacatgccttagggattattttgggtgtcattctataaattaccaatattagtggtaattaaatggtctttgtaattttgtgaaatggggtttgggtaatcaatgagttttttagtagtattaagttagttttgtttggtgagtatgataattaataatggtacaccagaataaaattgattgattaagttccaaattaaatgtgttgtttttattcaaaaagaggtgcccgtaagatgtgctgccatggcctatatatgccccctattcattcacttcccaccccacaaattatttataaaatctttctctttctctctctctctctcaatgttatacatcatagtgacaaacggagaggacgatactggctacgaatttcaacgcattttatttttttgacattcttgaaatttgtgcattaaattaacatatttttcattgtttttgttttttgagaaataaggaaagaaacaacacgtaaaatgtcaaatccctgcatattcaaacccaggttgtctgcaattgcaattgttatataataataactcaattattattgttgaaaaagaaaaatgaaaacactattaccggagtataatctaagttaaaggtgttgttatgaagtgtttatttcaagtaatgttaagaagaaaaactaggccctactatactactataccactactactacatacacagtaaattgttgtagtacactcaccttgggctttggaaaattattattattattattaatattattaatttaccaatatttccaatcctatggcctcactcacgtgctttctctctgtttgggtgtgtggaatttgaggaaaaagttgtgggaaggcatagtagtagtagttgaaattttatgaaaagctaaacctaataactttttgcccaaagcttttcggctcttataagtcaatttttttttctttttttttttcccctttataaaaagtaaaatgctctcatggtcaaattggtgtgtacgtaaataaatatgatagagactcaaacaaacttattatttagttaccgtaagctaacactacaaatcatatgccaatataatataatgatcatacataacaaaatgagatcagtgaaatcactcctacttaataaggataattagaaatgattttccaagtaataataataataaaggtttatcattttggaatcttataatgttacaagaaattaagtacaaaagtgccatacaaaacaatccacacagacatatatatatatatatatatacagaagtaatatatagcatggtgtgtgaaaatggtaatatatgttcccactttttagaaacttgtgaaactaagtcatatattactcagcaactagccgcagacaacacacctaataaacctattaattttgacttgttatatttggacttatttaatttacaaagattaggtatatatgctgctctcctttcataccctactacccattctctttaatatatataacaagcatgtatctttttttaattgtaatatatacatatatatctttcaattttatttatattattcgaattaacaaatacatttgtagttcattgttgatgaaaattattatgatttaagtatatatat

SEQ ID NO: 42909 - DNA, 2558 bp, Cannabis sativa
agtcatataatgactttgatacttatgccgctattttccctataaattataagaaacctagtaaaaatgttaagccataacatcattccactcataagagataaatcttgctcgttgagacaaaaataaaaatatcaattttagtgtatcctaatcaacacacactgatctttgtgtgtggtgaaaaatctggaagatcgatgtgtgagtttaatgttctttggatacaactataaaaagatagtactgatgacacttgataatatatggagaccctgagtgtggtgtgatgataatcatttcaaaatactttcgctgcacatctgatttagtaccacaaaactaacattattaggtaggttaaacatttttactttcttaacaagagggtcacaatacattgtgtaatgcccctcacttcacatgtgtaatcacatatttacacactataaatcaatacgagtttttataacatactttatcctcactcgtatgttttttgtgaaaatttacctaatatcaatttttttaagctctttttaataatatagtctcaatgtctcatacctaaatatagtcttaaaattatcgtgcttgaccttctgtaagtgaaatcagattgcacaacttacctaattttctccttaaccggggatcacaatcctaaaacctcttcctcatggtgaagagcttctacagcacttgtgataggtacttctcatgactcatgacaattacagttatatagcttgatattatatcttttttaagtctaatttcagtctctccatccattatcatgtggtcatgatctctactcctcataagtaagaaaaatatgggttccacagtttaaggatgtggtttgcctgaaataaggaggcaaaatcacatgcaatttttcttccttgaattgttataaaagaagttatgaaaatgaaaacttgtttggtaagtttggggggtgcatggatggatatatagattggccccattttgcatgtgatctactaataataattactcttttccttcactaattaaattaaaaaataacttgtaataatttgtttggttcctattggttgaaagccacaaaacaatatcaactttggcattttgtagacatcttttcttgtttgggtcaatcaagggttcgaaagagatttacttggccctttaaactgatatcgatgacccaatcaaagttattggttaagatataaggtccttatagctcacacgtgatcttcaaaattgtcaaaaagatcgaaagaatgagaaaaatatctgcaccatgtaatctccttctgttaatgaaaaaaaaaaaaaagaaactttggcattttgcatttgcaattatatatgattttttcagatatttcaaacctttcattattgagtttcaaacttactgttttaagcaacaacaaaaaatatcctcctttgaacttattatacaaaatgttctctactgaaattaatctcttatgtacatatataaatatttatacatatgagttgaaagaaaaaagtctgattttattgagcaaaatcatttcatatatatttttatcaaagtttgtaactttatgattgcaacttgtaacccatttcattataattgcttgtgttaaaaacattttatttctttatttattttttttgagaaattttcttttaaacttttggagtgggactacattgtcttgctttacaagaaaagaaacaaaagccatgttatacatatatgagtaaaactaaaaccctaattaaatcaaaaccacacattcatgtccaaatctgaatcagaggcccctataagattttgtcactgttaactaaaatgttctcatatagtctctctcatcctaactagacttttttcctttgctactgttttcatcagaagctatttgaatttaaaccataaatataaatatatattccaaaattacctctaattggtctcccaaaagttagtttctaactaattttctgaaatagaagtgttgatgtgtgataatataagatccaaagatggtcaatatggttgaatgaattaaagaaaaacatatgaatatgacaagattctccatcatagcatatatggacaattcacttccaatttataattggctaagctcaagcaattaaatctaaccaagtgttccatcaaaaaaaaaaaagaaaagaaaaagaaaccaaaatctaaccatgtgttaaacaagaaaccctagctacactactacaaaaaccattaatcccgacggtcctaagaataccttttttaggggatcgtcgctaaaaaattaagtgagtgtttaaaatcatcgaaaaaaattaggtattcccgacagttttaaatactcataaggcattcccgacgatttttaagtgtgccttaaaaattgttgatttttttaaaggagaattgccgacggttaaaaaccgtggcttatactataggcgacagttttaaatcgtcgccttccacatttaaaatcatcacatatagtgttataggccacagtttttaaccatcgacaattagttca

SEQ ID NO: 42910 - DNA, 2726 bp, Cannabis sativa
ataaatatcacaagtcacaacctatatgcaaattgatgatcgactttccatgtcagagagttcaccatgtcagagagttacggcgccactagtacattaataactccaagtttactaggtatactataaaatggttccagtaagagaatgattatgagctcaaagcacgtaagccataatttccacagtaagcatattactctcctattaaagtttgtgaagctcgtttgtgttaagtctgtccccgaaacaaaagacagaccgttatgtttgcatacatcaccgttaacacattcattcagatttcagactctgagagagtcgcgaattacctccatgaatttcaaggcatatattccgctaatataattaagaagacgcattggacccttccaattaaacagtagcatcactattcaatcaaaagctcgttctgtatgaaacgttttgctatgtttagtgcctccaaattttggcaaccaaaaattccaaaagtttcttagttttatattggacattaaagcagttcaacttagataccctcctgtcagcacgcaagttggggaaaattgcacatgaatatatctttaatcataggaactcagtcctaaggtgacaatcctattaaggtgctagcaatatcaagtctacaacctctctgtctagtgtctgtaataatcaatctgtatgaattgacagcaaaattatatccagaatctatctaagcacagttatacacccccaggcgctagaagactagaactgcagcctgaacaaaaatataatccaaggaactttcttaaaaaaaaatacaaggatcttgatcagaactgcaaacacgaacttctgtagagtgtcaaaaatggaaaagaaaacgaaagaaaagttggaaccttttaatgaagatgatctggaagacaaactggtgaagaacattctttagactttgcaaacaatcaactactgtacatcctgaagacagacaatgtcatcttcaacatcaatgccttaagttattggagtagctacttctatttcatttacataatcttttgaaatctcttcaaacgtaactgttcatcctattagtagaaagaagtgccacagttgaaaacacttgaaaatgaataatgaattatatactaaggcccaaagagaaaagattttgttcaatgtgatccttgaaatgaccaaatgtagcttcaaatttccatatcaaaaaatcccatcttcatcttctgaatcttcatcatcatcggtatcccccaacatatagtcctcacccgtttcctctgcaatccaatcatcattttcctcttccccttcagaaaatgctgaaattctcacaccattaaattcagaactcgacaccacaagttcatccacaaccttatccagacgactgtcaatctccaaatcttgatcaaaatccccagctgagaacaacccattatcatcagtatcaaaaagctcactgcttctccgactcctgggaaccaaattcttctctgaaatctccccattctcaaccccagtccaaggcacccacacatcagcatgcctccccaaggccctatcccaatccccgaccaccacagtccccaaattcgcatccctagcctttctcagcatctctgaaaaatcagaatcgtccgaaaccaaaaacaaccagtcaatccctcggctcatagaatgctgcatttgcctcttcaaagcccaatccgccccttggggcttatcctccacggtcttaacaaatatcccagcacgcctaagctccgacgccaagccgtacccaaccttgggagtaagcaaagacctcgccgcctcgttgtacttgtggttcccggctatgaaccgctccttgaaacgctgtcgtttcttgcccttaagcgatcgcattcgattcagcttcttttggcgttcgcgctcgtgtagctgcttgaagtgtttcttaaggtccaaattggtcttacacttgcggccacatacattgcagacgtaggtgtcagtgtctgggggtttgaccaagcccttccgctcaagaatatcaaggtgtttacgctcgcggcgctgctccataacccattggggtaagtggataaaggcgtggcggtttgcgtaggcggaggcatcgaccacttcgccgaagtgctgggctacctgcttgagcgccatggcagcctcgtaaggaggaccacgagggggtttgttatcgaggtcccagaggataactaccttcttcttcttaggagcgtagacgccttgtttggtcttgaacatgtcgatttcggaggcagaggcgcaggctgtgatgatgggccatttgaaggagatgggtcgaaatgagaagttggatttgagggattgaaggtgatcagtgtgagggcggaagaagagggaaggaagaagtggaagggtagggaaggcgctggtagaagcgttgcatacgcatacggtgttcatttatctctactctctggagtctggacgccgatggtggatgagatcatgagagtagagagcctcagcctcagtgctcgtttgtttggaaattaaattattatttcaaattttattttaaaattaaataaaactacaaaaataaaaaataaaaaatattataattttaaaatatttttttttataatttttgtataatattaataatattaagtataccaatataaacgggacacgcatgtaagtgtacacatagataattc

SEQ ID NO: 42911 - DNA, 3770 bp, Cannabis sativa
cggttaggacaaaatcaactttacctaaaataactaaccaacctaactaacataactgattaaattattttgaacacttcttcctctaatccgtgtaatgtaattctcattacattgaaaaagcatcacatacccaaaataacaaaccaaacataataaagatcactttcattccattacaaaggccattacaacaaaccaaatatatactaccttaatacttaagactaataaaaaacctaataaaaagtaataaaagtaatgttattttatagatagatagatattaataatttattatatatattttttttggctgaaatatcattcattattttccatcacataattctatagtcgatccaggaaattattcttttttaaatgaataaaaacaattcagctgccattctattttttttaaccgattctttttaattttatttaaaagaaatctatattttcattaaaataattttcaaattgtaacccctaaaaaaacagacaaaattcacaaaagtaatggagtccaagagaaattactcacggctgccagcctcggaaccacaccacaccaaatcacaggaactaaaaggctccgagtaattacattccaagatttgatttgaggtcatttatgtagtttcatcatactcccttgcaaaataaataatcatagaaaaaaggactgtactagaatacgaacaatgatttctttccatagaggaatggcttgcagagttggcaatgtcctctcaaactctctctgtctctctcagacacactcttttcgcggcagttaagctgctccaatctccccacctactcttctcttcctttctctaacaaaaacaagggcttttatctctctaccccaacatcacttctatttctttattcattccttccatttattgttctcattcattcgttcattatttatttatttccttcctattttgctcgtatttctttttccctttgaccttcacttctacagaggtagtatcacctaaatcctcgagatagaaagatgcctctggtgaggtttcaggttcggaacgagttcggactggggaacgctgagcttcactcgcgagtcaacaaagaggaccctaaagctgtgcttgatggtgctgccgtcgctggcttggtggggatcttgaggcaattgggcgatctcgccgagtaagttttggctgctcttcaattttaattgccaatgaaatttgcgtttattttgtatttttatttcctaattttagtataaaatttgaaaaaggggtgtttgctcggacaagattaagattatttggttatggagtccaagagaaatttgttgaatctcttcgattagtattggagtttggaaattttgaagtcaaagtgaatcttggtatgaatgttctaatcgcgtcgatttgcagttaaaagttttggacttcaaatcgaaacatccttaagattaatagtttagatagttttactgcaaatttcgccactttctatttccagtgaccatggaagtttggaaccagtggttgcaagcttagccatagcctaccatgatggtaaccgcttaccaagcaggtcttactaagaaaacataaacgtatacatgtataatctcttggaatccaggttctgtgcgatgtatttactatgaaaccgtaagaaatagggctttgctttctttaatttttctaattgacgacgaggtgtttgtctttggttgtttggtgagatatgatagttaagacggaaattgttatttatgcagtatgctgtacatccaatttgtaggtttgcaggagaggtgtttcatggattgcaggagcaggtaatggctacagcttccagaagccataaattaatggtacgggtacagcacattgaagctgctcttcctccccttgaaaaggttgtgctggcacaaacgagccacatacattttgcttatacagctggtatgtcttttctatctttgctatagtctgatgtctttctctatatcacatgcatattatcagaaatagaaactatattaagtttatgcttgtatatcttttgcttgtggatcgacaattttgtgcacttgcttcttgtaaagacttattgttataagataaaaatcttaatgtatagtatgtacaagtattgtaagtttgtgcgccacatgttgaagttaaatattttttccatgaaaagtggggaaatgctaatctaggcatgtacaacttaatgtaatttttcatatctttagtatccattcgatattgttcatgtcggcttaggagctgttgcaacttcattttgactttgttgctctaatgcgtaatgtaacctagttaatcttgtgtcaaagaaaatgtatcatattttgtattgaaaataccgagttgcttctattgatggcaagaaggtgctgacatatatagtttgactagttttcaattattattaagtatttgtccttttcttttaatttgttttcctcatgcgcttttatatagcaagtgttctagtttcctaatccccattttaaagagaaaattagagtttttttttctgcttttttctcatttatcaaagattactgtgtttagaagattccattgtactgtgttgatcttccagactgttaaagtttttaatgaaagttgctgtacaggttcagagtggcatccccgtatacacaatgaaagacaccatttcattagcaatgacttgccccattttattatggattcatacgaagaatgtcgtggtcctcctcgtgtgcacttgcttgacaagtaaattataccttttattttatgtaccctctagaattatgttctttgttgtttacttgaaagaaagttatcaaaagtggtgaagtgtagacttccttacacatggtggaattttcagatttgatactggtggacctggatcttgcttaaagagatattcagacccaaccttctttaagagagcatcagctgtgtttgatgatgtaaatgcggagaaatatcaaagagataggaaggctcgacgaagcaaggtatgtctctttgcgcctttgcgcttaattttttttttttgaaaaagagaaagggcccacttgtcttagattgacccccactctgatttattaaaaaaccttgcttgtggcggaggaggactatggtaaacaaagatgtagaaaatggtgaataaaatgtgtgttgtattccataaaatagtatatatttatatacaaagctaggggagtaaataggaaactactaaatacaaataagaaactactaaatacaaattaccctgattttttacaactaatatacggttaatattctaatactccccctcaagttggagcataaatgttaatcatgcctaccttgttacaaagataatcaaccctcacctcattcaaagtctttgtaaaaatactcctaattgttctccgatcttcacatatcctgtgaagatcaggccttgttgaattttctcacgaacaaaatgacaatcaattttaatgcgcttagttcgctcgtggaacacgagatttgaggcaatatgaagagcaacttgattatcacaccacaattttgttggaatagaaatcttaaacccgaattcagtcagaagctgatatatccatttacctcacacacatattgtgccatagctctatattctgattcaacactggattagacacaacattttgattcttacttttccaagagatcagattccccccaacaattacacaatatcct

SEQ ID NO: 42912 - DNA, 2892 bp, Cannabis sativa
ataatgtacaccatcgtgaaaaaaaaaaaagattaaaatgttcctacagtcgatctgtatcgatactttctcaacttcttatttgattaataaaacattaaaagtgcttataaatggaaactctactctcttagtttaggggtttcttttggttttatgactaattttccattgagaaatatggtttttgtctgaaaataggttatgaagcaattaaataaaccctgaaattctattgctattgatgctctatacaaccaaacttctcatagaatcaaaatgtttatgtaaatatgagattgtaatataaaattttaatcatcaaacagcatagattttcactacctgatccataacggatcggcatactggacaaacaccttttttcgatttgatttcagtcaaacaagacatacaaccagccatatgaccgcaaggaatgcacgcaccttcaatgggagattcccaacatatcacgcacgaggaagaagaatcgcctccatcttttctctctttcgatgaataagcttcattgtctaaaggttgagcaaaagcatctgtggcgacatctattgacggataatggattggcccttcgaaaagatgctcctcgggaattggaggagcagacggtgctgatggaactgatgcataaacgctttgattaatgtcaccagttgaggtactttcctcattagttcgagcatgtttcgttcgattcccaggtggtctagaatcgtccacactccaaccgttgaagtcatctttcggttgttcatccatccatccaccggtgtttatctttgaaggtcgggttccaacaactggatcccaatcattgtaactgtcattgctcgctgacgttccccaaccatttgtgttggactcttcaggcgtctcgtgagaattagaagtcagtggtgtaaccccagatgatgatgttgccaattctgcagctgctactgaattttcggtcctgtgattagctgaggagtacataacctggaaacaacatagcacctttgttaaacaagacatattatactgaatgtttatccttctaaagcaatacaagaagcaagcacaagtgacataagagattcatatcagcagacaagtgacatagtaaacactttgaaccatcggtattgaatgatatcaaagaaatgcaaagacagttttccttttacaaaatgcattcaacccgaagaggaatacaagtagctccgtaacaataaaactatggttaattagaattttttttccttgaattttgacatatatcaaatcgcgtccccaaacttttcaggttgttaaaaatcctcccaaattattaaaattgttgaattcaaggacttctgttcaattttactaacaaacgcttaacgtaacgattgtccatgtactaaatcgttgctctcccaaatttccgtccacataatactgttagtaaaattaaatgaaagtccttgatcctaacaatctcaatagttcgggagaaacttttaacggcatgaaaagtttatgagggaaaaattctaattaaaactattgtattgcccctataataaagcttcaacaaaacccctaaacatacttaagaaattgtacaaaatcaccaatcataattcatctataaaatttcaaatgtgcatacaaacaaatcctttccatatacaaaaataattatcaacaaatatatttttcttaaaatttgttttgcaaacatcaaaagataaaatatatccaggtttgatggtacctgagaagttccttgacaagcggcatataatgactgaatttgttgcttatcaccctgaatagccgatgcaagtttaagccgagattctgataataaaacataagattaaaagaagaagaagcccctcaaacaaaattaatgcacaaaagaacaatagaagaatgtagctcggtagcatgattttcctttttttaagaccatctaataattcttttcaaatccacaaaatgcacctcaaatgactatagaattctagccaagaagctttagcaaatactgaatatagaaaccttttcaaatcatttcaactagtaatgacaaaagacagcaataatggagtgtagacttagcaaaatagaaatcaagaaatgagtttgagcactaagaaattacttatagaaccatcagatatagtgagtgttggatctgattgattcagattgggtttctcgattcgggacttccagagagaaatgaccatggaaggctgggcatcctgtcaacagataaatagttgcatcatgcaaaatgaatagaataatgcacaagattctagttatgaagggtacaaggcaatagcaagactgactttagtattgcctagtggcaacattttcatagtttcaatttgtgattccaaacaagtaattaccatggaagagaaagcagcaacatagctacaaaggaggtttgaaaaaaattaatgcagaatcatatgatatagcttaagagtaatagtatgaaggagtagtaatggcagatacatgaacttttcttgatatcctaaaaatcaagatgttggttaagaaataacaacaaatttctcctagtcgaaaggggttacagattattgtttgaacagaacattgccccaaaacactgctacaaaaaaaattaatttacagtgaaaattgaaagaaaagcgaaatggtatgaacatagtccaatttctgcacaaattggagagagacacgaattaattaagcacagaataccataaaatttgtctatgcaaacaaagtagacgaaagcatacagctcaaaaaccaaattatatcatgaaggttgtctacagaatcggtacagtgaataaaagtgcatgcacgtacaatacaagcagttcaaatcat

SEQ ID NO: 42913 - DNA, 3344 bp, Cannabis sativa
gtttattgctgatttctttctgaaattagataatttgtctttaaatggttattttcatatagatgtatttattcaaaatagatatgaaatcaccatatgctttttgtaagtagttaatatgtgtaaacattgtgattttaacaactgttgatattttgaatcttaaatttcagtactttcactcttgtgctgtgttcttctttgctgtctagcctatttttctgtgaaaagtaactggcattagctttggttctcacttgtataggaattcatcatatttggatactttcctggatcctgccttcatgtccttaataaaagatccagatcagagacgtaaagaacaatgggaaaaaactgctcaagcacgaagtggatggaattgtgctaaaatgcttggatttggcgaccttggtggacctccattgtctgctgccgaagaatactcacttcattcacgatatcttgccaaggcaaattctcttaatctttcagagattgcagagatgaaaattgtgtaagtgtgcattcttatccttaacatcacatgcctacttttagtttcagtatctttccaagtcaactacaaaaaatagctctttccctatgccatttctccatattgagcatttcagttttcagtcacatattgataaaactatttgcaacttgtagcgtaagccttttttttcttcagaatttcttattaatttaaacttacaaataaaactattaactattgagttgcacataagagtgtgtccgctgtttatttttttattttcttaaatatagtaaaagtagtcagaaatacattgctaaaatgtggttggattttcaaactaaactgtggttttacaaatttgcagtaattctttggcaaaattttttctggtctgccaattacttccttatctgttgatgttcaaggacctattaatttatggtttgcacgtctaggatttatattaatggttttagatctcttttaacattattttatgattatgctctgtattcagctaccgtggtggggttgacagtgagggtcgttctgtgatggttgtcgtgggagcacattttctgctgcgatgtcttgacttagagcgatttgtacttcatgtagttaaggtaatggcaactgttcatattatcatagttttgtttttgtgttagtttagattttttctcccttttcatttcatggtatcacattgtgttcaaccctgtggagttttaatctatttgattgtggttctttatataaaattattattgtgcttggtgatttcaggaatttgagcctttgatacaaaagccttatagcattgtatacattcactcagcagcatctttacagatgtaagtattgtatatggttctctctttgactattatagctgaaaatttgattttgtagggctactgcaaattataggggacttttgaagagttgtttattgatggatgtattaaggcctttctttattatattttatttttcttgttttaggaactcttatctgtttatatagttttcactagtattatttattacatgacgagaccagtgtactgaatcgggcaatgcagaattattttttcacacaactattttgtgagtgaagctccttgctgatttgtagacacatttaactatttttctgacttgcttctgaaacagtcagccagaccttggatttatcagaagattacagcaaatacttggtcggaagagtcagcacaatctgcatgtacaacttttttgatatttttgacctcgttatagtacacagccgttgtaaatctatcactatgatactgatctttattgggttttttttttatggtaggcaatttatgtcctccacccaacctttgggctgaaggctgccgtatttgctttgcaattgcttgttgacaatgtggtacgccttattttcttatggttgattaattcctgaaaccatatattttttttttcaagtctactgtaagatatatctgatattctttcttaggtttggaagaaagtagtgtacgttgatcgccttcttcagcttttcagatatgttccccgtgagcaattgaccatccctgactttgttttccagttaagtctacatattctctttatttgttcttccaacatgtatatattttgaaaaataaaatcattgaagctacacagtttgacgactaaacaagctttgattccattgcgcatgccatttgctagtctgtgtttgatgattcatatatctattctcaagttccaatggctatcattttgcaggcacgatttagaagtgaatggaggaaaaggtcttattgtggatccccgaacaaagtatgtatatcatcgaccatagcaaagaacatgaacaccctgcatttcggggatgaagcaggcccgtggactgctattgttttggcgttttttttttctttcgataatttattgtgtaggtggaattgggagtgaattgtttgtgaatgttgtagaataatgtttgtccttccttactggtgtttctcttgcataaatctttcagtgtctaaattaattacaaacgacattctttctacttgtatcatctttgatggtttctcaataaaagaaatgcaagcttgtgaaggctttctttgtgaaattaaatgattctgctgttctctcattttttattttttgtgatttgtttttttacttatgaattatatccctctagtgacctactggggttgggtaagaaaaaatgtggtagagattagagaataactataaaagtaagggaagatcgataaaaaaaaaaaagaattgaaattaaatttcattaacagcctttgagagatgagacacaaaaaattgttagagaagtgaggtgagggtagaaaagtttcacactaacaaacaactttttgtttattattttttttaaggactctaacaaacaaatttactaatgagaattttaaatagcttaaattgtagcaactggatgacagtttggatgctacaagtaaataagtatgtttaggagagatttaggtgtaatcctaatgtattatattaagtgtaatttataatattgagtctctaatatttagagtatgtatatggttacatttttattgtaactatcatgattatattttttttaattgtaataacaggttatcaataggtaaaaatttcttttttagaattacttaattataattaattattttcttaattgaatatttaacaaggtctctttcaacacttaatatttataaatatttttttttcatataaattcctattataattattttaacagttaagttatttaattataata

SEQ ID NO: 42914 - DNA, 2691 bp, Cannabis sativa
acacattgtataaataattgttatgtgacaaatttcaggttgttggagatgttctaagaattaggcaaattcttaccaatttgatcaggtactaagtcctttgagagaaaatattacttttttgagtgtcttattgaatgaattgcttattgaattctgtaatttcgacttttgttttcgcagcaatgcagtgaagtttactcatgaagggaaagttggtataaagctttatgtggtaccaactccatcatggggaagagaagaaggttgtaatgaaataacatgtctagaaaatggtgttaaagaggaaaaaccaaagtctcatcatcacatccatgaaaatggttcttatcagaagaaccattcaaatggtgatgagcctagaactccaaacaagactgaatccccaagggttggtgatatggatcaagatcaagatcaatctcattcttctgaaacaacagtttggattagatgtgatgtgtatgatacaggaattggtataccaggtatgtataatagtttatataatagaataataaggcactggtggtgtctaataccactgaagatgttatatcggtaatcatttgtaaggtgctatctcgtgatgatactaagcaccactggtgcctaatagcaataatcttaataataactaaactattagtacttcgttcacttatgtgttttctcaatgaatttgtatcagaaaatgctctgcatactttgttcaagaggtacatgcaagttagtgctgaccatgctcgaaaatatggtggaactgggcttggattggctatatgcaagcaactggtataagcatagagttgttcttttgctgctttttgttctttcaattttgaaaacttgtagaacagatgttgatacttcttttgaacttttttaaggttgaacttatggggggtcgtctcacagtgtctagccgagaaaagtgtggatccacattcacttttgtgcttccttacaaagtttcgaatggaggtgatagttctgatgattctgatgagctttctgatatggctaatcatgatgctgcatctgatgatgcaaccgagagctatttccaattccaaccgcgcactttaggttctctgttcaattccaatggctcaagcaggacacataaactcaacggtttgccaccttcttcttatgcctttccctctactgattgcatacccgaagagacagtttcggttgtaaaaccaatatcagaatcagcagtgagtgaaaattctaatcatgatagagataatggagtttttgaggggaaaaagtgtcaagataacacaacagataaactcgaaaatcataatgtagaggccagtaaggactcgttagaagtgtcaccatgtcaaaagcaggagaaatctgaaacaaaattaccatgttcaaccttagaacctaagatacttcttgttgaagacaataagatcaacatcatggttgcacaatcgatgatgaagcaactcggccacagtatagaagtggtgaacaatggcgctgaagctgtgaaagcaattcagcgccgcgattatggtcttgttctaatggtaatttcaatactccgagcttttttgataacaacaaaaaaatgttgatgattgtctaaaccttacttttcatttcaattttgtaggatgttcatatgccggttatgaatggcctccaagctacaagaataattcgttctttcgaggaaactggcaattgggaagctgcagaaaaggctggaattgaattcaatgattcttctttacagaaaagtcatgcctttatgccatcaacaaagagaattcccatcattgcggtgagtatttttttgtgtagtcctaaaataactttttcgaagcaatgttgtcaatggcgtttgcgagcatgatatgtgctcacaaaatatgtaccaaaacactaaatccagtgatgtgtcaacacgagacatacaatttaagaaagttctgtcgtgtcgtatcactggatttagtattttggtgcacatttattttgtaattatttgtgcaaaacacattgtcatgaccatttataaatatataaataaatatttatgtaaatacttacaagattatgaaaatgcagatgacagcaaatgcattgtcagagagtgcagaagagtgttatgaaaatggtatggattcatttgtatcaaagcctgtaacttttcagaagttgaaacactgtcttgagcaatatttacctccttaaatttctcttttattgtaaatgtcatgcttgtgtataaaaaaaaatataaaaaagaaaaaggacaacaaaaaaaaaaacaaaagaatgaatgaaaagatgacatggtaggaaaagttttgtaatcaatgtatcatgttttttttgtagctatttgcatatggttatcaaattgtacatagttattctcatagtgtaagttcaattttcaaagcaatgaacaaaatgtatggtagtctatattatgcccaaaatcaataaatagcaatatacgaggatatatcaaagcggtaaataaaaaaacacacacttacatgattcaacaatttttttactctattggggcaactgatatatttaaaataaagtgaatatataaaatacaaatacagatttacttaccagtagcaaagaagcaaaagttatattttcagtgactattgactc

SEQ ID NO: 42915 - DNA, 6411 bp, Cannabis sativa
ctacttttttgagtagattatccaatataccgtcactctctacttaagtatagtatataatttatattaacctaaagggtctaatagggatatcatctataaaagtgggtatatgttaaagaataatataaaaatagaggtaaaaattaaaacaaataaattaaaatgggtatatcatataattttctcaataatatataataccattatatatttgttgaaaagaaaaattaagttcttttttcaacacacgatttacaattggaaaatcgttacaatttattactaaatattgtacacatgcacatatcattaataatctttaattatttatctcttcatacaaaataaaattaagcaaatttgaaccttttaaccacaatgaaatatgtcattaaaatatgctaaaaaaaatgaaatagattagactaaaaaaaatacactattatttttattaaaaaaaaatattattatccaatatcattacaacaaattttgtatctaaaataataatccttttttaatatttctatctctaaattgtgattatctaaccatatttattagtttaagtattattttttggaatttttacattaaatactaaatttgatttttttttatatttttgtcactgtaagctcctttaaactttttttataaaatatgtttttcatttttaaattttaaaaaattatttatttacaattttatatttttgctgatgtcatcttttccccctcttctattacacgttacatttctcctctctctttcttttacttttttttttttacttttctatttatttttgttgttctatgcataagccatgtattggtttttcaaaccgtcccaaacttctgccctaacccactctttttccaatctcccatttaagtcatgatcacctctcttatataacctccatttgtttatccattctcaactttttttcattgtgtataaatcgccacaactaggtcaggttccaagtgatcccctttgcctgctaaaaaaatttcaaagaattctaagaaagctccttcgaagtcctctaatctgaaagttgaagatgatcctaaaatggatttgaaaggcattgcaagaaaaggaatgtgtaatgtccttgatattctagaggcttctgattctaaaaaaagacctcttccatttaaggttgaagctcgtaaggcaaagagaaccaagtcttcgaaatcagtttaggttctgtccgattctgacttcgaggataaagttcctaatttggattcgaatcctaaaatgaaacccaaggtttgtatattttttcctatttttgctctttttaagttgcaatttttgatcctctgtttggttttttcatttgatgtattatttgtttgtattcatgttgttaagtatttttaaatttttgtgtgtatttgtttagttattttactgtaagttatttttatgttgtttttttagtttttttgttctatttattctattggcttgtttttctcatattgaactaaatcaattcattattactgtttattatttttatttttttattagttgttttcaagttttaaaagtgttttgagggctttttgtgtttttgttttcatttgtgagaaaaggaaagttttgtgtttcttttgtattttttgttcttttttgtaaatcgtttgtaagtttatgttttttatttttatgggtttttatttttatcagttgtttttatgtattttttcaattgttttagtgctatttaagtttattttatatttaacaattttccaagtgtattcatgttttttgatagttttttctatgttatttttttgttgttcaattttttatgcccaatctgtttagatttattttttattgtactctttataactttttttttgtagttatttcttagttttttttttcagatgtccagataatgctgctatttatatatatgtatatatatataactttatatttactttgttgaattgttttttcagtttttatgttgtgcttttttttcaggttcgttctaagagttcagataagttaaaagattttggtatttcaaaaaaaaaaaaaaatacttctaatgtttattttttgtttctgttttttcctagtatatttttgtttttgttattggagtagttatttgctttttttaatgtatagttgttttatagtttatttattatttttgtgatatttttgttccaactgttgcaggaatgggattatatatatgaccgaaaaatttgtttcttgcaaaaggctgtctccactgcttcctaataggttattcatgatattaagtcttgtcttccttctaagcagcttaaaatattttcaaaaacctattttggacattttattaagcttcttgatttcaaagtgcaaccccaagtttttcacaggttgttgttgagagaggttcagcagcctaacgatgctgaattttggattatgattcgtggtgttaggcttaggtttagcattaaggagtttgcattgataaggggtttagattgtgaaggtgattgtagtgtgttggattttaagcaagatgttagcagtctttgcttgaaatattggccgacctctacctttattacataagaatctgttagggaatgtttcacaacaaagaggtggggtgattctgatgaggatgttgttatgttggtagttctttattttgttgaatggtttttacttagtggtactaagcataaaaacgttcatcggtccattttagatattgtagacagtggtaggtatgatgagtttgcttggggacggagttcatttgaattgagcattcatccttgaagggtaagcttgacagttatgttgaaagtgtaaaaaaggcgaagagtttggaaaagaagttgagtgtattttgtactttgatcggctgtcctcatgtattctaagtttggttttatgagtgttgtaaatacatgaatggtaagtactgtcaaaagaaattttttggcattccaaggattattcagtggacttataggagccatcaaactttcaaaattttgaagactacaatttttgatgtttccaaaaagacaaggtatatatgtttttttttatttatttaattttagttgtttaatattgttagtgaaatcatatttataattttacttttatatttttccagttgcaactatctattatgaaacccactcctgttgggttcaaatccttaaaattgggcagcgtcaagtttgacactgattacaattcttacaagagtgagcctctttaggaacaaccttcatgtggttgagagtgacaaatctgtcaaacttattggtttttcgaaaaaaagttgatggtttggagcttaagattgatttgcagcacactttccaacagaagattttatctgatttgattgagtcgaaagagtttgttgctgcccaatttgtttcttttgttgcccaaatggctaaaatgcaagatacatttctcatctgtgtttgctgattctgttgctaaggtatgatagttttttatggttatttttaagttttgctcaagttgcttatatatgcctttatttacaattttttaacaggataaagctagtgactcttccaatgatgatgttggcagtgataatgaagaagatattgattgagagtgtaatgaaaaaaacagatcataataaagaagagcaagatgctgaagatgaagattcgcatgaaggtagtggtgatgaaaaggaggagggtatagtgatggagagcaaaaagatgaggatgataataaaaattctgagtccaaaggaaaagatgagaagggcagtgatgatgaatgcgatgatagtgagaagaaggtagatcattagacaatgtaactaggttttagtaactttgtatgttatatttcttttttaatttcatttagtttatggattagtttttttgttgttgttgttgttatgttgttttatattttggagtctttttatatattaattttctactattattcagactctttttatgtacttcttatatttttagaatagttatattttgattatggttactttttttttaccgtttgttttgtttagttcgtttaaagttgtttttaagtttctctttatcttccaaaaaaattacaatatttttgttctttattttgtattttttatcatcaagatcgaattttattgatgtcaatgacggagttactaaaattgatgttgaggctactgttcagtcggttgtgaaagctgttgagatgatggtaatgttatttatttattcatttctggctgttttatggttcttaaagtaacataaaagcaacgttttcaatagcagacattttattatatattttttattatttaattttattgttttacctgttattttttgaatgctatcttaataatttctcgtgtctatttttttcaagatacgatcttatgcgctcatccaagttgtctagctccctcatatgcaattcgaactccatttctgtgtaagctttttccactacaaagaatggacctctgaaatgttttgcattttttttttaattttttttagatttgacaagaggtggaagctgcagtagccatgtgttatatttttggtaacacttttttttttattgctttgatgatgctttcatgtcggtcagagattaggcattgatcttctcgaaccccgaatgtttctttgatttttatgaaggaccactcccaagctttgtcattctcagaatcaacaatacagtatgtaagtgaaaaatatttttgattcttcaacttgtgtgttagaagtgagcaacgtgcctccatacacggcctttaggaatgtgccgtcaataatcatgattggcttgcagtttggccaacctttaataacagcattcaatgcaacaaatgcatattggaaactatcattttcttgcttctatatgtcaattattgttcttgtaatttaattagttatttttcagtaacagtaatatttagcaactgttagtcaatcatttaccaacccaaaagcaacttttctagtttgataaaaataattcaaaaaataattttatggtacttgggtttattttttgtagcatgtacaagtatcctggcaagagattatgtgattctttagcatttccatgtagctgactttgtgctcgttctttactacgccatgccttcatgtaattcatctttattctgtatttgtcattcatttctccctttatatctgtaggactacaatttgttttcaggtttaagaactttggttttacaaaatctgctatcaattttacagttgcttgtcattgatctccaaatcttattggaaccgcacatgtgtgttcttcttgataactccttattattatgaatgtttttgtgtttttattttttgaagactttaaactccatttgcaatttgagtccaaacaaacaatattgtattctttagagcaagatttcgctactttgtattgaaatgttttcttgattgcatagtagcataagacacttataatgtatctttgtccttgtaaatttgtccctttctattgcttcgtgtcgtttatcagtgatgataatcatttctgtgttgttgatttcttcttcttctttctagttgtttttaagtttctgtaccatttttgcaacaacaagctttccgtagtttcaaaatattcttcttaagtaggagttttctttttgtttttttttttcgttgttgtatggttgactctgatgttaaagtcacagtgttgataaaaatagaatcatcttggaactgatccaattgttgttgcagatagttgttccttgtttgtttgttgttgggttgttactaggatgttgctcatcttcctatgctctgttattatgatatgttgtcatcatcatattgttgcacatcattgattggttagatgccaaaaaggtttgtctctctacgctgttaaagtcaaagtgttgaccaaaatagaatcatcttggaactgatccaattgttgctgcagatagttgttacttgtttgtttgttgttgggttgttactaggatgttgctcatctgcctatgctgtgttattatgatataatgtcatcgtcatattgtagcacatcattggttggttaggtgcaaaaaaagtttgtttctctgtctctatgtgaaatgagtttctttgcttaatagctttatgtagaacaatagacttttgtcattcttgatttatagtggttggcatccttctttcagttgtatttatgttgtatcagggttgcattgtagtttgtattgggaatattttaccaggatctagatttactaaaaagtatgttgattaacatcctaaacatgaattctctaaaacaatgaaa

SEQ ID NO: 42916 - DNA, 2744 bp, Cannabis sativa
tacaaggtcatatggtgcaggttgggggctcctaagcatagattcattttatggcatgcttcccattcgcatctcctcacacgagatcagttggctaagagaaatttgacattagagacccttaagttcccagtttgtgagttggctgatgagagccatcatcatcatcatcatctgttttttgaatgtataaaatcttggagagggttagtggttggctaggagaagcatgttggccaagtgattttgatgcttggactcgttgggcaacggctcatcagtctaggaacatcaagactgaactgactaggttagtttataccatttgggtagatagagtctttagattaatgaatatcacttcttgataaaaaaaaaaaatgtacataaaaatattaaaataattgtatgcaatgttacatttttgacagaaggaaattctaatttttctttttttgtgagattggagaatttttcaaattaaaaaatattctaactaaattttgagagaaaccgacgagtcctcctacttttactgatctttccatttcgtgggtacgtgttacatacacacacttactcaaaaatccaacacatgttacaggatagaataaagctgttatttaataaggaagagaaaagaaaaaaaagaaaaaaaacctctgttttcttctctcttgttttggtaactgttttcttctctttctcattgccacatttcatttggcatataagtgagtacaacaaaataaacgagcctacacattaatttatggtttgctaatatccagtggtgcaagatctaatcaatcattgtatttcttctcttttttgttttgttttgtatttcactaattttgttaatgttcttgacagagtttcatgatcgagtcttagttttatcatcatggatatgaaaagagtcaaagagaatgatggaacaaagcaatggaagtccatcatgtccactgatcgaatatctgagttacctgatgctgttgctcttcacatattatcatttcttcccaccattttcgtggttaggatgagtatggtttccaagcgatggagacacatgtggactttaattcacgtgctagacttttacgacagaagagatcttgaatatcttagaaaacccaacaataacagggaccggaacaagttctttaagcttgtaaccaattgtttgaaaaacccttttcaaggtacaaccattactaaattcaagcttcacgtagatttctatggaggccataatcgaatcgatcgttggttaagatttcccttacaaaaaggagttaaggaacttgacattagtgtcagcccaacaacatcaatatacagcaccttatcacatgatttactctgcctaacaacattaactgctctcaaattgggtggcttacatttgaagatagactctcctcctacatttttagtaagccttccatctttgttagtgttggaatttgtaaatgtagtaacgtatgatcaaactttgaacaacctacttctaggatgtccttgtctcgagaagcttaagttaaactgttttggtttgcaacaacctcaagttgtaagttcgagtctgaaatccctggaattctttcaattaggggctgttcaaacagtcaaagttgaagctaagaatcttcattctttcgtttactacggatacagtggcagttgcaatatcaatctgactggctgtgctttgattagaaacctcaagttcactaaagcttggttattgactgatcattggtttgagcaattggtacctcaactttctcacctagagagtttgactttacatgattgctatggggtttatgtcaaaatcaccaaccaacagttgaaagagatttatatcaaggactctggttggcgttttgatttgctggaagctataattaataccccaaatttagtatcctttcgctacaatggtggtagttcattgcataaaatctccatcaatgccccgggtttagcttccttccgctacgctagcaaatcaataagtctaatttccatgaatgcaacaaatcttttgaatgttgatattgtacttcgtggaggccttgagaagaagacttttgataataagtggtacaacagtttaatagtttttctttcagaactcaatggtacaaagaaaatgaccatattttctggctatgaaaaggtaaatatatatttacatatgcaatttaatttgattcactccttgcatttgttttcatattttgctttgctaaatatgtgcaggctatcataattccaaacgagttaagagcgacctgtcctcctcctttgcctgatgtgaagcatttgatggtaacgactgttcggttgtttagaaagttgatgattaggaaatccatgttatgggctgcaccatctttagagacattatcaatagtgtaattttttttttcccttttttatgtagtcataagtttccttattatgtaatctaaaaatattttttgttatggctatgagaactaaattatgtttatactttccctttgttagttttttttttttggaatgttatatatacttctacttgcaactagtttatacttcccgtggtttgttctttttcctataatataaccattgttatattttgattaactttaccttgaaattataattaacatgctcctaatttaacttgcaaaactagtattcatgcgcgcactattgaaccctgaaaaagttgtaaagtc

SEQ ID NO: 42917 - DNA, 2213 bp, Cannabis sativa
atctcaaacatcaatggctggaggtatttagttcctttcattgcatacacagtttcaatatatttacagtttattccgcattacatatcgtttatatatactttattacatattctctattatagtctaacaataaactcccatgcatagaggttatggactcaataaatgagtataaaactcattctccaacaactataattctctgtaacttttaagaatttcaaattgaaatgtgtaatacttttttacacacttaatattagtgataattatgaaagttacttatagtaacagtaatgccaccatatattataaaataatgacaactaatatacattgtcatatgttacatattattaatttattacacatatttaatctatatattatatattataaaataatataacagtttgttcattttaaccagaatttattttccaaaaccaaaaaagcatgattttggaatcataaattaattaatatgtgtacgatcatatgtttcgtgctatgtaacagtaaagtagtgttcttaggaactctgcaatcttgaaggaaggataaaccttatatttatgttagttgttggaccgaaaagaaaatgataataattaatattttgaagaaaataaatagtaataaaatgataataatgacaattttgtagaccatcaacaatttataatgaaagcgttaagaattttttttcaaccttaacaattttttctgcttggcaaataattttgtttttttgaaaaataaaaatttattgattatcttgtcacccccatagtaaaagtatcataagcaggtcgaacccttcagagaaattccaataaaaataataaaattgattcttagctaaaatttgaaaacacctctatcaagtgaggtaaatgatgaatcgattcttatactaattattatcttaaatataacttaaaatgtataaaaataatcctaattaatatactaaacaatacacatatattataaatataaaatatattttagaaaaataaattaaatatttaataggtcccgtcatggcggggggtgttattctcattccggtcccatttaaccttcgcggacaaaaaataatctccatcccatttagggcatctacttaaaagcccctacatttataaaaatataatttttctttcatccaaaactttcaaaaatgtcactttatgcacaatatttcattaaaatatcatatttttgtataaaattccataaagttcaggaccagccatacgtgatgataaacatgagattctttttgagtttttcgctaaaagaaaaaaatcttggactttcaagtgaccaaatgggtgagaattttaaatcctctatcaattcaataagagtgaaacatatgtacaccaaaatattacaactaatgacataataacaaagagagtatattactatttagtgtgtgaaatcaggtggagcctctagacgaatatagtcatacatgatcccttggaatggggtggtgctatttgttcttgtaagaaaaaaagtattatttccttggaaaagttgtgagcctggaatgtctatgttgaacacccaataaagcccatgaattccatgtcttgctatagtgttgtcttttcctattactccactcctgaataagggaatatttgctccaccctcatttaccctaacctttataattaaaacaaacaaaatatattcatttaattacaacaaaaacagagaaaaaacttaccatgaaaataataagaagaatttatatatatatagggatatgattttatctcgttattatactttcacggattgtaatccgtgatgtacggcagccgtcagatgagagagttatttgatctgatagctaagattgatctaagggtaattagggttaaaaagtagaaacgtaccctaacactcatttaatgtaccctgagacctatctaatgtaccacggaatacattctgtgaaagtacatcacgagacaaaatcatatccgtatatacatatatatttattacaaaattgaccactaacattgttagtcttgattaatgtagcatgatcatacttactagtctactaatcgattagtatagattcatatatagagatttcaatggttacatttttattgtaaccatcatggatacatttttttttgctattaaatcactattaaatggttgtgattaat

SEQ ID NO: 42918 - DNA, 4324 bp, Cannabis sativa
  modified_base (1388)..(1390): a, c, t, g, unknown or other
tttttttttttttttttaacgcttagtcactcctcagttgattattctatatactattggcattatacatattaagacatacaactaaaaattaattgctatataaaatagtttatacatttagaaacagctaagccattattgaaagaaaagcatactaatatggcattggtattaaactaaacacgcgattctctataggcctatattaatacaaccttattttgctcttgaaatattattgtacacatcatacatatgacacacatatatatatagctggagaagtactactattatatatataataattaagagtaactttggtccataattaatatgatatgtcctaattaataatatttatataactaaggtttgtgatgttgggtgtaaatgtaatccaaatgagcctcagcaaccatccttctcttcagacattcttcatttttataatcacattcccttgatcccatcagctgaaaaattaattaaattaagaataagtctatcttcaaagttatatatatattatatacacacccagatcatatagctagagaagtcttacttctaaaatatcatctttagatcctgtaacaacccattcttcattgacaatctcttcatcataattcaccttttcattattaactgttgaccctgtcccaactggcatatatatacatttaataatattaaaaaaaaaaacataataaaatgaaatcatattcaataatattaatgttaaaagaataataacaacaattaatatatatatatatatatatgtatatgtatatgtataggtaccttgtacttcctcggccagtaaacgagcatccaattggaagcaaagaagaagaaaaacaaagagtgaaaatatgagaaacacatgagtgagttgggactgtttcatgatcatcatcgatctcttaatattgatttgtattattaattacacttagttattaattggttcgatcgtcacaatatatatactggtatataaagttatagttatagacttatagttttgaggagtaagaaagaggagaattataaggaggggagagattgaggttagagtaatggacgtatgtaatatgttatatatatagatatagaaagaccaaacatgaggcatgcttagtttataaatactaatatgccctcatgcctcattataagcatcataatcattcataatataaaataattattttatttatgaaaaaattgttgggtaataattgtttttagttagagcctcatcagtttttttattctatttttttaaaatattattaaaattttattttaattttgttaattttatctgaagcatttatataattacattcactacaatatatatatatatatannnatatatatatatatatttagtgataattttttagttacaacataaaatttttgtaattaaatgtgatttttagtcacaacaaattatgagttttatgattaatatatttagacacggactttttagtaacaacataagaatttttacttataattagtcataatcttattatttttaattacaaattttattgtgactaaaagtgaaatttttatagtgaccatatacatggagattttttaaaatgcatcacttaaatttatatttttaaattttaatatattttatttattttaatatataatattaatatatgtgacatatctataaaaaaaaaatatgaaaacctaaaatagttaataaaatgtattaagaatagtgttttatataaatggagcataaatattaaattttaaagaatcttacaaaataaagaagaaaatttagagtatatcatctagtctagttaactaagcatacataatttaattaagcttctacttttttaataaatataaattggatgatttaaaataatttaactatgcatcataatacatcaaaattataaaaacaaaatcaaataatttaaaatatagagtttatgattcaaacagtttcactacagcaaataaaaggttggaagtgtgatagtatcatgaacatgtcatttttgatattgatagtattaggcacgacttaatgaactcgtttccagggtcaggctctaaaaatatataggcccacgaattaaattttaaggtccttaaaaatatctaaaaaaaatataaaaaaaaagtgttatggcagttgaacccatgactttaagtattataccatccactttaactaactaagctatgaatatttattgattataatacacttaaatttttacttaaacaaaagcttaataaatttttttattttggactctcaaaaaatatgagttttagatactaatctaacccgtctatacctaaggccggcctgctggtttctgatcataaactttttttttgttgtactgtttgttgtgcatgtgtgttagttttattaaaataactatcactactataatagtatatatataaatgtggaccccaccccaaacagaagttgtacatgttacttctgtgaggatacaattccattttgagtattatttatatatataatgtttaaaatgcatcgaatgattcctctttgataccactagagagagagagatcaacattatttgggtttaagttttagtaaccaataagctattctgtttttgttaaagtccaaaaagttgatagggttttcttgcatgatttctgatcatatttctccattaaataatcttgaagatatggtttaattatctagtgattgtggtaaataagcattaccagaccacacaaatatttatatcaatcaatatcatttatttatttatattatatacataaatttgtgtggttgtcattgtcatatggtcttattcattgttaatatttttttagacaacaacaacaataataagagtcgtacatgtaaattaataattatataaaaagaaaagaaacaagcccttatgtttttaattaatgtagaaattataatggaatgtcctcaggttattacgtatatatacttttaataattatataagaagagatgcaatagtggaatttattttattattaatatttattgttgaattagagaaagaagagaaaaaaaatagtggaagtttactatgtgtcaacaagagtcaacctgtggactgtccatggtcgacagctgtttcccattcgataacttctttatttatttagctttaattaatttccaccaattccatttccatacacaataattttctactacgtactccaatttgattaattcaagtctttttttaatcagtttctttttcttataatttccctatttaatttaatctcatcaaggtaattgtaaattagtcataactttagacattgatgttaatttctttcttttgtgtttaaactacaattttatgaatatatagagatatgtgtataatatgcatacacatgatttgtcatgtttgctatatctatggccgaaaaaagagtaattaatacaatttatgtagcaactttattgtgcatcaactttaatatgtttgccaacaaaatgttatcatgatatgtatgtatttttgtcacattaatatgtcatcttcccgtttgcaacataatgtttgctacctaaatatatatattctacagcaatttaaagattctgtgtctggacgttatgtcggtacttttttttaagcattattagaatagtgtaagaagggatttttgtgaagctataaaggacttctttatgtctggtcgtatgcatataagggtatcaatgctaccaaatgcggttttaattccaaaagttctcaatccaaaaacagttttccagtttagacttatctctctttgcaatgtggtttataaggtgatttcaaaaatcattgcaaatagaatttggcctatccttcttagaatcatatatcctacgcaagtagcttttgctactataaggagtattcaagataacaatgtactaatccaggagattattcactcatttaaaaggaagaaagctaggaaaagaaggcttttttgcaattaaaattgattttgttaaggcctatgataagcttagttggcggtttattaaccatgtgctccaaagtttcaaggctccgaatagatttcgtaattgggtttctcagtgcatcttctcgacttccctgaacatttttctcaacgaagagcctgtatgaaaaatcgtttcctagtgtggtgtcagacaaggggattcactttccactacaagaaatatcacttttaccagcagagttcgctactacgctggtaaaagttacttttatca

SEQ ID NO: 42919 - DNA, 6181 bp, Cannabis sativa
taaatgtgacttttagtcataacaaaattgtgactaaaacatagcatttagacacaaattgtcactaatttaattttagtcacagtagtgaatatgtataataccattattttagaggactccgacagaaaatatacaatattgttagtatttttgagggtgtctctaactattgcattatgtgcaaggagtgtgatgaatcttctctccatctgttctggttctgcccctttgctaaagcgatttggttcagcttaggatggggcattcagacagagatggtatgtatccaattgggcgcgatggatggattggttcaaattggctgtgaaccggcctccaaatgtactatttgatgagtttatgatacatactttatgcattgttgaagaaatatggaaagagagaaatagaaggttcattggggaaaaggaggcggatatattgcgtatcactgatctgattagcctcaagatcaaggaccatttggtggtctcttcgaagaatcttcctgaagttctgagttggaccccgccaccttcatcgtcgatttgttgcaactctgatgtagcgatctccacttctgagagtgtgttggctgcagtttttcacaatgagtggggcaatgttgtagcaattaaaatagctacgacccctgcgaccaatcccatgctggcagaggctcttgctgtttgcttagcgacagatttggccgtttccttggggatgactaatattcttttccaaagcgataacctaagtgtagtgaaagagtttgaagtcttgacttctccagttgcgaatttcagacttcagtctgcgaaaggaagatttatgcactcgtgttctaagttcattgattggggtatcatccatatctcaaggaagtgtaacttcatggctcataacgttgctaaatgggtggctcggaataaggtagaaggaagaatttgtcccgatgcgttggatgcttctatgcttgatgacttagtggagtgggatcctcaccctgttactcctttacacactaatctgttttaggttgtttatttcctgttttttttttagctttgactcttcctttagtttttgttggttgttgtttgtgtttcgcttttggtatcttgtttgggtgcttttgcaccccttgttattaaaaaacatatatattaattaaatagtttccacaaatatataataaacatatttatagattttttttatatatacatatatgagattaatacataccgtgtgtatagtagcactcgctaatactatattataattacttaagaaaatgttaagaacactcccaacatattcttttaaaaataatttatttactctatttaataataaaagcggtatagcaaaggtgttgtcatttgacatggtgagaaagtgatttgtgtgtgtgtgatttatttttttgttttgctgtttggagaagatggcttcgtcgagtttggccattcacgatcttgaagaagggtatgcagatatcagtattgaaggtgaagatgatgaggatttgggcgtcgactttcttgtgcctgatgatcaagttggtcatgatcatctctgcattgtaggttgtttccttactgctcggccaattaactttgaagccatgagacatgttatggcgtctctgtggcagctaggaaaaggagtttacgtcaaagaaattgactctaatcggtatttatttcagttttatcacgagattgatttggaaagggtcgttgagggtagcccatggacattcaatcgtcaaaagtttgtttatcggaggctacaaaggggtgaagatcctaagaaggtggtcatcaataatcttgatatgtgggttcagatacatggcttacaaaccggtttcaaatcggcctctgttgtggaacgcttgggagatttttttgggtcgttcatcaaatcggttccgaagaattttcagcatgtttggcgtgaatatttgcgtgtccgtgtcacaattgatattgttgtgccgctaaaacgaaggaagaaactccggcgaagtgtggttgatccaggtttcttggtagaattcaaatatgagtatgtccctactttttgttttatttgtggtgttattggacattccgaaaagttttggtccaagctttttgaagtgccgattgaaaatattgtaaaaccttatggagtttggatgagagctcaaccccggaggaggatcaattttgttgggtcacaatggttgcgtgatggcaacgagtcggatgtggcgtttgttggccggagtagcagttcgactgcggtagtggggtggccatcttcgactaggctggtttctgtggagtttgttggaggggatcgtgggattgagcgtgcgactaggaaggaatctgaagatcttttttaagctcctaaaaataaggagcaaactgtgggcatagttggtaaggttgactatattttaaataatgataatttatctatggggaatgagttggaagatgggaatgatagcttgattattttggactcaaaaagacgccatactgtggaagcccaagtgggccgaactcaaattggaagggttcaatgtgggtcgaacccaagtggaagggtctaatgtagtggataatggtagtgagatggaggttagtgaagaagttgttgtgcatgactatttgggctcaaaaaaatggcctttcggtgggtgctagttcccaggcccaccgatcattatgagtatcaaaacctggaattgtcgtgagcttgggaacccgtggcccacggtgggtttatcaattccttgtggaccttgtggtccaaaagaaacccaattttcttttctttgtgaaactttttctagtaaagagaaacttgaaagacttcgtgttaagttgagatttgatggtttgttttcggttgatgccagagttctagtaatgactttgatgctcggttacttggctactctttcaatcatattgacatggagatatcggaagctgctgcttcttcttggagattgactggcctttatggagagcctaataggagtttgcgttataggacttgggacttgttgcgaactctgaagtgagaatctactctcccatggtgtgtcattagagatttgaataatgtcactagtcatcttgataagaggggaggtaacggttatcctcaattgctactggatgggtttaatgatgttcttgctgagtgtgatctcattgatcttgacttgttggggtatccatttacttgggagcgtgtgagaggtactgatgcatggatagaagtccgcctggttcgtgctttggtgtgttctcaatggtatcaacgatttaatctcgccaagctcactaatcttaaaatcacagctttggatcattgcccgttattacttgagcctatcatttgaaactttatagttccttttcggcaattcccctttgagaaagtgtgcttgcgtgagcccatgtgcttacaagttgtgtctgattgttgggagcattgtagtggccaaccgattattgagaagttgaagtattgtggggagatgcttgtcgtttggggaagagagtatacgggtaacttcaagaaaaaaatttcacagtgcaaaagagagattcgacaatggaagaaagggagagactctatttctattcaacgatttcgtgatgctgaactgaagctatgtgagaccctaaaccaacaagagattttttgtcgccaaagatccaaacaattgtggcttcgtgacggtgatagcaacagtaagttcttccatgctaaagctacagctaggaaaaagcataatacgatttctcgccttcaagatgattcaggtatttgggtgtcgtgggaagatacgcttcctaatgttatgttggattatttcaagaacctacttacgacttcaacatcagagttttcctcggtcattgctgttactcctagtgccgttactttggatcacaatcaacaactccttgacccggtcactgaggaagaagtgaggcgtgctttaattcatatgcaaccggacaaatctctaggacctgatggtatgacgcctggtttcttttagaaatattggaatgttgtgaaggatgatgcggttaagcaggttagagatttctttgatgccgctattttacctgatgcgcttaatgatacaaatattgtgcttataccgaagaaaaaacaacctatttccatgagtgatctatggcgtatatctttgtgtaatgtcctctacaaaattatttctaaggtaattgcgaatcgtcttagagtagttttgccaaatgttatttctccaactcaatctgcatttattcctgggcggttaatctcagataatattatcatagcttttgaagtaatgcattatctgaagagaaaacgcaagggtaatgagggatatatggctttgaaattagatcttagcaaagcttatgatagagttgaatggggttttcttagagctatgagcctatgatggaaaaaatgggcttcgccactcgttttgtggaccttgtttggctacggtcatttcagtgaagtacaaaattgttcatggcagacatgtgtcagattctttggttcttggaaggggtattcgtcaaggaaatcctttatccccttacctttttctcatttgtgccgaggggttcacttatctcataaaaaagtttgaaattgatggtctcttgaaggggtgtaaggttgcgaatggggcacctgtaatatcacatatgctatttgctgatgatagctatgtttattgccgtgcaaatgaaagggaagcttctaatgtcctgcgccttcttcaattgtttgaagctgctactggacagcaggtgaattttaccaagtgttcaatattcttcagttccaatactcctcttgttgttcgtgatagaatgtgcgctatgctgagaatgtccattggaagatgacttacttgggtctcccttgtactatggggagaaataaggatgcaatattgggttttctcaaagataagatgctcaagcaaatacagagttgggaaggtcgtttgttatcaaaggctggccgtgaggttttactcaaaacggttcctcaagctttgccaacctatgcgctgtctgtgtttcttctcccgcttaagacttgttcacaccttcagagcttaatgtcaaagtttcggtgggggtcctctaataatagaacaaaaggtgtaagttggtttagttggcgacgtctttgtagaagcaagcaagaaagaattcaggtgggcttggttggcttttgtaatttgcgagattacaatctttcctggttaggaaagcaagggtggtgtcttcttctgtatgaagacactcttgtgggacgcatttacaaggtccgttactatccaaatggtaacttccttactgctgagataggtgcaaacccaagttttatttggcggagtgtgtttgaatcccaacaacttatccgtgatggtgctagaaggagaatcggttctggtatgtctactcccgtgcttaatgttccttggctaatttctgatgtgaatccttgtgtcatttccacacatcctgctttggctcatagcacggtctcacagttgatgcacatcaatcgtaagcaatggaatcttgaggttttacaagacttgtttgaggcaagggatattgacttgataacgcaggttcctctaagtgataatgttaatgttgattcttggttttgctgtaaagagccgacaggcttctactcggttaagagttcatatcgccatctccaagaatggaaaggtgaatggagccttcaattctgaactgtggagggccctatggaaagttaaagtcccccccaaggttcttcattttgctttgaaagctatctcgcggtgcttaccaactcgttcccaactacgtactaaacatgtccttgttgatcctcgctgtgtgttctacaattctgatgaagaaaccattgtccatgttttggttggttgccattttgcgcaatcgtgttggcataggtctggtgtggggctgcaattttctacagaagttacctttgccgacttgtttaaggcatttttgacagggggtagagtggctttggtggatgagctcttgatggtagcatggggtatttggaaagctcgaaatgagcttctttg

SEQ ID NO: 42920 - DNA, 4185 bp, Cannabis sativa
ctctctctctctctccattttcttactactgtttctttccgtggcttcactatgatgagccgttacatctccaaactcaccacctctgctcaccgcttcagaaagtttactcctttattcgtatgttatcatctttctctattgattctgtttacaattcaattcattcagtttcaagctttgatttttatttacttgatgaattcttttatctgaaactttttctgggtatttgagtttttgaactcctgagcttaatgttcatttgggtttttttagggagaaaagggtttatctcaattagtagctattttatttattgactaagttttatgagtaaaagggttgttttaatgactaaaaatgttgtgaagaaatgagaattggattcaaaattgtatttttttgtgttcttttcctaatcatgatgaattagcaaccttagggtgcaaaaaagtttggagctttggtgcataagagagaaatttgttttgaacttgatgaagttattgttgattaacaataatcctttttttcaatatagatttaatcacactaaacacaactctatctcaggtttaaggtttggtagctactaaggtggtgttttgtttgaaaaaatgaaaacacagaaataggaatggaatgagattgaatgaaatcaaatttaaaatacataaattttatcttagaatgttccttctttctatttcaaaatggaatagtcattccaccgaaatgatagaaaagttattcaattggaatgatattctaatattttaaaatgctaccaaacaaaggaatggaatacaaattatttcctttcaattccattccattttattacctctaaccaaatgccacctaagtgtaacagaactctacaaattactcacaaatgagcaatgtcgatagaacacacacaagtctctttttttcgataggtttaatcgcgcaataaccctttaatttttgctcaacaggttggggttggaaatggatcaaactcaacctccaaaattgttgaggatgaaggtttatgcagcagtagtagcagtaataatcagatgagttggataaagtggtatgggacttgtatagctaaattgccagaagatgttagtaaggatgataaccctgtttctcaaatgttagttgattcatttgggaggttgcatacttacctgagaatctcattaaccgaacgttgcaatttgagatgtcaatactgtatgccagcagagggtgtggaccttacttcgaaacctcagcttctgactcgggatgagattcttcgcctggcgaatcttttcgtaagttctggagttaataagatcagattgactgggggtgagccgacgattaggaaagacattgaagatatttgtttaggcttgtctaacatgaaaggactaaagaagcttgggattactaccaatggaattactctttcgacgaaacttcctaagcttaaacaatgtggtttgacatctttgaacattagtttagatacattaatccctgcaaagtttgaatttatgaccaggcgaaaagggcatcacagggttttagattctatcaatactgctattgaacttggttacgatcctgttaaagtatgtcttcattttcgtgtttcaaatatgtatttagtatacaatgcacattattatctttcatttgacatgttgatgtatgttcatttaggtgaattgtgtagtgatgcggggtttcaacgacgatgagatttgtgatttcgttgagcttactcgtgaaaaaccaattaacattcggttcattgagttcatgccttttgatggaaatgtttggaatgtgaaaaaacttgtaccgtatgcagaaatgtacgataaagtggtaaggtacatctctaacaggtattcccgtctgtagatcttagagtataccttgttcgataagctaagtattttgttgttgttttaacaggaaaaacaatttccaagtataaaaaggcttcaagatcatccaaccgagacagctaaaaactttaaagtagacggacacaagggtgtcgtttcgttcatcacatcaatgaccgagcatttttgtgctggttgcaataggttgcgaattttagctgatggaaatttcaaagtgtgcttatttggtccctcagaggtattttttattcttatgcttgctggaatcgcctttaacttttcgataacttgatgcttttgttgctgcattttttactggtcatgaacaataatttcatagagcatcttgcacggtcgagtgcatcgagcacatatcgctatgctacattagaagttctaacatggattttctatgtctcttaagacatataggtgaaccaaagaaggtcttgttagtattttcttcttatcattatttcgattcgaatttctttttgtgatttgtgatgttgtcatgaatgatattacttttcattgcagttgttacttttcaaaaatcatatctacattcactctttccaagtaattcctttattgtgatgaaatttattttttctttctatgtggaatgtacttgcctcatcttatgctatcgccatcggtttaactcatgccatcacggttcacacattttgctcttaaattcctcggctaaccaaagaatgatcccgacccctaagtaattgaatcccataagcatccaatgtcttattcgttggctttgtttctaagtaattgccccataacttggttggtttgttctcaccaaattctactagttaaatctaagaagtaactcgaaaagcttatttaccatacattctccattcactgaggatgagaaaatgaagaagcttgtgtatgttaccgacttagttcgcctaagttcaaaatttggcaaacggggaactataacaatcttattagttctttttttcaatgcaggttagcttacgagatcccattcgaagtggtgctaatgacgatgaacttagggaaataattgaggcagcggtaggtgttttactcggtctcttcacttttctctccaaagttttatttcctcttgcccttgtttctttctgtaccgaacatggggcttattgcccacatcccgaactgttaattattgtgttttgttttgtcccgtctttttaaactgattgttgctttaggtgaagaggaagaaagcctcacatgctggaatgtttgacattgccaagacagcaaataggcctatgatacatatcggtggctaaacctttgatgccttccgaaaattttgaaggtgccattctttctctctctcgctctcgtccttagtttctttctgaatatgtctgtggaacactaatggtgtccaccaccaactgatgcgacgtacaatgatgttcaacatcttgcaccgatcattatatggcgcatcaagttgacttaggtaaccatacttttctgcaatttagtagtgaattcagtaaatcgagactggactcgagaaacatgcatgaagctgttggttcacattggtgttgtttggttaattggtgtctttcgggtgcatatttttgttgaatcagatacactcgggaagtgagagccgccatgccaaactccagcaaaagaatactcagtgctttcagtttgttctttttacttttctaaatctcaacatagttaaatcttgttatttgtttgtttatttcactcaattaagaaaaggacattgttgaaaaatattatactagaataatttaagtaatactaatagtgattgcactagagaatagagatgtcaaaaaaattggctatgcactcattttaacaattctttactattgttttggtttatttcaaagtgtaccaaagatcaactttttctttttgtacgattttttttttcaaaaaattggtttcgtgtggttttagaaaaatacagggcctgatttgtcattagaattcaattaataatttttacaaaaaatagtttaaagtgatatttatcttaattggaccatgtatcaatattgaagttgatgtaattaagtattgaattttatataatttaatgtaataatatttaaagagtaggattaaaaatcaattgtaaggcaatacatttagaaaatattaagcagcactgatatttaataacaatgctcacagttgttgacatgtttttgaaaaaaagaatagaatcattaatgga

SEQ ID NO: 42921 - DNA, 10222 bp, Cannabis sativa
aaaaaaaaaaatattcttttgaacgtaaaaatgtaaatattttacaaaaaatagtacattataattatccccttaaggcccttcaaactaaccactccaatcttcataccaattcccacctaaatacattttgtttaaattatttacaattttcacagtgaaaacataatatatactaaaatacttcaataaaattttatatctaacgtttatattaaattctagtaccaattttccttttatcgtttttattccttttacttgtatactctatttatatacaattaaattgtattgttttaaccaaaattaaaataatcaaagtttcacgcctactccaatatttatatttgatatatttagatattatttggtattgtacatttcatatgttagatttattttgttatcacttaaacttttcttttaaaatacaattttatttatatatatatataaactatttggtatcttaagtttaatgttataatttattatactaaatacttgtcatttcttataaaaatgaataagataccaaagggtatcaaaataccaattcttgtttcattttgccactcattaatgtctaccactaaataatcaatatataaaaaaatactatatttattatttaacatcctatatatagtgttaggagtgtgtctattcatttagtttgttgaataggagttagttatgttaagtattaccgtttttacttttctaaccaatttttttctaaccaattctgttatatttcaacaaactacaactgtaatcattagctatattgtcaatgttctttactgaatagtatgattactctttgtttttcaatcctctccttctctatctttccttctctttcttctttctcttcgtctctatttttctctagtttcttgttcttgcttgcttggttgttcatcgatggcaaagaaattcaacatggtatcagagctctttcccctactgtcggttaatatggcgaacattggagctagcaccaacaacactcagaacaactcgaacatcaacagaccagtcaatcaacctaatgaagcttcgaatctcaatcgttcaagaaacaactcagatgagttcaatccagtatacttgaatcacaatatgtctattagactaaatgatcacaactttcttttgtggaaacagcaggttcttactgcaatttgtggaaataggttgtaaatgttcattcaagatcgtgcccctccacctcagtttctgaatgatgttgattaagcttcgaacaatttcaaaccaacttttcttgaatgggaggttcaagattagctccttgtttcctgcctaatttcttcaaataatgacaacaccactactacatcaactgaacaaatacctactgctactgtcacaccagctcctgttgttgaaactgaaccagcacctactgctactgtcacaccagctcctattgttgaaactgaaccagcacctactgctactgtcacaccagctcctgttgttgaaactgaacaagttgctactgcaaaaaaagaaatcaccactaattctcatgccatgcaaacaaggggaaagtctaggattcatatacccaaggcctatctcactaccaagattccaagaactgtatgtcaaagaagctttgcaacaagaataatggaatcatgtcatgacagatgagatgctggctttaacaagaatggaacatattctcttgttccattacctaaaggaaggactccaatacgctgcaaatgggtaattagagaaaaaaaaaaaaaaaaactctaatgggatacatcacatgtacaaagctcatcttgttgctaagggctttcatcaacaacatgggttcgatttcactaaaactttcagcccagttgttaaacctgtcacaattcaaattgtcctaaccattgctctgtcacatggctggtcaatcatgtaacttgacattaataatgcctttctaaatggcactttgaatgaagaagtttacatggttcaactcctaggatttgaaattgcttcagcccctaatcttgtatgcaagttacacaaagctctatatggatttaaacaagcatctcgtgcttggtttgacaagtttcaccattgcctcttagatcttggttttgttccatctaagtctgatcactctctcttcatacaacacacttcaacatacactaccttattacttctgtatgttgatgacatacttgtaactggcagtaacaacattgcaatcaaaaatgtagttgcaactcgcaatagcgagttttcactcaaggacctcggtgacctacactattttctaggaattgaagtgcaacaaacctcatcttgcctacacttatcacaagccaaatacatcagagacttgcttttcaaagctcaaatgcatgatgctaaaccaacacccactcctatgacaagtggtcttcgactctcaacatatatacggctgtgaaccagttcaagacccacatttgtattgatcaattataggttctcttcaatacctcctgataacaagacctgaaatctctttcaatgccaataaagtctgccagtttcatgcaaaatccccaattaagtcactggttagctgttaaaagaatcctgcgatatctcagtggcaacattagttatggtcttcacctaaaaaagtctcctctggaagaagtagtagcattttgggatgctaattgggccactaacatagacgatcgacgctctacttctggcttcacaatcttttatggatataatctggttactttacagtgcaaaaagcaacacactatttctctatcgagtactgaagccgaatttcgaaacctagccagtacagttgcagagctaacttggattcactccttatttactgagttgcacatcaagaccattcaacctccagttatatggtgtgataaccttagcactgtacttctcacagtaaatccagtgcttcatgcacgcactaagcacattgagcttaatctttattttgtgcgagagaaaatcatccaaaaacttttccaagtcaagcatatgttccagctcaagattagcttgctgatggactcacaaaggcaatctccacttaaaggtttcctctatttcgatccaagcttactattgaagacatcttagtttttcaaggtgcttctaattgtaaccttgagggaccgtgttaggagtgtctattcggttagtatgttgaataagagttagttatgttaggtactactgtttttacttttctaaccaattctgttatattcaacaaactacagctgtagtcattggctatatattgccaatgttctttactgaatagtatgattgctctttgtttttcaatcctctctttctctatctttccttctctttcttgtttctctttatctctgtttttctctagtttcttgttcttgcttgtttggctgttcatcaatggcgaagagattcaacatatagagacaggttttatgaacacatatttttacataatgttttacacaaattttaaccattagattgttaacatcagaagactcgtcattgcaacaatcctcacatactaagaattttcttatcgagaaagtaatgaaggattacctaccgagagaagggaggagctggatttcgaagggtggacaaaaatcgtcggagcccttatttcaatcgatttggaggagagaaatgaacaatgatatttatttttaaaataaatctactccaaaattaattatattattaatattataaaaaaaatagaatgtttctttttgggataacaaaaaattagaatgttaattatcctatgatactaaataattataaaagattataaaattattttgaaaatacttttatacgatactaaataataataaaaaataaaagattataaaaaatgaaaaagaattccaaaaaaatattaaaaattatttatgtaaaattatgatattttaccaacgcagtttgcgagatgcgctggtaaaagtgactttatttgctagtgcattacacttttgtgctagtaaaaaagtatcaaggggaggatatttacacggattgctatgccacttgtgctgataaaaataagttttgtcagtacaattgtgtgttagtaaaactgacattcttactagcgtagtttgcgagatgcgctggtaaaagtgacttttacaagctcagtagcaaattgcgctggaaaaagtaatatttttataagtgtgatgaatgggcaaggatgtaggaatgacaatttgtgttcatgggtcatgtttgtgttatgtcctgttatgttgtgctgtattgaggtttaagtattacaaacaaatatcaaactcaaatttactccatttattaattgcttgcatcgaaaactaaaactcaaatacgacgtgtttataaattggttgacctgagacaatttatgtagtccatttatttttttacgacactaaattatataaatgtttatacttttaaatagatcgttatcgtattaattttaattaaaacttatttcgtgcgagttatgaattgcgtctaatccattttgtccgagaatatataaaattttatatatagagaacaaactaattattatagatagcacaaatattataatatattagagagcatgcaaatataaccacatttcccatcctcataatatgattataactacgtacgtactatgacaaaactaagaaagacaaaattggggggaaaatggaacaaatgcgtaggtgtacatttgatatttttgcaaccaccgacagagtgagaaaattaattaacgttatgtagttgtagaagtaataatattaattatgttatataattaattcaacatttgagaagggttagtacttcgttggatgagtcatgatgatgagcatagtccttctgccagcttggccttccaagggtgaactcaaggttaagacgcatattcgaagaagatgacaatgacaatgatgagcctgaactcactttctccacctacgtacgtacacaattattattattattatagattaactatatataatcaaccatattaattcattaataagtataatatatatagaagtatatatatatatatgtatgtaccttggcaccattttctctgaaatcttgatcatgatcagcaactgtccaaccattttcatgacttgaaatgcttctttcaatgggacgacttctgcttaattacaatattaataattgttcttattagacaatacccttaattaattaatgtgcatttctttttattgcccctagtgatgacacaattaatttcttacactaaaatgtaaatgatgaattgatgaatattgttacaccaaattaaagtttattacaatatcatttgactgttttgtaggaaaaacaaaagtcaacaaaatccagctacaaaatcattaattacttaattgatcggccagggccaggggtatggcctcatgcccttaccccatacactacaccatttgaaaaggactaataaattcctagtaatttgtatctaaaaaaataaaataaaataatacaaaattttgtctgtcaaattgtcacagcattgagatttgtacaatttaattaattaattaataacgttcccttattgactttctcttctgagagtcttttagggtcaagatacttattacaatgcgaggtgtggtactcggtacaaaaaacacgtaagaatataattaataaatattaattattgaaacttttatatatataagttataacaaacagctcaaatgtataatttttttttaaaaaaatagatatgtataaatatcatgtggacaaaacaaaacaagataaaatacacatatgatcacttacgtatataggtgtgttacttaaaaagttttattataaaaacgcatgaaatgtatgtctaaaaaataaagttgatgtgttatattattatttttatatatatatatataataaatatatttataagatttgaggttgagatcaataaaagcacttacacatgggaatgggaattagttggtagtcctaagtggggttgagctaatatctcggaagataatactccatctgatccatctacatgctcatgctcatcattaacaatgttcttattattgttattattaatccctactactctcctaatttggtttaaacccaaatctgtctgcccttgtccttgccctgcaattaataaggacacatatatatattatagagttaattatatattttccacactaattacttgctttattatataaatatatacttgatatgaaataaaaggaggaaaaggaaaatccaattacacctgctgctttgtcagtactcttcactgttctatacatctgtataaataccaaagaagaagaaacggtacaaattaatttttttcttattaaaaacttttttaaaataaaatacataaacaaaaaggtccgcattgtaaagattacactagcctagatgccattttgtcgttacttcttgttctcgaccaccatcaaaattaaagaataagataattattaaagaataagaataagataatgataagaaaaatacaaataaggctctatatatatatgtacgactttcctccaaataaaattaaaatgacaatgaaaagaataattatcaataagattaattaagcccacctgtaaatgactcttgacgtgagctagggttagatccttaacattcatcaactctaatacagatttcggtgttgctcctgtataagaaaacagtttaattaattaatgaagaaaacataataattaattaatgattatattatacgtactttcatggccaccaagaagctgaacggcgtgaacaaaatgagcatgaagggttgtggtccatctcattctaggagctctaacacttctcttcattactccaccaatcgatctgggatttctcttcattaactcaccactacgcccatatatctgagcttggtgaccatggaaatggtacttatgatgatcaatgctaatattattattagtactagtattgttaaagcttgatctaggtagatgatgaagcagtacagctggtactactgatactggtggtggtggtggattattatctttggtttcaaaacctaaactcaaggtgggctcctgattataacaattagtagtaatagtagttttgatctctaaaccattttcatggcttaaatcactgcctgtagtagtactgctacctgaatcggtggtggttgagctcctcagtagtaatacctcattactattattcttattattattagcttcagtagtagtgatggcatgataataatctggaatcgaaggtgggctaatctgcaacgaaaggtctggcatagatgatgatgatgatgacgatgatgatgatgaagtagtagcagtagtaatactagttcttctcatcattttagtggtgtggttagggaacattattactgtgtgcaggagaaagagatatggaatattgggatctagaaaaagaaaaaactttttgtgatgaaaaatctcttaaagaagaaaaagtagaaagtagaaagtagaaagtagaaagttgaaaagtagaagtagctagagagagagagatatggtgttgattaaatcatgagtggcttatgattttatttgcattggtgttgaggaagagatgaagagatcgatagacgtggacgggaactatacttaggctttgcttttttaattatatagagtaggattgattgataataataaatatttaataagaactacattaaatgtatatagcagatagttttgccagaaaaaggagaaagcaacagactcacttctttctttcttttcttttgggagaaagattttaagggaaaagtaattggtatttaataatcagaagaaagagaaagagagaaagagagatagagacccttttccacggagagataaaataaaagaataaggagaagaaagagggagggaagaatgggtatggtttattaataaatgatttccccttatctttagggtggagaatattaagagagagagagagagagagagtgaatgaatggaggtttctgaagggaatggttggaattcgagaaaacaaaaagggcattgttcaatggaatattggaatggggattgagtctctttctttaatttccttttcctttccctttccctacgttgatggatcaagacagacctatatatttaaatttattatatcttttctttttgttatgagattttattctgaaataattatatatataaaactttaataataataataataattaagctctagtatatatagctatataatctagctagctggctactctgaaaaatgaattagaatattcccattttatttcatgaacgaggattgagtggcaggccaaaatatccctgtttaatcctccctttattggtttctttctcgcacacgtggcacgttactatatttacaaattaattttcaaactcaataattttctcccattccataacaattaacattaattaattcgtttcagaataggcattttatggtacgtacagcactgtaacttcttatgaattatattactgaattttttatatatatagtaataataactctcaacaagataataaccctaataaagcagcttataattaaaaacactggtgagtggtgacatcttatatatatacatatatgtacatttctcaacggtaaatatctaatacttttaaattcctcgtgctgaatgttaatttcacgttcaaactctgatatgaaatcctgccaaaaattaattattttgttcaaaaaggatttgattaaaattaaaaaattaaatcatgcatgcacttatttaaaatatataaaaatattgacatctctgatgacctaatattttttattttatgaaactttgatcagtactctcatcctagctatttgattaattacaccatgataactatatggccaattctattcgagctgtacacgtgcgatgctcagcagatatttttctcttcaagccatagtaataaaaatatgatataatattagcttggtgagattgaaaaataagaagaaaaaataattagtgccctaaacattgagaaagcgtcaatataaatatatatagttattaattatattcgtatattaaattaaattcccttagtcagttatatatagttatatatgtcacatattttagttataaactgtgttaatcacttaattgtggactatatagaagtgagtaattaattaagaggccgggttagatggagcgcgtgaggtgagggcgcgtaaagagtagtaggatgaggtgggtgaaatttgaaagggtagcatttgtctaatgtggaggggctccaatattccctctccgtgtccaaatattcccaatgccccacccacccgcgcgtggaatcagaccatattcctcggcgtcaacatggcttccgctcacgtgatgacacacatatatatataaatatatatatatggacgtgaccttgtctagctatctcttattacagatatagtgatcccttaattattattcttacttctcattttcttaacctagctcaaacccccatgcatatgcttttaaattacaattattaattaatttacagaaacaacaacaagatgactagaaaatgataatgatttgttaatagatttcgaagccccggtcagcgcctgatgcgctctagattctccgggaaatgagaaactttgtagttttgttatatgtattagtttaattaattaattaattaataaattctattctcttgttggattattgaatcctaagcttgcagtagggcaatatgcggtcaacatgtctctctatggctcacttctaatgttgtcaaatgctttggctacatatatatatatattccatattccatgtgtttgtcttataatgtattgtacatcacaccacctaattcattattattaatttcttcatattttttaatattaaaaaatcttttaatattttgtttatgtcggttttataatttctttcatgaaaaaggaccccatttgttcacgtcgagacaatcttcattgcttactaatttcaattcaaatactatctattgattaatactatatatat

SEQ ID NO: 42922 - DNA, 5357 bp, Cannabis sativa
  modified_base (1561)..(1573): a, c, t, g, unknown or other
  modified_base (4877)..(4880): a, c, t, g, unknown or other
atttttaacggccaaaaaagtttatggggcatgatttagtatatgtcaaagttcgagaggaaaaattacaaattgcctttgttaaatgacaaaatgaaccttttattttccaaaatggtataaataagactctattgatttttttgactaacttgaacagattttttatcaaaataaaatttaatctaaaagtgttattacaaaactatttacatttttgtatttgttcattttaggaattgtctccaagttggttatgttaaaaaaaattatcaaaaagtgggtatattttaataaaatataatataagggtatttttgattaatgaatagaaaaaaagtatttttcaacttatcttaaattataatttaaatattattaaagtcaaaaattaaatttaattatttatttacaactaacagttaaatttagttatttacactcaaaattactgaaaaataccaataaaacccataataaatcaattcttagttcttagtatataagacgaatgttttctcattaattaattaataaaaaatctcttcttctaagaaggaaatgagggaacgaaacataacaagttacgaaaatgatgaaaacaccacttaaaaaaaaaaataccgtgaaaacacattgcatgcatgagctaaaatatttattttcttcttgttcttctaattctttttcattattattattatgaataagtattgttagatatggtaagggaagtttaaaatgggatggagttaattaatttagatcaaagaaaaacatatataccttaaaggtgccaagggacttccatggccattcagtgaggattccaggcgtagaagccatattctttctctttcttctgatgatatttatatatatttatatatatttctctctaaatctaaactgaatttgtgaaatgtgtgctccaaatacttggtggaaggcctcttttatatataaatatatgtaactgcttcctgctagctgcaattaataattatatgccttaaattcaaatgcgacagattttttttgagaaataaatataaaattatactatatattattttttaattttttttccaagtataatttgggttgttctggtaatttttatgtgagttgctatgcggattttagttgcgacttaagttgctccgttagttgttatagatgttactgtttgaagtctaaaaataaaaaacccctaagaaataataaatgtagatatttttttgcaataaaataattttgagttctcatacatatacctaactaagcttatacttttgtctttcatatagaaaaagaggggaaaaaaacaaaaaatattgggaagttttatttacacttcataaaatgataagaatatcatattattaaaaaaagataaacttaaataatttttaaaaattactcttaatatatttttttttttttttgaaattttctcctcacattattttattttaatttcaatacttattttgattttattttcatatttcttttctaaatcatgtatatattctttttttctaagaaaatttcatannnnnnnnnnnnntaattttttttttcataatatttaaaatataatttatttttgtttaataggtgtttaaggcagatttttgttaacaaaatatataagaattttacgtaataaatatgtaacagaattaataacgacaataaatgaacaccagatatttttacgtggttttgtagttaaaatctatatactccacgagtccttcttattagggatgatgatttggatacagagtacaattttctcagttaatgtaagatataatttttttctctcaaattttcaatccctttctcattgaactctgtccctattcataggtgtatatgatgacagttattattattgagatctaatcatttgcaactgttcatgaaacgtggataatacacgtgggataatatttaataactatcaaactgctcttttgtctttatccttaaacggttatgctaattttgcgggttgttccttactaagtatgagtagtccttctttaccgtctttgtaagaaaacatgctaagtataaataaacttctcctcgcaatattcttgtattataatgatattagcgaggtggttgttctatagtatatagagcgagatgaatgaatgcagtgattatatccatgtacacacatgtggattaattagttgcaagcttttactcttcagtatgtgggtcaatgagttgtaagcttttactccccagtatgtgggtcaataagttgcaagcttttactccctagtatgtgggtcaataaagttgcaagctctttgttatcttgtcttaaacactgctattatgcattctatctatcccgagatgaatgtattgtctcgtcaattgtacccgttaatagttattattcttatcttgcatatgcttatatgacagcgaatttgaatatttctatcaactataatatctgaaactagttatttaagtcgtgtttaataatgcaatttaatcctgtaatcattgagttgattcatatcctcctaaaatacatgtgtgagcttctggtagatagccaaaatttcgggtataataattgcctcctaaaaagtactttttaattaaaaaaaaaaagagtttttaaatattttcaagggtactattgttattttcacacttaaaatttgcatgcttagaatttgacagttcaaaacatcgagacaaaatttctcatttaatgctccaactgttcttttcttgtacagttcccatccatttgatcagattacactagatcaaacggttgctaccttttagatatatatttgaaactatacaccatttttgccatttttagacttttttttttaataacgccatttttagactttaaacctccaagtttcaacaaaatctcaaccaccctcttattagaaatcgtatgccttctctgtctttcacattcttcttgcgaatcttctctgattgtgctcttttcctttaaaattttaacaacgcaacttttcaatcattagaatcttcatcgcgaagttcttttttaggacgaacatcttcacaaatcaataagtgacatttctctttgctaattttttcttcatgcttttgatttcaatttcttggtaagtgtttctcctatctgcgttgttttgctacttaggtattttggttttaagtgtttgaataactctagggttagaaatgtattccagagttcacaatcccaaaatccttagaattagtttgtcctcaaatttctgtcatacaatttaaacccacacctcaaagacctaaagccatacttgaaataaatgatgaaaaatctggaaccatcttgttaaatctggtcaggatgaatcctctagccattataggtgattcttacaacaaataattgagggtaggcgccattatttgcgagaagtatcttggcctaaaccctccaacttaattgatattcccttagcgaggtccatatttttacctccagtcactgttgctctttcaccaggtcacttagattttaaaataatggcttagaaagctcgtaaatccaagaccccttaggatcctatagttacttttgaggctgaactatagaatccaaaatcaagtccattggaccttacgtcggggatgtttcaaggtcatgcgacatcaagaatgagcaaggatgtcgcattaggtccattgcaatggaggagtttagctgttatccacctgaatgtctagtttgagacgagggttgtagtaccagcgagccttctaggataggcgcttgaagcctcgttcatataagagttggagcagttctccctcttaaagattttttcaaagacttttgtaactacctcagtattgctccattccaattggcaccaaattcatacaggatattggcctgtttaaagtctctctatcatattctaaagtgggagtgtccgaccccactagagattctttacttttactctgttaaagcctgcacagcaatgaagcatggtggaagaggtttttactatctcgggacccataccaatgatcacaggatcgttgtgaggcggcccaacaaaatggagttcaaggatgacttcttttagaccactagtctattttccatcaacacaataaaatttcaaattatatataagtataacttttctctaaaacttggatttgagttttaatttctatatatatctaccatactttactaatttagttctttgctatgctaacagcgatcaccaggagaccactcccaactcctgaaatcaagaaaaggcactaaatcctccttgaccttccctatcggatgcgagcaactgacttcttattgcatcgaaacaacttgaaggcttgcactcctcttgttctaactcaccatttctttgatttgattcagccaggcgttgcttgttttccaattctactagtggaacatacttggtagaatcatatgcgtcttcacttcgcctctctgagatctattcgccaattggattaaagtttccatcatttctcccagtacgtgggatttcaattgtgttggttctttgtgatccttgaggttcctttccagggtgatcagttgtttcctctagatggtattcttcatttcgagggatattattcgccatagatataggtttgtaattgtatttagaatgagggtatttttttttattataaaggctctcaatgaaagcactaaactgttaatgcagattttggttaactaaatatataagccttttgcgtaataaatatgtaacaaaattaataataacaataatccaatgaaaaattaattctatttatttcaaaattaattatgnnnntaattcaattttaattaggttaaactagtataattagcctaatacaattatttaaataagacaaatgggccttcacaattggggttgttcatgtgaggaaggacatggtccagtatgtcgtacccactattaatggccccctaactctcacacaaggcccaaagaagaggaatttaacttttcatcaaataattgttattcattgaataagttcaatactaatttgggcctaaataaactatcatgggtgatatttattttaacaacctagtccatttaaatatctagaagtaaatgggctttctatatgtatctaagcccaaaaacaaacatataggctcacacagttcaaattgatttggatatgccctatcatatttattaggtttacacagatgaaagaaatacaaaatttacctgttataaattatttataagatctattgacaattagactataattaaaatcagatcatt

SEQ ID NO: 42923 - DNA, 3870 bp, Cannabis sativa
catgtatataagcctagtctactcggattagacaccgagtttttcattctatttttttcagagagtttcgatgattgtattctggtttagttgtgagagcctagctcggtgtccattgtttaagattgtttgtttttggtccttagttcacttcttctgttaagttcttgagttgtttttgttaatccgaaacacaacaatgtgtaatactttcaagaaagtgcttactgatcttgaaacaacagttggaggcgcgccattaggccggaaaatatatgcacccgaagcctacaagacagattactaaagacattacttagacaaatttattgcttagaataactcgaaaaaccgtagaacatgaagtgcttacctgagaatcagaatcgctaccagtgcttgaaccataccagagatagctctgttgtatcggtacatcaaccttgtaatatatcacaatcaaatcagcattattttagtatgtaaattctaaaataagttcgacatataaactaaagttaaatttggttggtttgcctgattttgtaatatgctactttttgtgattaaacaacttacctcggttttagaattgtacatccgttttagttgtcccgaggtagacgaaaatgtcagctttaaatttccaggaccaacttctatggtgtcattttgtggactcttcaacttggacagtacatgcctgcgttttcctgcaaaagtttagaagttaatgcctcttaatgcataatattaatggcgagtttcgtaagaatgaactcatgtttcaaattagagctcaattacctgcactactagatccctttgaaacaaagtaagtattccaaccgagcgggggtacagaaactcgaaaatgaagccaatagtttggagcttgttttgttgattttcccaagtaagcttgtgtatagaattttctcaagttctttgtaacattgtctaaacttacatattgtgcctcaattgtattgcctgaggaatcttgaacaactagattgacatcattaacctgtcgaaaattgtgattctcagaccatattgaagagagtataatgcagaccgagcaaacatgtacttactggtattttaacaatgtcggtacgaggccaaccgagaggattgtatgccactaaaacctgaaattgtatgagaaattaagacaatgaatctttaaaaatctgaaaagggtatggaaatctcaaaaaatattaccaaactttttccttctggaatgtcttcctctgttggtgggcagtaactaatgttgagtaattgacactgtttaaatcattgtaaagaagaggacaatgaaattagcatccgatctaatccaactttttttgttatactccaattcaatccaattagactttaaaattcaatcaaatccaattagtttagtaattggattggatcagttcttttattagatttcaattcgaaacttggattggatcggtttttagttagattttaaaagtgtcatccaataaccgatccagcccaattagagtccaactatacacatccaatccgatctaatgttggatatccagttttttgtaattggattggatttgattaattcggtacaattggattgatttggatctggcccacctctaatagaaatagctacatcaatctagaaatatgacaaacagaaaaaacttcaagatagaagcaattaatcaaatagtattacctgagaaagtttcaattcttttggttcacattgttctcctgatttattattcttggctaaacaagaaagagcagaattgaccacaatttcagcctgttaagatcaataaattagatcagataccaatgaagaaattcaacattagagagtaaaatctaaagtcattatagtttttcacctcggaagaaccaatggctaggcgtttcgcatagtcatctgtcgtatgctgtttagctgtaccggtcacagcatcatgatgctgtgcaatgcctaaagcatctccaaggccaaaagtgttgggacccgaggggtgctttcccaccaggaattcaagttgccttgctgcctatttttggtacatgtcaaagttcggggagtaaaaatcctaattaacttaaactaaatattacttcttctgcttagtgaatcgagagaaataccaaataatatccactaagaaaccgaacatatcgctttagacctggtcggctagtaaagtatccagtccaataagcatttttgctatctgcatacctgtaattgatgaaaagaaaggcttgtaaacaagaattcaataagtcttgctttgttaaacaaaaacgtacttacggaaaatagtcttcggttttcaatggccatgtctcatttgctgcatattttgcatcagtgtacttagagggtgttgaatacaatgcattaactcgaccgtcctgataaatttaaacagtttaaatgcaagttataactaagaaatttgcatgaacaagaaggaaaatttcaccttgttaacatagtgaatcaacttgtccatttccttaaaccatgactcggcatactgatactgaaaatcatcacccattgtccacatgatatggtttgtccttgtcacattagcctatacagaatgatgattaatcagtaagaagaagctttgaaaacaaaaattactgtcaaatatagatcattggaggtaaaaagtttacttgggttatggctgcatcgatgaaatcttgaactcgcctttgaacattgaagtcaaaaagattaggattatcctgccatttatttcatcaaaaagtgaaaagtgagatacaatgggaactagtttttggatatgtttggtagaaaagcataagctaacctggacaggtacaaagtcatcaaacacttcgaaatgaaaaccattgggaggactatagtgaactggaaaggcattggtgaaaatctgcaaagttaacaaacatcagaatcactgaaacatgtgagttaaaattgtatagagaaaatagaatgaatcatgaaccgaacctgagaagaagaaccaaaagttttggaaccgcgccatataacttcaagcgatttatctccctttcgctttgctctatcttgataatcaattcttgcaaaatgtagagactcaaatccaagctgcaacataaaaaggtaatcttatttccagagtaaaaaaaattctgaacttaaaacagaaaaatctcgtaccaaacatggaaatgtgaaagatcaacataccgaataatagctaataaaaactagtggattgaccacaaaccacaattcatcatgagaaatcgaaacaaaaaaattgtcattttttgaaaaattattgaaatgttatgaacctcagcaccaagtaggtaagcttgtactgcagagtgtccaaaagggtcaatttgccacccagctctaggaaccttgttgaactgtgatttaatgtagtaatggcctagtgttgtttggtcaatcatgtctatataatgtgtggttgcttcatcatgcatacaccaaccgccatttctgcaccccaagaaaaaaaaaacaaaacatcttaataatctaagtaccaatgattcaaatgaaataattggcaaaatggtctctttttttcaagccatgtagcactcaaaatgacaatttaaaaatttagaccattagtcctgatgctatttgcaaagaattatcgaaagagtattattattgagcatcagtggtgtctagcaccacctagaagtaacgtcttacaattggttagcgatattacttaaaaattattatattaaattacatgagacatgatatttaatagctttatgacacttgaaaatgtgctaggcaccagttgtgcc

SEQ ID NO: 42924 - DNA, 4622 bp, Cannabis sativa
cggtgcaaagcaatttctgcaccaccaattccgctaaaaatagataacactgttaagccttctgggtacattgccttcaaaacagataggtgatatcccaaagtatctgtctgaaagcaatatttcaatgattgaagtctttccattaaactactatatgattgagtatgatttcgggggtaacccaatatgctttctaaacactcgggactgataggtcccaacttgttatggccaacccacatgagatttaatgttcgacaatgatgaagtatgttcctttgttgctcgagtggaagcattccatcagagctagagagtgtccttccaagtctatcacacagcatagatatgccattaacttctgagctgataccgttcaattgtttgcgtgaatcccagtcaggccaccatttctttgtatttggtatcgcatcttgtatggtcattggtggctttggaacgatgtgaaatctgtcttcggttgggagattgtgtatgtagccttctttcctactcaaagacgagaaaaaatgcgtatttacaaactcaggctccaagttgtacaagaacttcgagatttttacccaagcgtcgtgagataaattcccgagatttgcatacaagaagtatggagccttggccactactccattaagaatccttcgtgtcggtttaggtactccatggttggagaagtcatggtcggctttttcttcaagccaagttgggccacaaaggaaattactgcaatcgtcatcatattctggttttggccttttccctctttgattttcattatactccattcgtctgcactgaggaacggtgtcataataaccatcaaggtgctcatctttaggtctcttcccgaccaagccagtgtctacattggcattcatctgttgaggaattgcatatgaagaagaagcctcggtcttcactcttatcgagctaagtgctgggttacttgacgaagaagaagcaccgtcattgtttgtggtgcaaaaaccatttgcaccagtaataattttgggctgcagcgcaaaaatttaacactgtttagcaaaccactaaaagagaaaactagaatataaccatcataaaataaaatttataggaattaaaatcaaaatagaccctcatgaaataaaaccatttcaatgacattaatgaaagggatatgcaaaccaaccattatgaaaataataatctaggactcttatagaacgcaacgcggttaatgagctaagaaaattgggacataaatagcggaaaataaaattaatcagaaccttaatgtctcgaaaacttccatcagcattctgacaggaaaaaatcgaatccgcaagctctgagattgatactccatgacctagaaataaattaaacaaggcaaaatttacattgggatagtagatatatattatgttcaactttccccttcctgtcatcgaaaatgactgatattaaaagaactcaccaagcttatcaattacccaagaaacttgagtctcagagaaacccatcttaagcaaatgaagtgttttgtccatagtaccaaacagagtttcgttgtttgactcctgaaaatcggagagcatactaacattacaaaccatatataaaacgatgaggaaaagtacaatgcatattaggaacaaggaattttgaatatgacacgagaacgtaatttatcaacacatcctaaatatgcaagaatactatactattcccccaacatccaaagatgtgtattaatacttaacgcgagaatcaatcatgacctcatttttttgttgaactgtttcatcattatcctcatcaaatttcacagccatctgggcagcaacaatgaagtccactatttcatcgatcggagtatctggacctgatatgcagataaaagaaatcaactaaagcaatgttgatatgttaaagataaccaaatgggaaaagtgcaattataaacacaatgcaaaaacatatatatatatatatacataaacacagttatagagacacacaaaacaagtgcacagcaaaaaagacagattcaacgcgattagcagcaatcaggcatgtgcttaagtaacctttaatgacacccattttcataaattttaggaacattacattatgaacttctatgtattaatctgaccaagtcatgaaattcaattaatagtagcagcagactgagaataataagataactacatgctataccagaatttttatacagaataaaaaagtaccaagcttatcaattgcaaatttaacttcatctacagagaagttcatcgtcaataaggatgctattttatcgtcagcaaatccattggataagtcaggctcctgccatattgagaactttgttagtattctacacaaataagaaggcacaaatagatttctgaatattgaatacctctttcggtggaatgaaagtggatacttctggtggactgcttacagcattgtcaccaaataaactatccaaagaatctgaagatgtagaattggctttttgaggaccctatcaattccaagagagacaattaatagaagaattaaagaaaaagcttcagcttatcctaatatgaattcattaaccaaaagaatagctatatttctctatgttaaaatgttttaaacattgctaaatggccttcacttactgaatatgcaaagagtgtgtccaataacagctcaacattatcttcgcctaaatttaagaaggttatgcagcagccattaaaatttgagtaaaaataacaatattaaaatgaaattgcagaatttatatctgtggacatgtgcaatgcatatttaacagaatagttccctagtttacttcactccaacaagccctgctcaatctaagcaagataaacttcaatgtcagaaataacttacccttctcctcaatcactttgtcaacaagagatggttgaaatcccatcccaattaaggacgaccgcgcattgcttccagaggaacttgcaacattctcctggaatttcaaaaggaacaatataaatatacatatgcatgtgtgtgtttgtgtgtgtggtgtagggggtatctggtaaagagggtgtaccccaaaatgtgtggggaagacagtttcagaaggaaactcaaaatctaaaatttcttccttgggaatgacagcctcttggtgttcttgatcagaagaaattttactgcttgaagggttagtgaaatccacctgcagagacagatagatatacataataaatataatattcaaatacttattaaagaagacaaagtccccaaatgaagcataccattttaacacacacagaaaaaaagactatcttcaattcacaggtgttcaacttcaagggtcaagctgcatagacaggccttctccttctccttggaacagtatttgatagttgcattaaccctgaaaacagcttttaaagggtcaagggtaaatagccctgaatcaaatatatatagaagtagaagttgaaatgcaaagcactaaaatttgatgttgcccacacaaaaataggacccaaaaagttattgaggaattctgagcattcaattaaggactgtaattacaaactctgaactcatttttgcaaaattgaacaaactccattaaattaattattaacattgtttcaaagaataataaaaagacaaactttaaacttttccaaagtacatttctgggttcctcagtaacaattaatacagtttctttataaatattacaaggttaagcagagaaagaaaccatagcttcaacatatataaaaaaaaaagaatcttgttttaaatttttctccgtacccaaaccaaattaaattgactaacaaggtcgagtcaacagattcaacgagaccatcgtacctgagagagagaggaagccggaaaagggcagcggcgcgtggggaagacgctctgaggccgtgagtaaaatcttggggagaagcggagaggagagagagagaggggtgaaattgtgtcagtaatgttagtttgatgtgtaaactgttgaaagtgaaagtgtgtacgggtgacgcatgactggcacgtgtctctgataagtgcacccaactacactacactcttctgtacacaatttgtttttctttctcaatctagctcctcactaatctttttttaaaaaaaactttttttttaaaagaattttttttttaacttgtaaatacaattaggttccttttgaaaaggattttttttttttgtaaaaatataatttttttatagaaaaagttattttatgtgaaaaattaaaaaaaaaaatgactttcatttttgttgagttgttgcctactttggtaacggaaattttcgtttaatgaaatgattttcattttcaaaaaaataaaataataaaataaaataatagcattagatagttagttacattttatgataattagttaccactgtaaagatatttggttaacttacttgattttctaatattttttaactttttttttcaatttttttaatatatatatatatttagaaatccattaaatttgtaattttttttaaaaatatatgagttaagattattgacacgaaatcgatacgagtataaa

SEQ ID NO: 42925 - DNA, 6786 bp, Cannabis sativa
  modified_base (3288)..(3289): a, c, t, g, unknown or other
taagcaggttcatgtccaattcgggcgttgaacattagaaggcccttaaatggttattgagatatttgaagggcacttgagattatggtctgacctatgagaaacaaaaaggagaattagagttgaaagggttcgtggattttgacttcgccttgaatagagatactaaaaaataccgcttcttatgttttcttgacaaactggaactgtataagctagaaggcccagttacagtctatggttgctctttccaccatggaagcagaatttatggcgactacgaaagcattcaaggaagctttatggcttcagggaattctttatgagttgaaacaaaccaaagggggagtaactgtgtattcagatagccagtcatccatccatctttgtaagaacctaatttatcataaaaagagcaagcatatagatataatactctactagattagagagaagatagaagaaggattgtttgatttagagaaggtcagtactaaagataatcctgatgatgttgggactaaggtcttaaccttaaccaagttcaagcattgcttgaacttgatcaatctcataagttagtatactgagattcgagattcttagaataccaaccaccaaccaatgatggctgcattctttcttcatcatcgtcattcctttaatttaaagtaaataggtggaatttatggtatagttcctccaaataaaaaggtctccacaaatgtcattcctgaaaagttgttcactcacggatgccagtcccggaaggagacttgtgggataatagtcgagttgagaagggagttcccgaatgactatcatgtccactccgggtcctatcttcaggaaagctagcctcactccaggatggagttcttgttggctagttttacctcatcagcgagtgtccttggtccgtgagtctagaagctcatatgtgttcctagaggctctgacacttaagttgacatggagacttcgctcaaagaggagttggttaaattagttatttctaactaacttaacaacctcgtatcctgtagctaccgactttaggatcttgattttaagcctataaatactattttgacgagttattttatagaataagagattcagaacttagttcgggtgagattgagagctcagtttagattgagattaagagtttgagggagaaaagattgagaggtacatagaaaagagagagattgggtttgagttttgtaagaagaatcttctgtagacgaagaagattcttggatgtaagtgtgagagttgaaacacttaatgagaactactcacagagaatctcgtctcgactgtattgtacctattcttgctcaatcaataaggattatgttactgtttcaaaattagagtagagatatagattacatcgatctaccggatttgaactagtagatatcttggtgttaatttctttattttttttacatttattgtttctagttttatgtactctgtttgctcttgttttacttctaattgttgttcttattttgttaattttgtcattgctaatcgcttgattgtttgaagtttaattattttgattgtgtactattaattatataattttcccacaattacctatagtttcacttaacatttgaatcttattttactattagttgaatctgttttagttatgtattgtttcacttaacatttgaatcttgtttaatcataagcattaataatatatttaaatgttgttcgttttctatttaataaaatttatttatgtactttcatatttctaaatctagtaaagataaaaaaaaactgtctgaaagttgaataaacttataaatatttatatgtatttgagtgatcattggaataatttcaaacactcaacatatatatgatgtaagcctattagcaagtcaaatatgtcattaaaaaaatacacacaaaacacaacaaatatcatcattcttgtgcaaattgtaaatgaagaataggaaaaaaaaaaactatagctctctattgataagagtcgttgagacttgaggagcgttttttttgcataaataaactattcttgcttgctcacgaagacaggggagaaaattctcttgtcttagttgaacttaataataataataataataattaaaggagaagtgagaaggtaggaggagccttcttttggacattatagctatgatttgcttggcttataataataaaataatctcgtgggcggctcaaccaaataataatcaacccataaacataaccccactcaactcatgcttttcttttccaagcctaaaaaagtaaaaagaattaagaaactacaaacaaaggtcaagatattgggccccatgacccaatatttttgatgttgggatgacagcctttgacacctcttctcttccattatcaataatatcgaatagaccttaacacttctctttcccttctggcatttttgaaagcttacattttaatctcatatgggcttggcctatccctatggtcttcttttctctctctctctcatttttgtttttattagagcaacactacctaaaattcactcaaattaataatggatattggataataatcatgttagtagaagactagtaatagtacacatttttgttcatttggattatgtgacaatgtgaactaaataatactttataataaccatatgataacgataactaatagtcatactatgaatattatattgtgtgtattttagtgcacccaccattaagtttcgaagcttttgataactgccttatgttattgtgatgatgatgatgatcctagtacaataaaattcggtattgcccacttgagggccacttttaattgtagccagattttctctttattattattattttgaaattagttaaagtagggaaaaaaaatcccaaaagcaatttttcttctttattcctttatatttgtaataataatcctaagggtaaatagtggtataagtacctaaaattttaagtttgtaagtggtataaatttaatatttatttttagcggtataagtatccaatgtttgtaaaactgtaatttttctctaatttcgtccgtacaaattctgttattttctttaaacatgctacatataaggtctagattcttaattattggacctagacgaaaacatgtagtatcagttacttccaaatgctcttttaataaatttaaaacggaatctgtactgacaaaactgaagaaaaattacagttttataaacattgggtacttatgccgctnnaaataaacattgagtttatgccacttataaacttaaaactttgggtacttatactgctatttaccctaatcctaataataaataatacgtgtttaccataacaaatagatcaatctcataatgtgtattctcaagtttcttcgagtgggaaataccattacaatttcacaatatattgatgcaatgataatcttcattgccttttatttgtcggtcaaaattatggatcataattcattaacatattgtttatctagaagatcctttagtaaacgacccacttggccttttagtcactgagattggaaaacaatatcattatctatatttcttctgttttctctttttagtgtgaagtaaacatggtcataaaaacacaacagattttgttgaagagacatattaagaagcaaacaaaaagaaacgaaatgccatggaatcagattattatacttgataattttagacaagctaaaaatgatgatattcaatatcatatcaaataaacttttgaatcacattaagcatgttatattaaattgctgcaagggaaaaaaagaatattaaattgactaataaaacttgaatatctgatagatttggataagttttaattaaaattttgacaatgttatcactaacccatttttttttattattattccttttctaattgaatttgatggaggatgatttggatgttaagcatcaatcaaatattatatatcacagagaattttagattggaaaatgtcaattgaatacattatttttattattatacatacatctaagagagaaaactcattcttgatgagaaaaccacaattttgatcagatcagctaagatacacccccttaaggggagaaggattacaatatcccagtttgggagaagagaaaaataaaaataataaacaaatataatataattaaaaaatacataaatctttctctggttgtttaacctaatagtagtaataataacttgttcctcctctgcccagaatttgtgggcattttcctccttacatctaactgaatatttataataataataagtttccaaataatgaatgaccagtaagtttatgaaaaagattaatttggtgaggagaagcatagagaagcaagtacttaataataatcatgccaccatttgctcctgctctatgtacagctgctccacccatggtgggagaacttcacgatcccctttgttgagattatagtgtccagacctgtcagatgatacatccttaacaagggaattgacccaagacacatctggttcatcaatggttgatggcctcaaggatgctgctgaggcaattccaccattgttgtttctgaacccaaaagaagcagactttctcagcttgtttaactcatctccttgaactgcccaatccagtttcccattgggtgagctccaatcggataaactggatgaagacatcatcgatgatgccgagttggcagccgctgtgtagcccaggtgcgtggcagcaccgcggtctacaaagctctggctccgcttggcaaaggcagaagacctcgagttcataactgctgcagccatggaaccagctgagtcaaacccaaaagttgtgggcttcctcactggagaggatgacatgttcatgttgttggttgggtagcttccacgaagttggttcatgttattttggcgaatctgatgcccagttggagattgcaactgggtttgtgttgaggattttaatgaaaatccctgcatttgagacaatacagaaggatcaagggatccaaataaatcgtcaaggttagtttgttttgagtatgatggagaggagagacgagatatctcatccaataaaaactgttgctgttggtgctgctgttggttggcgtgactttccatcccaagcaactccatctccaaacccaaatctctagcacacaaagcagtctttaatcggctaccagggagctgaagagcaggtggggtgttgtggttagctttgttctgccacaacccaccattcttgggtgatgaagagttcgccaatggagacattggcggtgttgaagttgcgggtaatggcatagacgacggaccaagagctaaaggactcaaagtagccatgtcagaggcgctgactccaagagaccttggtgaaggcatggctgagcctgtggaggcataaactgggcgcaattcgtcatgtttgtgagcaaagaagcagacttttcttgtgcagccagtctcatccttgcaaagccgagttctgtactgagctggatgaagccatgactcgaaaactccatgagcgtattcacaagagtctcccttctggcaagaccctttcctgaactcagggcaaggaacacagctgtaagggtatttcctggggtccctcctcctggcgttctccccgggatgaacaaatggacactcagtccaatcatgagagtaggcccttgaacaaggcttaatcttgaaactatacatcctgaaatcgtctgaaccgtacatcccattgtttatgtctggtaaagatacatcaatggggtattctttcttctcacctccgtcccttgaggacaaaggacttccaaccctaaattggtcctcctcatcttctgtaacagagttagtctcccctctaagcaacatctccattgccttcctcctcgaactgcagggccacttaaagccttggccaagcaaatcaatagccttgtttccataagcgttgaccaagtcaacatcagcggaggcttcaagcaagagcttcacagcctcaagtgaagaactcgaggctccggacgtagcacagtgaagggctgtgactttgtccgaaccacaaaccctgttgacatcgaccatgccggactcgattatgtacttcaaaacctttgtgcttccaaacatggcggctatcataagaggagttctctcttcaaatcccatctttttggacccaattcttctgccgtaccagaaacccgtctggtcaacgttgatacccttttcttcgattgtactcctgaaggcctcgagatcgtccgaggcggacaattcgagcataacagagcacttactgaaaaccccattattctctttgggaaactcgctctccatgataacctctgaagggttattattaactttattctttgaaccactgcacatacccaaaagtctcctgcaaaaatttgaagcaaaaaataaaagggtcagaaattttatccatagctcaataaaatcttgtgaaacgacatggccaaattaaggaagaacaaaattaattgtaaccaaaaaaggatataattattatttgaatctagatttaggctattttctttaaccccgaaaaagattgtttcagctattactataatttaacaattaatcccaccaaccaagaggcataacaagcatagtttaacccaaaatactaaaaaaccagacaccaaatttttggatgacaactgaaaaaaaaaaaaaaaaa

SEQ ID NO: 42926 - DNA, 4291 bp, Cannabis sativa
ccttcttttattttctctcttttgtttggcttctcagtaaataaaggtttttgatcatatattttgacattttcgtttcattaagctctgtccacacccggaccttatacaattcttttattttccttttgatttttcgaagattgatcctttttgatacttatcattattttcacaccctctttcatattatcgtttttgctattttttttaatcgtttcaataattcaattgaaaagattggggtttaattatatgatgattgaaaagttggtgaattgtgttcccaaaaaaattgtagcagaagataaatcaaagattgttttctgtaatgggttctacatttattgaacaatctacaattttcaacaagtgtttatttcatagggacattgttcatagatgttctttaatgtctttggtcggcttactttgattattcatattgaatataagttagttttacttgaaattcagttttgatagcctgcctctaacttcaaaagatattatgaactctaaaactttggtctaattgggtttctccgtttgtatttatagtgaaaagaattttgttgtggagagtagtcatctatatcttgccttactatttacattttatgcaaaatactttaaatgattgttattagttgctttcttgtacaggcttgatcgttacttctgcgcttataatatggaaggcattgatgtgcatgaccggcagtgaatcacctgttgtagttgttctgtctggaagcatggaaccgggcttcaagagggtatgatgatttagtgcatgaatctttcgaggttactgtatattgtataacatgtttatctgtaaacattatgtagaatggtatttacttgttggatatcatgaattgatttattatgtttcttaatattgcctactgatgatagtcgctggtatcctatgcagggggacattttgttcttacacatgagtaaggaacctattcgtgcaggggagattgttgtttttaatgttgatgtaagtggtttgttttgtttctataaattcatatctgtatctgttctcaatgtctaatctctattgtgctatgttatgtattcttggtggagatgcatcattttagagaaatatagcgtgtctatcactgttaatcggtcttctatggaattttcttattgtgtgttattatgttgccctttaattatagaattatgtataactgtaagtggtaattgttctcattatttttatgtatatttccagggccgtgaaattccaattgtgcatcgtgtcatcaaggtaacttttttttatgcagttactcgagctaatgccccttattttgtgttctgagaatctttaattatatttgtaggttcacgagcgaaaagatactggagaagttgatgtcctaacaaaaggtgcaaattacttcaatttctgaaatgatatacacaacacccaaacaagcacacattgtatagtacctgtactttgtgtagagaataccggtgctatactaatcactgatatacttaatgttaaccctctgttctttgttttgtttctcaggagataataattatggggatgacaggcttttgtatgctcatggccaactctggcttcagcggcaccatatcatgggcagagctgtagggtaagatctctagcattaaccctagtccccaacatctctctatattaaaagtcaaatgctttgcttcagtgtctttttgtgggaactcaaatatgtaatacagacacaattgtgatcacctaaaatttagaagttctttttggtttcaactgtttggttgcatacactagtgataattgcagtacattgaatttgggatcttaagttttattaaaatcttgaaatttctttttgtaatgacaacatcatgtttgaacaaatggtgttccatattacaggttgtcaatgaccatatcttgttcaacaaatgatgttgcatactctgattataaactttattcctggccatgaatttgtttagattttccttcatacatggtcgaataagttttgatttgcttgaaatttctctgatccattttgttttcaattacaggttcttaccttatgttggctgggtaactattattatgaccgaaaaacccattatcaaggttagatttcattgtcctttgttccttaccatccccatactcctgatgtgaatgaaacgagataaaatttaccgttctgtgtttcttttttatgcagtatattctcatcggcgctttagggttgcttgttataacttcaaaggactaaatgaagcaatttcttggcgtgggtcaagccaagtaattttaccagaccatggcctggcctggggtaactcgagttttagattattactgtcttttgttaaccacccaggttgatttagagatataatagcacaaatgttggtagatgtttctagttttgttagtctccccctattgcctgttgttggattcttatttaatcagatcagaagcctcacatattataacttgggttagtaaatggtttatcatgttacttataacttggtccttatcaagaaaaagaggggttttgcttcatataatctggtacgttggttttgcttaataacttttacaaagtggttaacggctgccactgtatttatccacttggatcttcctaagcctagtatttacagaaaaatctgatgtgtttcgtgtctacctatgaaggagcattgtcaaccacaattattttggtgttaatttaatctttgcaataaacttggttataattttcagtaccaaacaccatttaacttggaataatatttctaagggaacttacaatatttttcaccataacatgttcttagtcttttcatttaggaaaaagaaaagtaaataaaaattaaactaccctcatttaaaatatatgttttttttttttttggttggcataaataatctattttttttttttttaaaaaaaatgaaatagtaacttcattgaatatttagcattcagaatacaaaaaggagattaactcgtcccaagcattatactcaaaaatgctatgaccagagagaaaacaagagtgcctagcaacaacatgggcaactcagtttgctgatcgtctgataaaacaaagcttaacattatttagagaaaagaataaaacttgacagtcatgataaatagaatttaaggattgattactacgaatgtcttgcatagtgagcatgctatcagtctcaacctcaacatcagactaattcttacttttaatctatctgagagcttctttgactctctttttcaatttaagcgttgtaaattaattttaaaaattatatttgttaaaaaaacattaataattttttattataataacatgaattttaggattaaacttgttatttatttaaaggaggagaattttttttttaaaaagaaatgtaaatgttacatagcattgaaaactaatattatttttttagcaaaaaagaaaactaatagtaataatttctcaatcattatgaaaaagaaaaaaaaaacattaaaacaaaaaattagttacttgaatggtaaaatttgttttaagcggctatgaaatgaatgacctattagaatagaatgttacgcagcgtggactccttaatattccaaccaatcactatcgattatccgaggggtccacgcttacataccatacacccttccactcttcacaatcacagtccacaaagaacgattaaccaaacctaaaaccaaaaccaaaaccccccaaaacccctacccagattctcttgctccggttcaatactccactccctatttcccatccaatcttcattctttccatctttcatttctaagtggtttttcaccttcaccttctccaccgttccaacgaaaaaaaaaaaccagctttacaatcacaactgggttgatctatatcttcttctgaaatgtgtgtatccaattttgtttctatggtttctgctttcaccttaatatagctaatggtaatgggcatatcccaatttgggaaagggaaaaaaatctactgagattcatatgtttcggatgctcatttttgtctaattcttctgggttttgtgatttttgatgtgtggtgatggtgttttcatctaaatgtttgggtttaggatctaaatttcgatgaggggttatgtttcaatttgaggggattcctagaacatgctctctctgcgacctattcgcaggttttgccatgccgccgcctccgccgtaggatcaagtga

SEQ ID NO: 42927 - DNA, 4537 bp, Cannabis sativa
  modified_base (117)..(120): a, c, t, g, unknown or other
ttattcataattatctaattagggttttgctaatctttttcttaatttcgggtattacaattaagggaagggataattaatagtataatatcgtttgaaaaaatctattttgaattnnnnaaatagtaattatttatttttgtaccaaataattttttcaaattagttaaataggaaaaagacaaaatttgtcaaaaaaatatttgttgagataagagttgtcaacaaaaagataccatccttgttctaaacaaaacaagggtagacgcctatgccctatgcacgtttgtctttttagattaattaattatttaattaatttaattagataaatatttgaattttaaaagtggtgaaagatatttcaaagttattgagagaatctctcaacactctttcaagtagttgagacattctctcatatatatcagtgactgaatttagttatagatatttatttatttaaatacttaaatatgctttaattaaagaattttaattactttaaatagaagcctaatttgaaaaatcagacaaacgcttttacagtagtattttcaaaatatatagaagagaaaagaaatagttttctcttttagttattcttactcatgtgttgagaactaaacaagaacaacgctatacactttatcttaatagccacactattttttatgtgtggtggactgatttggaaaacactagtgtgagtccaattgcatcaagctcatcatctagattaagaatacaacacacgagaagttttgaagataccttgatagtctttaagaggtgtatgttctaaacttgttaatcttatgttttaatttaatgtatacacatctggagatccattaggctatggtacaatgataattaataatacgaaactcttccgccacatatttgatttagtaccataaaaattaatacctatttccctgtttttgatgaagacaaataagatgcagaagtcagattgtcgatctaatacttcgaaggtgcccagtttgacaaattgtcaacctgggcgttgggtgcccgacactgagtgctctgggtactcaaaaatgaactttctccaaatttgattttaatgcctcaaatatgtctgtggtatgtctagttcatgtcccaatacaaagtttgacccattttcactaagacagtctgagaaatcaaaccctagttaaggatgtcaacttgggcgcttgatgaaatcctaggtgcccagattgacttctagggtgcaggttcatgtaatttcaactcttgaggcctggatttgattgcttcatgtcttcatgtcttcatgtcttcatctctgcaacactcgagaaacacaccagaaaaacagtctcagtttctcaactcctacccgagtacaccctctgtttttaaccccttcaagaacatggtttcactgcttagaaaactaagcattcactctctaaactttctctcttaattctctccttacaaacgtgaaaagagtaatctatatataggtataactcacacctagaaaataggtgcaaaaccgacaccaactaactaactaacataactgaaagtgaattaggttagttaagtataagtgagttaattttaggttgatttggaggatcaacttccacaccaaataacagtccattttccctccctcaaattgaaatcatgtcaattccacaaaaaaaaatgaaatcatatcagttttggagtacttaagtcaataaatgttataactgtatactataatttacaatgtaacccagtttgtgcaaaataaaaaataaaaaaaatccacataatcaagattaaaaaaagaggattgatggtaaaacacatttgaaaagtaaaagcttgtaaaagtcaaaacaagtgttacgaaaagtgtttactcaaaagaaaaaaaaagtgttacgaaaagtatagaactatagattgattatgtgataatgtttaaaacccaattcattaccatgcgccgcgaaagccgctgaaattttgacacaaatttttgtcagtagcttagttaggtacttaggttaggttagactgtcaatactgtcttttctttctttaaaatgcctagtcaaaacacatctatggaaataccttcatatattgtaaactacagactacagtaggcataataatcaatcatgtgttaacaagtttaaaattgagcataaatagacgtatatgagtctataaatacattgccaaacctttaataaaaaggaagtaaaaaaaaagatttcacactaggactaggacatccctctctaaacacacgaacatatctatatgagttattaaaggagaaaaaaattattcaaaaaaaaaaaaaaaacaaaagctctattacgcgtgttgacttctaaaactaagcatgaccttgactttgaccgatcaaaacgacatgatctgttgttttgtttatgttgtcgtttcgttttacaatggagttacttcagtaacgacaatggggctccgaactacatgctttccatcggtccacgagagagacccaaaagctgcacctgagtctcccaatactagattccgactgtcggctgaaacagtcaccacgaagctccgtttcttcacggcctccgtgaacaccagcttcgccggcttcactgccaccgtgattcccttgggagcctcgacactaaccctgtacacagaattgggaaccccgacatttgtcaccgttcggataaacatcttgcttggcctgcctttcgttgttgtcgaaaacaacactgccatcgaagggtaattcaggttctcagacaacggcctcttcgccgggcaccttactggggtcctagtgattacctgaatcacttttggtccatacccgattgagcataagaagtttacgtagtcattgtttgagatatcgtacactagacccggatccatagctcgatccagattgatatgcccagctccgagatcgtaagccgtggagggttttcctgtggcttcatcggtcatgggttggtttcggttgtcgactgtactagcagttgtcatcaaagccgatctaatggcagctgggctccaatctgggtgagcagattttagcaaagctgctgctccactcacatgagggcaagccattgaggttcctgacagaatgttgaactccgtttttcgggtatcagtgtccaacccagtaggcccgactgcgtcagtccaagcggcgagaatgttaacacccggcgctatcaagtccggcttgaggatttctgggttcaaagtattgggtcctctccccgaaaaggaagccacaatcggagcaggtttgattccgatcacagttccgtggaaatcaatggtggctgtggcattagacgtggacgaaacataagctttaacggcgtttccctcatcagagccgacagcacaagccggaagaagatgagcatcgccgactaatccctcgccgtgggaaattccgttggctaagatcatacccacacctccagccttcttcaccaccatgcctttagcaaccctagggctacttccgcgatcacagataacgattttccccttcaccaagttgggatccagcgaactctccatgcacaatgaagctgggagcatacccgatttaccagggtaaaccagagggtacattttaccctttaatggcgctcccgcataaagagaaacaccggaaagtttcctcccgttgccaagaacgataacagctgggaaattcctgtctatggttcctgctccgactgaggtcatccatggtgccacgttagtaactgacattccattgggtccatcgtttccagctgaggacgacacgaagacccctttagaagcagctccgtaagctccaattgcaattggatcgagataatacggggaagaaattccatcaccgccaccgatcgatatagagataacatcaacgccatcattgacggcagcgtcgaaagctgccaaaatatcggagtcgaagcaaccggaatctttccagcaaaccttgtacaccgccaatcgagctttcggagccactcctttggctattccagaagcatagccagccatgctagcctcgaacgcgtaccttcccgccgccgtcgacgccgtgtgtgtcccatgcccatcggcgtcccttggtgaccggaactcaaccgtgttattcaccccactaaccgggccgccaatatttcctgccgcctcatgacctttcgcaaagaatctagcaccaatcagcttccggttacaattcttggcagtgaatctcactccggcctcacaagtacccttccatcgacttgggatcggacccagattcaaatccgagaagctcctcctttcgggccagattccggtatcgaacacgccaacaataacatctgaaccgtaatcggattcggaccaaagacccctctgatttctcaggccaagaaattggggggaacgagtggtgtggagctgacggcgtttatcctcgaagactgcgaggacagaagggtggcgactgacagaagcaacctgg

SEQ ID NO: 42928 - DNA, 4017 bp, Cannabis sativa
aatttttctggtttttgtatttaaaattattttgaatttttaattgactaatttatgacctagtgttttggcttatcaattgtccgtttaaacactacattttaaaaaataacatcactgttcagtttgatcaaatacctttgtatatgattttaaaactaactgatcaatatcatttatatatgattaaaataaaaacccttattttaacatttttcagttttgaaccacttacaatggtattgaagcagaaacaatatgttaaattaaattgaagaacaatgaaaataataacttagatttcaacacaatcatcctcatctgcatcggcatccgactctgcatcccagtctaaactataagagttggccgatttcatcaactccgttagtccggttaaatcctccagataagtaggaaggttaatcgcctggagaatgaattccattccccttttcctatattctgatacaacctggaaaatcattaccattaacacataatttggaactagggtattatgaagcataggactaggcttcacaaggttagaaagatcaggcctcagatacatcagtttctaaagctactcactaatatgaatcaagtttcatgaaatcaaaagtttacggatactttggagaaaggttgagaattattgacaataaaacttactgtgccacaacaagctgtgcaactgtttgaggattgacccacaagcatcatctgagaaaactgcgagagtgaacctcggatttggtgcggtaaaataccaagaggcagctcactattcccagtagtaatagagcttgaaacctcaccttctgcaaatatcctgtaaacaacagaaatgccaggtcagctagaaaaacaagcaaaatgaaactactgtttaaatcttccatcaagaactgaaaaaaaattatttgtttatcatgtattgattttgcttatttctcaagcattgatttatctagcttcaattagccaattttttcaaggactcacccacgagggtgatgcaagactcccaccaagagttccactgctagggccgaagcaattggagcaagccccggccgtgtaacagtacactgctggtccaaagtgcggttggcagttgactgcactagcaataaacagctgatcagcaaactttataaatcacaaagtaggtaatatatcagatattttacatccaaaaattacatcaataggtgcaaccacgtcattgcaaaaatagcagcccaatctttgcctttcatgattatccaccatgtcaagattgctcaaatcaacagataaagcgtttactgcttcatttttcaaggcgtgttcagagctaagaggtcctgctccatgtcgcataactaaaaagctatcaaaccctaaagctgcagttacagttatctgcaaatagtaaaaaaagaatgaaattgaatcaattaccacagctatgtatagctggaagggaaatcatgcacgtggagctcgggccatcaggtcaattgactttttaaaaaagaaaggcaaaaaggtgcaatgttagcgaattagaaagtagaccttattaaaattggcacatagaagtgaaggtagccaccgactttcccttgtatcagtcaacaagaaaactacatcatgagaatcaataagatcatgcagccgtttacaatcatcaagcacactaggttcttcttggctagaaactggatgcccaggcattggtatagccatcacaacaccctctgcttcctgagaaatgaattctagttaatatttgtgttagcggagaacaatacaaggcaaaaaagatcatatacagtaccacagctggaaatattcgctggagacttctaacagctgctgtggctttaaactcacctccattaaggcaatcatccattgtatacagggattgccttaaaggattagacatagctaccttcccattgtcaagtaacgtaatttttcgaacaccccacgcctgtaagtaaacataatttgtaatcagtcaagaaataacatgagaaattcaattataattgtttgatcactcaccatgagcatacgagccacctgacacccaagtgtaccagctcctaggagaagacactttagcccggacaagatgtttaagttcaaagaaggcaaagcacgccatctcattagttttaaattcaaatctgcagcagatatggccaacctgtaaaagttacttaaaaatttaagaaaatattgtaacaaactaacaatacaaccaaaggagagagagtttcaacagatcaattactgatggacaagatagacaaataacctagtgggatccatagatctagcaaggctaatgcatcgaggcatctttctccctttattaagttcccatcccactgcattaggaacacattgacgatcattccatcctacacagatattaatattataagttacggttatgaatggtaaagttaagaagtgtatcaacctctacacatataaaatcaaaatagacagagttgttacccaaaagccgcagctctaccttgtggaactgcaattagggtttcaccaacaagggatgatcccaagtcagcaaaaccacgattctctctgtagcataaaaatctaactgagttgaggttccatcttgagcaaatgagtgcaagaaagttccgcaagggccaaccaggattgttcggaaggtggcatgggtcataaaatccaaagaacaactgccaatggtatgaacaaagcttaaacaaagataaagttttaaatttaaattttacagaactagttctaatttccactggtctgttaattttaatgcaacttttctaaataaccttgaggatttacagaccttattgctatcaccttgacaggtttcccagtccttaagattcttaatagtggcatttgaatttgcatcaacactgattaaaaagaatggaatatctgcatcagagtcatttgacttagctaggaaaatgaagataaacgagcacatttacttctattaatataagagggcaaacttacctgctgttgagcttgagtttcgccacgcattgcatgcttccgaaatggattcagcctgcatcataaaacaataaatgatcttaaagttgtaatataaatctaaatagttagcatctacttggacaaataaattatagtttgagcacctcttcagtgctaaaatactgcaaagctggcctcaaatctaccaaggtagctgggggatcaagtaacagagcaggaaaagcaaaccaataatgaaaagtccacttcttcaggtctgcaaaagagatgagaaggaaccttgaaagtacagaactgtcctccatagcttttccagtatgaatgtcctcccaaatctaattaccagtgaaatgtcaatgtctatatttggtttagcaaataccctaataccaaagtcaaattttactttgctaataatgttaatgagaattgaataaagggaaaaaccacaataaatttgaaacaagacattagaaaaacaacatacaaaaatgcagataaacaaccattctaagcgaaataccttctttgcttcttcttttaacaagctcattttgtcaagtgaataaaagttttccaccgtattggtgttgtaaaggataccagggacagaacacctgtttcgattacctagacttgcgactgttagtgttgattgttcactcaattcatcaggcaaagactcagctaaaagagttaaatgatttgatacttgggaatgagaacaaggagcatagaaacctgaaacaaattttagtttcaagtaattaactttagtaacaaaagtccacatttacaagctaagcagccttctgtagtattcatcagtcaaaattaagtctttagagttccacgcataattttgctaaatttgggaaagtcacaacaattttttttaattcatttacgattctttttcattatccgatattaatttggccctaaattcaataacttcttatcacaattgat

SEQ ID NO: 42929 - DNA, 2679 bp, Cannabis sativa
ttagaaactaaaaccaaaaaataaaaaaaaaaaaaaaaaaaaagtagttaaaaaaacaggaataattctcatatttatttctttttggttcatttaacatatttaacatttttgatgttagtatgataaatacaccaataataacactactcttcttatctcttcctttccaactacaacttgagctaaagagaaagagaagagacaaaaatggaggtttcaatgtgcatgacaacttcttcaaactccatatctctaaaacccattcacaatcctcttctgggtcatgcttcttcttcttcctcaacacaatttttggctctaagaagaaaagggtcttcttcttttactaccaaagcacttctttcaacttctaaagaacttgttttgaaagaatttcataactgcaaagctctcaaggtaaaacctttaattgtttttctatcttatttgctttttaatggtgaattttatggtaattaaattagctttgaattgtgttgcttttgtttacagattatctcaggtttgcagaattttgataaggaaaatgttgcttcagttgtttctgctgcagataaggttggtctcataaccaattgaattgaaatatatttagagaaatatattcaaaatggtgaatttcactcgtgcaactgaatgtttgaactcgaaactgtaaatgaaatggttccctactgttgaattttttctgtatataaatatttttttgcctttttttcaagtgaaaatgtttgtttttgctattatagggaggagcaactcatgtggatatagcttgtgatcctgagttggttaagcttgccattacattaacatctcttcctgtaagttcatacacttttagtaatcatttccttttttcttttattatgttcatttgtgagaatttaactatttttcttaacaaaaggaattatccatttcattgacatgattctgaatacaattttagttgtgacaatgtgttttttcttatgagaaagctttgattttgaagcttgtactaagagaaactcgataacccgccgtggatgtcgaggtttcattctgaaaactcgaaccaactacaacattgtctgcatttgtgtgtggtttctagttttttctgtttttcttgtgaaatttggtttaataatggccttttgaaggtaggagaggtttccaacacaaacccaaataacatatctttgtctaatttaacaaatttttacaatctttgaattcctgcattgtctcatggacttcattactaatttagtgtcttgtcaggtttgtgtttcttctgtagatccagctgcattcctggctgcggtcgaggcaggagcaacaatggtttggcaacaaaactcgttacctttgctgtaatttaagaggaatttgaggtttaacttctttgattttcttcttaagaagctaagtttatggcatatgcaggttgagattggaaactatgattcattctatgagaagggtgtgatattcactcccgaacaggtataatttcgatgtaaattgatcaagaaataactcaaagctagtgaaaatgatcattattttcttattgtgtgagtacttatttcagatactgaatctaacaaaggagactaagaggagtcttccatccataaccttatcagtcactgtgcctcacacgctaagtcttcccgatcaggtcagaaagcagcttggtttcgtagggagattcactcctttgcattgtgcattcgatttacaaacatgaatttggaatgaaaacaggtcaagcttgcggaaatgctggagcaagaaggtgttgacatcattcaaaccgaaggagggaagtgctcgaaccctacgaagtctggcattcttggtttgattgagaaggtataactattgacattggttttgtatcttttgttactttgtgtatcttctgataagccccaatacactttgtttactctaggagaccgagtgaatagctttagggcagggaattaccaaaaccctttcatgggattaagacttggtagctgttaagtgtaaaataggaaataaaatagactcggtcctaggagagaacaaccctctcgaaaggttgtattttggagagtatagcctctagctgaattcctcgccacttttatcaaaaaagtactttctttgagggatttcgttgtttgtgtttgcttaactaaccgaaacttgatcatcttttaggcaacaccgacattagcagctgcatattccatctcgcgggctgtcaagattcctgtcatgtgttcatctggtttaagcgcggtgacagcaccaatggccatcactgctggagctgctggtgtggtaagttttgcataatacaaccttcgttatcacagctcgcaacggtcttcaatctagtattttcaactgacataacacatgtaatcatggaatgcagggtgtgggatcagccattaacaaactcaatgatgtagttgcaatgatagcagaagtaaggagcatttcaaattcattatcatcatccggttttcgtactgcaaatgaagaacaaactctgaaactgtaactccatgccactttcttgttgtgttattaggcagaacttagaatgactcacaagtttatgtatgaggttacaagaagtaccaaattggcatgtaaaatttttgt

SEQ ID NO: 42930 - DNA, 3667 bp, Cannabis sativa
  modified_base (3236)..(3237): a, c, t, g, unknown or other
ctaaattctttcttgtcacttttttaggtattacactctgaattctactcttaacatcatatttgattctttttaccaattgtataaatttttatattccaaagagcttcattcttgcaccaccatatgtggtatgttatcactgcaaatgttgttgaaaaaaattggcgctgaaatctgttcattttcgatttatacagccactgtagccgcctcaaaatcgatactagtgtagttgcccaaccaatacttggaaactcaagtgacaattgaagaataaatgctctctaatttctttactcaatccacaaattaggcattcttcatctaaacatatattgtgtttgaataattttgatttaaatctcaatctatccaaaatcaaaagccacaagatgaatctatgttttgaactttttatttcaaatattttataaaactcatggcatatataattattatatgccaatagaaattaacattattgtgccaatattattatattattcaacgtttaattaaaaataattctttttagcgatagccctaaccctaacactcctcttcttaacacaagaaccagtcacaagcttattattattggacaacatcaacaatgtggatgaagcttccatctccataactctctctttcaccttgtcatcaagctcatccaaactctctttaaacttctcaagttcttcgaaaccgagctcatcaatcttcttgcatccgcgaccaatgacaagccctttccctttggctatttccccatcaatggcttcaccacggagcttctcctcgctcagctgcttcacatgattgtcatgaagctcattcatcgtctcttcataagcttttgctccaacggacgagttattcgccattttcttgtaaagattaggttttagaaacctatctatgatgtatctcacattagggtttccaaaagagtatggtttgccaccaggagagaagacgataatcccaacctcagcgccacacagtgtggcgagctcattggctttcttgaaaaggccggttcgacgcttcgagaaggttacttgacgacaactgctgtctttcaccatttccatctcaatctttcttcgccccattaattatttttttcttttcgatctttcctgtttggttgcctagaaagttttcttttgtttctaggaaaataagaggttttgagtgagtgagtgagtgaatgagagtgagggtgaggtgaatataaagagaattatttatacacctctttatagggtttccgaaatcgttttgcttaccttttgtttctaatactagactttaatattattttaatttttataatttaattttatgttttttttataaatttttaaatttattgtctaagatggaaggaatttttttcttttttctttccatttgttgattttgagtatcatttgtagataaccgttgcaaaattaataaaattagtcacacaaacttaatacatatctatttgtaaaataaataaataaataaacaaacatctttatttgagatgtgtttcacttattaaaagtctcttgttacataagtgtgtattaagtttgtgtataatttatacatgtgtttcttattacctacactaattacacatatatatactcataattaatagaatgagaaaaaatgtatgtgtatatatatattagacacttagcaatggtaaatatcccacaatatacactattatatgccatttttacacataaataaataatgctataaaatcatgagatattatattttatactttacttgtgacaattttaaataagagtaatgctagagacatacatacatattgtatatagaaggatttgtatttagtttttaccttgcataattatatattggaaacatgttttacttttaattttaatcgtatgattgagattaattatgcatttttatatgtagagatatatacatgtaatttgaatatgttacaatcattatttatctataaaaaataaattactacaattattttttaaaaataaataaataatattataaatacttaaaattttaattttataaacagcataaatttaataatttttcttggcaatataagtagccaaagtgctataacactgttattaggaatgtagtcggctttgctttgtgactattgtgtaagtttgttttggtttcaatgaagagatttaaaagtaatcaatattagtaaaactataatttttgtctaattccgtttataccgacttagtttttgaatttattaaaagaaaatagaagtaactgatactaaatgtttctatatagatcaattgatttagaatcttttaatacattaacgaaataatctggactcatgaaactacttttgtcgtaactatctctttccaaatcaaaattaagttttttggttttgttttcttttattttgttttgggtgtgagagtactagtatcactacaaaaaaaatcatatatgttaactttttaatcacaataaagttacttgtaatcaaaacatattatttaattatcaattgtcattgattaatcacaatattttgatttgtaacaaaaatattgttgtgtatatataatcttctatatatatatatataaagttcttaatttggcattagttggataatttcataattaatatatgtgcacggctggttttttattttttatttattttattttctatgtatataaaattaacatatatagacataagaaaaagttagtaaattattagggtttatctgaggaaggtaacacctgcatagttgttttaggtatattttgtggtgataaaaaataattataaaaggaagaaagaattgtatgtatttatataatatcctatttccattattgctatgtaattattattacaaaagataagactatagtgcacgtacgttatataacaattaatgtatatatatatatatataaatattatatatattgtttacaattatagctaggttatatatatatatatatatattccatgtataattcctactttacatatatatgtgtatatgagctgtatattcttcttataacatataactgatgataattaatgaccataaatataatttgtaattattacaaattcacaatttgcatgcccatttgtattttattttaagtatttatttattactctcttttgggtatatataaatatatatatanntatatataaaatatatataatgaaccacacgtgaataatcacgcacatgcatacatttatgtatatattaatttataacagtccaaaaagaaatattcaaagaccgtattctagtaataaaattattaaaatcgtaaaatatttaaaattatgtacacttgtatttttataatttttgtgtatttatgaaataattccttactataatatatatatatatatttttattgggttattttaaaaaatatgggaaaaattattaaggttatgataaatatgacataaaaagtaaatgccattaagtatgacattatctaaccaatcaaactaaaaatataatttttttcgacaaaaaccatataaaacattaaaaataaatctgaatttaaaattcataaaaactaaaaacttaattaaattaccataaaaa

SEQ ID NO: 42931 - DNA, 6027 bp, Cannabis sativa
  modified_base (5839)..(5842): a, c, t, g, unknown or other
aaaaaaaaaaaaaaaaatactctgctgctattgtgaactactaattcaggagcttatcagagaatgtagaatgataatggtagtatcaagagtacagtggatttgttttgaggagttctttaaaaataaacatgatgtattaaaatattttagcggtgcattattaagacacattaataggagggttctaatcatggaaaaataaaatcaaaaacaaaaacaaaattccattctatacaagcagaaagaaatggatcccacatgaaacacaattgaagaattcaatacccctgggacattttatatccctttttaagtgatttttgcccatgaataggctcaatggatctatacatgactaacctaatttctcccctaccacaccatttcttttacacaatggcgcatagtcatacaatgacaatataatgaatggcactggtccaaacatcgacactagagaaattgactagaatacccctaaacctgtaatgaagcattagagtgttatagaatcatactaatgtgcccttcatccacagcagcgagctctatacggtcacctgatgactttgtgtttcatcaattgagactaaaagaagcttcaaaaatcatctgaaactatctatgaccttgctgctcttttgtttccacttccttcacactctctactatgtgatggatcttctttgacaagctctcgttgtgctcctcaatatgctcaaatatgagttcgagatgccttttgtatgttgctgctcgctttttctctatggctaactgctgggatagttccctgatcttgtcatgctcgttctgcgaaaagcaagataatgatacaatatcaaaagctgtgtcatcagatgtcatcaaagttaggaataacaatatatgtataagaattgaatgcaatcaaaggagaccaactccagcaacatgtatttatcttttctttcactctgtgatacgaatacaataaggtgcaattatattgggaagaaaagcttctttttactaccattaagccaaaaacacagctacactactgtcaacttaaaagagccaattattcctaaacaataataacctgctatacaatgttttcacacactaatatttttggatcagtttaaaaactgcctaatggacgttccaacagttcattttttttttaaacttggtagcacagtggtaattagtgtgtgattgcaatacacccaccatggtccatcccatccccacctttgcccactcagctaacctaaatgggtacgtttcaacagtagaaacaagccaaatagaaattttcaatccacaaactagaaacaaagtctacagcctatcatcctaccggacttctatgtttatagtcctaactgagtataattagacatagtaatttcacataattaactaaaatattagatatttaatattctatttggcaaacactataattatcccttttcaaactaatggaatttagaatccacccatttgggatgaattttttattaccactgaaggtaaaggtacaactacaatgatattcacatgtcgaggcttaaaaatagttaaaactgattaaatcaaaaaaaaaaaaaatagttaaaactgataacaaacaatagaatatttgaaatcttcatcctcgtgctaatacctcataaactaaacaattcctcaatgaaatgcaaatccctctctataaaagctttctaaacccattacatattccattcggtttgagtgcctacataaaagccataatttcactgaaaacctatctgtaatcaatatcttaaaactcagcttatcacatatcaccttttgcaccatagcacattaaaaggagtactacaataaaacatttattcaaaattccagctttttacagagtcccaatcaaaataagtttcagccttgagagaaaactcaaccccagcttgatttggtaaattcttactttcttaggcacatagatgctagcagtaatatattttcatcacttaatttgtataaaaatacaccatgtggatgaaaagaacttggaacacttgggggagttcaatctcgtataaatcaacagcgttcaaaaaccgagcaagaaagatcatcaaccaatgcataacaattaaaaaaaaaaatcaaatttgagacaaacaatctcttactagcaatatacagaataatgggaaaaaaatgctcgtacaaaaataaagcccatcagaatctctcatcatcattcaaattacagtaaacaatagaattcaaaatgacattggaatcggaaaaagaaattaaccaattgacttgagaaggttttagagaaaataggatcttgagtagtctatcctgtactttcaattggaaattgattggtatcattgaaatattaagattgcaatcattgaaacaaatcaggcaaagatgattcatcctccattttttttcccagaaacaaattctattcctttctcacaagaaagacaaataacgaactgaaaagagaaaaagaaagtgagaatatgagtcttaacgaacagattaaggaatgtagtagctgctaatgatcaaacagcataaccaggacattgagttctgatgtattcaaacaatttatgctattgatcaaactagagcatataaatatatatcaaaatgtaatccttcatcatgtctaagcccgagtcaagtaaatgttaattaagcagcatgctgccaatatttccataatgtgtccctgtaaattataatttaaatcactgtactataatatgtgctttgccataatttaatacagttgaccatttaatgggtttcatgcttgcttaacaccagaaatgcaagtgagtttggagcatgcattatctgcatgttttaagtagaacaactaccacaagaatgtagaagccatcctcataaacagcaatgagacctaaaacttcatttcttttctaaagaaaacatgaaacaatgtcaactaatcaaagagtagggaaatattagtacttgggaagaaaaagaaacatctcaaacaaaataacaagaaaagccagaagtcctcaaagaaaaagaaatacacgggaaaaaatgaaagtcctccaacaaaaagcaaaagacggaacatgaaacaaagcatttatcagattagctaacccaaaaaataaaaaataataataaagaatgttgaacttttttagaagtataattcacagaaacacaatttttaactctacctaaacaaaaatttcagaatgaagttattttcagaagctcgaagctgaatcgctattcaacaatccctgcatttctttccttcacatataagctaaatatctccacttgttagtcaaatactctgaatcccacatacaagtctcaacaaataactaacttttcttatcttgaaaattttctccataccaatacatgtttttttcttttttacattcttcactttactaatttgtatctctcattctcttgtagtaatataaaaaagcggagttctcaccatagtgttataaggagacatggggcatacaaatttacttattgacctcttcaacctggattttagttcctcctagggaggatagcaaataacatcctcaattaacagaataaattttcatggcctgctgcattactttctagagtccaaattacaatgtatatgattcattcatttcagtcgcttcattttatcttggctcatcgactactaaactagtgtgttgatcaatcacagatgtcattatacttttactcacgtttttattttccatattttttaaacctcacatgtttctggaataaattgtttcattttcacagtgaatgaagtaatatttgcaactaattaaataaaaacaatgtaatacatcaattccaaacaagaagagaagagactaaccggatattgatcataaatgcaatcccttcggccttttccaggcgtcaaaggatgagtatgctccttaacaaatttcgtcacaacccactttccagaagttactttcctcaccaaaatcattgccctgcagccaacccttgtctctgccctttgcctaacaatcttttcacgcttgtcaggcattctatacccctctttgttacaaacaagtgcacggccaattgcagttccatctcgccttgacctagaaagtttactcacacggatgataaaaccaatgcgtgtggcatatgcattgtaaaatgcatgggcagctgcttcagaatcaaactcctgccccacaaaaggctcatcggctggaaccagtgatgtagtaggaactcctacaggtatcatatccccatcaggagaatcttggttcatcttttcatcatgatcatgttggaatgccccttcaacagaactcccaccagtttcattttcatcccctcccctactattatcaacctcgacagaattccgcaaaatctctccattgacatctccatcgaccccaaactccactgcagtaataacaaactctctcctatgaacttcggatgcccatatattcaaacactactgcctaacttctattcaaataattattggaacaaaatgggttcaaattaacaaagaaaaaaatttggaattaaatgattagtatggtcattaaaaaaatattgaccaatatggttggcagcataattttattccatattagcatgattttttttttttttcctcaaatgagccaaaaagacttttttctttggccccggattgattacatcaaattattgcttttaaagaaatatttgtttaaagaaaaaaaaaaaaaaaaagcaactcgatcaaaccagaaatgcaattttcatatccaatttgaaaatttctataaaaataaaaactccattgaaccaaagctctaccttcattttgaaattaaatcaaacaaacctaaaaacaaatcgatatctcccaatattcaaagtatacaattggaaacaaagaattaagttgaattatgaaaagaattggtcccaaaatacagccggaagaaggaaaaagaaaaacctaattaattatcataattagacgtcaaaaaaaatattaaaatggtttaaaacaaataaaagatacatataataaactaacttactgaaattacgaccgatcctggtttagatgatcgggaagaacatgagaaggcgttgcttaggtttcgaaggtccagagacagagagagagagagagaggcgcagcgcaagggttcaggatgtaaatatggggcctcaatggttgctgacgtgtaaacatttgattggtgactatgtaaagtaaaagtcaactttcaaataccagtgactcatttctcgacacgtggtcaacgaggtaaaccatttctcggaggatcacctctcgcttgcttactcaagtacacatattcgggtcgacccggttctgtctctggccgttactcccttttctgtcatctttctttctcgcgctctctgaaaattacagagaaaatggaggttcttggctcgttagcttctatgtagctcactctagttcatttgcagaatacaaatatgtttcaggaaaatttgacacactctagtatgacgatatacatcaatcggtttaaaacggtttataacatattttaaccaactcaaatgtggatatcaaattgtaaacattttttctttctgtaaataagatgtaacattttatttttatttttttatggggagatgtaacattttatttacttaaatcggctaccaaatatttgaaaggacagactcccttaagaatacaaccaggacaagctaaagagcccacattaccagtaatatttatttatttattttnnnnttatttttattttttttttaaagaaaaatatgttattaactcaaatcaaatcagctgttacaggatcactaataaatctaggacaagcatatgtccacatatgacctccattaaaactagtaacagacttagctagtgcgtgggccacaccattcgcatctcgcgaaatggcacaacaagaacca

SEQ ID NO: 42932 - DNA, 3500 bp, Cannabis sativa
ctctctctctctctctacgaaagtcagaggtttcatataaataaacaaaagccttcaacacagttttttcaaacccaaacaacatgtcaaactcaagtactacttctcttcgtcttcgtcttcgtcttcgtcttctcatagatgggtgtactcttacataaagcttcaattctacaatcgaatccgacggttcctgcgttcaaaagctggccgcaagcgctacgtgtcatcttcttctgatcaactcgaagattcgagaagtattaatagtactaatgatattaataattgtagtaataccgtagaggtcgacgttggtaatcaagctgttgagtcgaaggcggtagttgaagcaatgaaaagtgaagtgggaagagaaagccgccacggtggtgatgacgtggcggggttgcaaagagcagtgaagaggcttcactttgggagctgggtggagaaagagatggcggctttggagattggaagcttggctaaacaggatgtaaaggtcagaaagttggtagccgagctcggtgttataccggttttggtttccatggctgcttccgacgttgtttcccgccgtcgcgctgccctggctgctctccttcaacttgctaatggaacttacacgtaagttcattaaatctttttaattggatatatgttattatttgaaaatattttagttctacattacataattaataatttaaagcagaaaaagaaaaggataattataacatgacgaattgaagagattttgactaataaatcttaattagtgtatttgtcaggcatggataataaaagatatagttttaatcgctataatttttaatgggttcatgcctaataatagcactattattggtactagtgaaagaatcatgtaaaagaagcctcacaccataaccaataagaaatgatcatgtattttagtgccataacatacaagtttctttgcattggacataggattttatttttaaataaattagaaaatataaagttaataccatagttattatttcaggtcctatgggatccatgacttttatttgacaattgagcccattagataaattaaatatatatataaaacattgttatgggttattttagtattggatccgaaatagttgaatataataatttttaagaaataattattaactaattataagataatatatttagagctgctagacaatcaattctcatatatataattcagtctttgagtcatgagcctatctagtctttggcgtcagtaaatggaatgcatggttggcagccatccactcatatctacttctgacctaattgacggtacaatcgatgcttttattcatgacatgtatgaattactctgagaaaatgaaataaaaaatgataggggtttcaactatatattgatgatgacggagattctttcataagaagaggggcttagataatgaattttctttaacatcaagctaagctatctaaaaatcatctcatgtcatgtagggttcgtaaaaagttctttaacttaattgttacacttatgggtgggaatcttagataaaataattaaaggtaaatattactactgttgtctcgtgggtgcattcattctgaagtagtaaattagtaattggactctagtagttgtcatatttcacatatgcatcgcacaatagaacccatcttttttagtgggtcagtgggcttatcacatatccatataaaatggcatattcaatcagtatgtggcatggtaccctttattttagtgaaaaagacttcatattacttcaatattcgtccaaaaattataacgtggaaatataatttataattctaccaaaaatgtgtataatttaatttataaatatcagattattatttcgagttaataaggctgggagattagaggggagcactaatgttctctaaacccgacataatgtctttgagataggattatattacagcttgtaaaagatttagtgtagtggtttagattcgatttcgaaatttgggcatatatataaatatattaactaaaccagctttatttgaccccgacttcccaacacttatttagattttggaatctcgttgacttctcatctgacttacaaatttaaaaatgtggttattttgggttctctcatctaccatttgaattattgtgcttaattatttgatatcaaatatcattatttcaaatccgttattgacttgtatagcggatatcgtactactattttctagtacttgaacctatgcactttctaacctttttcaattttttttttatttatttaattcaggaataaagctctcatggtggaagcaggaattctatcaaatctaccaaaaaacacaaatcttctagatgaaccaaccaagcatgaatttgcagaattgctcttgacattatcttcattagcaaatacacccttccctttagcctcatcagaaattgtcccatttctcattggaatcctagaatcaggttccactaatgttgaaacaatggagtcatgtataggtacattgtgtaacctctccaatattttggacaatgctggagcattagtttccaatggagtagtagataccctcttaaaattgtcctcaacaaaagaactttccgagaaagtgcttggagcattagggtgcttggtagtgaccttaatgggaaagaaggccatggaaaatagtcaaatggtgccagagactttaatcgagattttgacatgggaagacaaccccaaatgccaagagttatctgcttatattctaatgattttagctcatcaaagttcagctcaaagacaaaaaatggctaagtctggaattgtccaagtacttttggaagttgcattgctagggagtcctctagctcagaagaggtcactaaaactattgcagtggtttagagatgaacggcaggcgaaaatggggccgcattcaggaccccaaactgctggaaggatggccgcgattggttcgcctgagaatgacagagtgacacaagaagggaagaagatgatgaagagtttggtgaagcaaagtttgcataagaacttggaaatgataacaacacgggctaatgctgatggggaatcctctaagcttaaggccttggtgatcagcacaagctctaagagcttgccttattgaaaatataatttcacaacgtttttctaacatatattgttttttttttgtttttagattgattgaaaaacttattccaaattcgccttggaattaatgctattctttttacggtggtattgtgagatttgctttggcatacttgtgtacgagggtgatttcgagagagggcgcatatatgtcctcctagttcgatctgaaagagaattaatacattttttgtgcatttgtgcgtttaatagtagcttgtggtataacacaaacaaagaaattgattagaagaaccaaaataaaattatttgacctaataatttcgacttaattgg

SEQ ID NO: 42933 - DNA, 3815 bp, Cannabis sativa
aaactaagcggtctttacacgtgagatactacttgattgcgtatacttgcgtagtaaacataaaattcgtaacagaagtccatgttaaaccaagctgaggatgtcgagcaggagaaagaggtcattcaactcaagcgtaaggctaagttgaagggaggtgttggggccaaacagtatgctcaagaatattcagagtagaagcagtatgctcaagaatattcagagtaggagaggctgagcaagaagatgaagaaggctccctcgaccgaacaagcaccaatagaacatgctatcaagattaggaaaccagttggtgcttcgctgtcgtctcgtatgagactgatttcaaccatgatgtgaaaattattttcaagagcatccactagttctgtgattctcggtagttcaataggatcatcattgtgttcattggcatcaatgagttcatccacatctgtagggattgagttggatgtgggccgcatataatcactcaaaacgatcataatactataaaattgataataagtccctcaactattttaatagtataagatggatggtacaatagaagaacaaatttcacaaaatttattttaaattaaaatatattaagtcacatataaagttgtattaggcaccaccaatatcacttagtaatcttagcaattttttatttaaaaaattaccatatcaaaactaattaacaatgataagagtaatctatggatcttatatatgatattatctttctacacattagtcctatgagactgtctaataccttatcaaaatggtggctattttttgctcaccaattttggactgcttgattaaaagtgacccttttggctcactaaatcacaagcggcttttttgactcgtcttttttgatctgtggtacttttggctcatatgggctctttttggctcacatgggcttttttttggctcagtatccccatattacaatactatgttagaattataagattcacgatgtttcatctcaaaattaattggctataagaaaaaaaatcatatatcttatatatgatattatttttctacatattagtaatatgaaacactttaacatatagtaaactaatttaatagctctttgaagaaaaaaaaacaatttaataggggattaaatttatttcatcataaaaaatttatttcatcataaaaaatttattttatcattatttatttaattttccacttaaataagggttgcctatcatgttcaccatatttttcttccaaattgctttaactcatcccactattgaaatgttaaaatgaaatcttatgtacatatattatttaaaaaaaaaaagtccagagtaccttttgccaatttcaaaattttaatgattaatcaattggcataaaattatataacaagttaccttaaatttaatacattgatacttttttagttccatttaaataatatatattgatttattgttgcttcttcttaaaataaaaaaaaaaaaaagcacaaattcttttaccattttaattaaaaaattaactgataccttgctttaggcttcaacaataagagactagtataatgacaagtggcaataatattcactaaattctttttttttttctttaaatattttattttatgtatagcactaactttattttactttgatgaaagtttttatttttgttttatcatccctttttttattggcaaattattcaatacctcatcatgtatcttgttttcgaggtgtttgatccatcatcagcattatagtcattaaattaaattaggagtcatgtttttggtatcttagttaggactggtatttgtccaccaaaaagtagagataactaaagtttggaaacttgcaatctatctcattttacattttcatgtactattttaattcctttaaaaaaatatactattttaattaaaataatattatattttataatactctttatttttttagacataatttaaaaaccaaaatatgttatatttattataatagtagcatagcaaataacatgtctaaaatttaaatgttttctacttttaagttgaacttcacacttataaaaatataattgtcactgttattgtttagctacaacatattaatcactagtttaattacaagaacttttatattattagctcacctagtacccaaattaaagtaaaattaaatatttatattattttgaattctatgttttcactaactcctaatttacctttatctttttattttaaaaaattattttagattatatattcttataaaaaattactattaagactttagtatcaaaatatttttaaatataacaaaaataccttataattataataaaaatttattttagactctatattttagtataaggaccttatatataaataatttttttccctaaaaaataggctaaaattaagacattaaagtaagtttcgtaaatagtgcaagtcttataattttcaaattgtgtttctattaaaacaaaattataataattatgaaaattcaataaaaaaaatttcttttaattggcataactagactcaggatgcaataatattacaaaagatattacaacatttttttctgctcaaacaatatcaaatttattaagaagaagctaaaattttggtgagcacaaggggactcacttcccacaaattgagcaacccattacagctattggacaaaccccgcataacagtaacatggacttctacatgacaatcccttttaaaccaaaacacagaaatattacaagaaaaaagtatctccaacagctcaaagaactcaagagccatctttcactcagggcgtttaccttttctgattgtttgaaccagagataaacaaccagagaacaaatcccaattcctgccctgaaagtcacgaatgaccttagctccccaccacaccaccaacaattaaccatgaagaactcatgacacctcaactttcttagcaaaaacttcctttgcatgaccttttgcatccacgacgacaactccaataggagtagaggagtttgagaaagcagcgtccaccataacctgcatcttcccatgatggaagggagacgaagatggcagacctgaggttaagaactttaaaccaagacttggcaactgagaggccatcttccaatgttcttcatgttagtttaatggtactaaatcaggtacacatcgaaatattaatcaactgattatcattgtaccataattccaaggatctccacgtgtatatatattaaatctaaaatataaattgcatgaaagaaataaatacctcctgatgaatattagggtattctcaaaactttttgtaagttggatccactaaatctcataccctagtcttccaaattaatccaccacacaaaaggagtagtgtgggctactaggacaaagtgtatatgaagcttttgtataaatctcaatacatgagtaagaactatttcttatgtgatagagagaaaaaatatttactagtaaaatccttttcaggctttcaaaaaagttacatgaaaattcttttctcaaaaccttttattcaaaactttgttatacggtatatttaaataaactcaataaaaaatttatttagttaattatttaaattcaaatttatttattaaatcatatttaattatttgaataaaataatataaccgaattcggttataaatatttacatctaataattgattgagggaaatgttctagacttaatagaatttatacattaaacataaacatgaaataaatcatgtga

SEQ ID NO: 42934 - DNA, 5146 bp, Cannabis sativa
aaaaaaaaaaaaaaaatcccaaataaaaaagatccaatttcactcgaaaagttcatataatcttaatcaatgtttattaaaattacagaagaaatcttcaaaaaaataaaaataaagaaatgtagctgacattaaagtatatggcatataattgatgatgccaattttaaagtaatataaaatatgagtacatgagtgaaaatctaaatttaaagcctttctcttcaactatatataaactaattacatattttttttattaggacctattaattctttaattccatcctaattaacagtaaaagatgataatgacttgataatttaataaatatgtgtaaagatatataaagtagtaatttcaccaaaataagttggtttttaaaaataacttctaatttttcaaatattattagttgaaattattgttcccaagtgtataaaaaaataatataattttaaaaaaatattattagccacttacaaaatatatatatatttatattaaattattaacaacctgctatatactaagtcattgcgattgaaaagtgtcccatttatatataatatggatattcttactatgttggtttcaggttgatgaaggaagcagtgtggtagcttatcacagaaaacatcttccaaaaatcagtatgttgttgtctttgattaattgggtgtgcatataagtataaaatatataaatatatatatatatgtagttatttatacatgagtatttaaaaatgatgtatatttccttttgtttgcttaattttttaataaaattgtgagtctaatagtgtttaatgttatatatagattgcaatgatgcatgtgggaatagatgcaagaaggcttcaaagaggaagagatgcaagagagcttgcaaaacttgttgcgtgagatgccactgcgttcctccgggcacttatggccataagaacctctgtccatgttatgctcgcctccgaacccatggaaaacaagctcaagtgcccttaattatatataataataattattaaaattattcttatttaatttctctcactacctaccttctataatatatatatataagggagatcttgatgatcatatttatataaataataaattattaaagcacaactatatatatatatattgttgtgtttaatttattagctatatcgatctgatctctacaataacttacatttggttagaatttgggataagttgaataggttccatctcaaaatcaattgataatgagaagagtggctcattcctcttatatattctattatctttccacacattaacgatgtgtaatatacgtttatattatgaagttattaatatatttatgtgagtgggatacgtaagattaaatttccttttattaattgtttaataattatgcatgttcgtgattaatttgtttttttttttttttgtattattaaaactagtgagtgaaatatgtgtaaaagagataagctggtggaggtgtaaatttaaaatctcaaaccttagtgtgctataattttttgttcacgctcaaaaatcattgacgaggttgatcatcaagtacgaacaaaagttagaaaatatttactaaaaatagtgtttagtgtagtactattacaaaacggagagaatatgaatcaatcaagtgaatttgtattgaatgaattagagttacaaaggagtgagtcttacgtagctcaagctcaggatacaagcaattgatgaaaaccagctataaagtaattacaacagatcaacacttgccaatgtaactaactcaactctcatctaactgtttaaactaacaactaactaattcaccacactccctctcaagatggaaaactaatactcatctatcctatcttgtctttaaaattattgaattgaataggaaagagaaccttagtaaaaatattagctacccgatccattgatgaggcatgattggttttgatcacaccttgctgaactttttctcgaatcaaataacaatctatcttgatatgtttagttctttcatgaaagatataatttgttgctatgtgttgagcagctttgttattgcaatacagcaaggtaggacctttgtgttcaatgttgagctctttaagagctgataatagccatacaaattcacatgttgcatttgccatggccctattgttagacattttatatcactactacaaaaagagctttttgctttgattttcaagtgataaaaagaatttgcttcgattggtgtaaccgacgccatagtcacagacgcaaatagtgatatatttttttgcttctgttatgaaccgacgctaataggttttttgtccaattgtccaaaccactgtaccaccaccaccaccacactacaataaattgtccaattcacatatacacagatttaaacaaccatttaaatctaaaatatacatattcaagctagtgcaccaccattaccgcaccaccaccacgcaatgccaccaccgcaaccatataatgttgagctataatgtttaggttgttttgtacaaagtaattttagctattgttgacgcagtttgtcgtcaactgatataagaagatcttaaaaataaagaggaatgtgataaattaatttaactaaataaaatcgcaataaataaaatggacactagagatttatagtagttcaccctcgatgtcacgatggtaatggggctatgtctacttttatttttattaattcgatccgacacactagagttatattctcaagagtgtgtggacaataatacaataaattttttggtaaaatctcaattgagacccgtgaacacaagactcatgggagactcaatattcataaatttgaccaaagttggtggttgtaaggttctaggaaaattaaaccaataatagtgagaaaattaagagaatggtataggttcttgataactgtgtagagcgatggtgtttgggtcaaggagacttggtgtcgacaaagtatggaagactcaagtaaaaggtgaaggaaaggatatggtgttctttgcagttgtcaagtaagttaaaaagaaggtcctctttacttcagcctcttactttcattatataggcaataagatttgttagtgatcccccacatgtcggggtgtctcactaacaaatcctgtatatcatcttgaataataaataaaaaattacaaatatataaatatctacataattccccttgtttgtaggataaaatcccacaaacattgtgaaaatgattattttcggctaaagatgcaccaatttgaaatggagtgacaacggatgtcacctctcggcttagaatttatgatattaatgagaagtgttgaaaacatgtattttgggatgccattactcgcacataatgccacaagggttgtagcattgttctccaacatcccacacttaactacatttctcaattctctagtataatatacaagtttgcattgtgagccaattttgaactcgataacatcagtgttatatgcgtttttgtaagcatgcgacatggattttaatcaagaaaagttaagaagtcatcaactgccctatctccgcgaatgaagttttgggaagacaaagacaccaacttcgcggcaagagtttccgtgaagggaagttccctgactgctggccatgcgaagagcatccgtgaaataaagtctccatccattctaggagctaaattaagttatcaactcccacgaggagcatggattgttcagagggccctaggcattctgaaacacggtgaaccgggttatgctctttacctgcgaaagtttcacccatatgtgtcagactatggacctagggactagctaggcttttgtaggtacggtgttaatggttgtctcccatgacacactatcatacagagcatgtgtgtccttatgtacctgacccaaatgatccaatggctagggataagggaaatttaaaagggagtagccctaagatgacacgcatctagggcccagctcgtacggtctgacacccttaaatgccatatgggaaatacgccacctaccaatctgacggtgggaattttccccaacgatgatccgtccaaggcatcccatgcaaaagagccggcctataaataccccaaacaaagcacaagagaggaggaccttctttggggagagaagaccgattcttcatgatcaaaagcaaacgcattttgtaaccctacaatcaactccaaaatatatctactaagcttcctcttcttcaagaggaacacagtggaaaggggttctagtccattgtatctctatttgtataaacagttaccggccgatgagcctaataaaatggactcatggactaaggataattaacgcatgaatcacgtaaaaatctcttatttgttattttgttatttactctataactactttcttaagctctaaaattatttggttaccgaaaaactcgataaacattttggtactttcattgagagctgaggaaaaaaaacatgcatgctgactgccggcgcaaccctataaaaggaagagtccatgtgaagaaagaagaaggaaggccacctgactgcttgatagggtctggccaaaagtcaagaggttcttggcctgagatattgttcagatcaagggtctacatccttaggcgctcaaagaaagtgcaaaagatgaacgtacgtagcctagaaacgctcaccatatttatgctcgcccctaaaacccaaatctagctagccaactccttggcaagatgaccggccattggtatccttaagatcgtgctcctcgccgtccactggacataactacacagacatgacgagatgcaagaggtgtttgggcctggcaaagaagctaaggcctgatgtggttacgatgactaactcaggaaaggttgttaggtatatcgactcaatctagctcgagactccgtactagtgttgacgcgggggttggatctattgtccaacaactacttcccctgcctttgcgttgggcggtgtagtgggtcggaaactgatcctgtaatggtggtggctgagaggagaccatctcaatagttcgggagaatttttaacggccaaaaaagtttaagggacacgatttactacatgtca

SEQ ID NO: 42935 - DNA, 1683 bp, Cannabis sativa
tatttcggatgctaaaacacatagtgcatcaatgtgcattatagaattttcctataaatatatataagtatacatataagtaaattataatgggagagtaatatcttaaatttactaacaatttaagattttaaaaggatttattgtaaaaaatttaaacttaaaagctaagtggaagtgaaaggacgagaagatttaaacgtgaaaaactcttaattatattatcgtaatgtccttttagcatttctaaataaaaagaagtgataaaacaataaaagaaaaaattagtaataaatgacaatttaagatgcatgatggcatgtacgaatttaggttttcattctgaccaatgagagaagagaaaatgggtccatgttagataatacaaaagcgtcgtttcatcgagtgggatcgaccatcatggtgtgatttctgggtagaaagatgtacaagtgcggtggaccatacataaatgtgccacgtcagttttttattcgtttccaagaattaaattaacagctattggtagtgcgggacccacctatacaccggcctttgctgtttgtacttttgatgacttggctgatgttaaaatgactccaaattaagcaatgcataacctgtaccagcaacaaaaataattcatgtcaacctctacttgtggggatacagtcaatttttagtttttagtttctttaattttttttttttggaatacagtcaatttctttttcacaaacattggacataaaaaaagaattagcctaagaagtgtttattagcatttaatatgcattttttgtgcagaaaaaaaaatatacattgaaaagttaagtcatcaatattaatgctatttggcaattttatttagagaaatattcaatttttttttttgatgtttctgtaacactgatgtaagtgtaatttattaaaattgaaccttataatttataataaataatataaaacaaattctaactaagttcttgtttgtagtgtttcacgtcttaattatatgtgcctaatcatatcttaaaaatttcacatttctcttcacaaaaaagaagttttaaatttaaagtccctccccaaatgcaaaaaaaaaatgtgcctaatactaatactcttaaataagtaaatatatataaactttcaccatctctttcatttcacatatcatagatcatatggatccaattaaattacaatttagagcaacaaaaaataatttaatttttaataatagtttttgagattattgtattagggcataattgttgggattgtcgtatttgtatggaaagaaatgcgtgaggattttttttttttttttgaaagaaatacaaaattcactaagaaaaattcgctgttacaaaagaactcaaaaatcaagaacaagcatctgtccaaatacaatctcttacactagtaacagaggttgccaatgtatggacaacaccattcactgatagcaaaaagggcactgcaagaacgatcaccaacaacagctaattctaataaaatagactgaaaactaaaattaatgtaaaagttattaatccaaccacggtagaatcactattaataatgaagatactgaaaccaaatgcgtgaggatttgaaataccaaaaacaaaatgatagaaaataagaatgtacaataccacatatattgaagaaata

SEQ ID NO: 42936 - DNA, 3811 bp, Cannabis sativa
tataaattcatatccttacatagattgatatatgttttaagttaatctaaaattcgagtaataagttatataatgtataagaaatcaaagacaataatattaataataagttaataaccctagaaaaagaattattattatatatcccgaaaaagaaaaaagagccctaattttgtatgtaagatatatatatttatatagttattatcaatttgcaccttaaattaatttgtttgcagtttgcacccattttctaagtcctccctaaaattaagttacaatttcttcaagtaccaaaaatacagatgggattatttaaaaaaaaaaaaaatacaaaacaacaaaaaaaattataaaaatacagttgtatgaaattttatacattttacgatttttaagattttatttacataaagtaaaaatacaatcttttgatatattattctattgtactcttgttattttgttttttattttttatttctttttttattattttgttgttgttttattgttactttcatattgttgtgtatatcgaaaaaaaataaaactttgaacgtaagtgatttttttttctttctacaaaatgtaatagtttacgtaattttcccaataaaaaaacctaatgatattggcaaaaatgataatcctacctaaatattagcctatatattaatcataaaaaataaataaaatacaacatattggtttagttggtgcaattgttgttcttcaaattttccctttgaacattttgacttgtgtcaaggtcaaccaagtgctaggaaaaaaaaaatatcatacacttgtggcacaatagacaaataagaacttggcttgaatctgtaactttgtcatgagcaaaatcaaattgaatcagcaaacaaattaatttgccattccattcttggccgtaccataattagcgccttttgttgttgagatgttatttttctttcgggttttgaacaaaattagtgcaatttccatggaagctcaaaagatgaactatgtgcaagcaaactcaactaaaacttatcagttgactgtcttaaaattataagagccccaatgaaaggttcaagatttccatctaatacataatttagaccgggaagttggataccggtttttagatcctctactagcttatggggttgagacttgtacttcctagtctccctttgccagacatccacaatggcctctctatcgatgtcacttacatcggacactccttgttcccgtgcaatcacaagaagctttgccatcaaccgattaagggctttgattcgattcgagaattggtttctctcccctgcaaatgaagaagtggattgaagcataatacagaaactaatggcactgaaaatgctgatatgatcgcccgcctaactttacaatatttggggaccaggaacctataacaagcgagactcgattattagaccttgtgggagaaaaccagtgtctttggtttgaactcttagttactcattacatagatgaaataggtatgaagaggattttgtttataggattggatcatattgtcatgtaaacatgagaattgattagaatgagatgtatggatatgaatatatcacctgctgattggacacttatgccagttgggatgtggtgaatgcagactgaaggtctagttctactatgttcttcttcaagcatggaggaggatgtgatattcaaatcggtttcgtcaatttgaaggttgtaactgttttcaaggaacaggggaacaacgtctacgcttgctgagctactctgcatgatttccaccaacatgttaagcagtgaaattttcggtcaagatgaatagaatctaaacttagctgtaaatactttgagaatagattatagagctatgagacatgacagtatatggaaccactgtcttgtctcttacagttatatcatttaaaatgttgaaggaataaccaaactgcactgctctaaaatagaacagtgaaattagtcttcacacagcacatcataataaaactcagtgcacccacattggctggactaagttcggtcgtattgtattgaactgcatagtattgtgttggattgtattgtattaatatcttttaatacaatactatgtttggtattgacttgtcttaataggttgtgtaaaattatatctttacaataaactcgactccaaccctgaccttggcttggagtcggacacagaccacattctattaaaatttatcgctgtaataattagtgttatttattatttaatacaatacgatctttatatggcctacaagctctaaatcagcaaacgacacaaagaatcatatcttagtcaacaggtaaataaacagaataaacaatacacaatcttaatggttcagaaatggacaaaaagtatatgcatatattgtattggatgaagaactgcactagataaggtctagcaaaacagaaatttgtatcaaaataagacatggaaagtagctagaattctgaaaacattagaattaagcaactgatttaagaatatttggccagagattaatagcaaaacagaagttgtacctcattaagacctctaatcatgaagtggacacccctttctcctgaaagatatccatatgcatacttaaattcaaattctacagttgctgacttaatcccaccattcatcgaacgacgcttgtcgaccactctcccttttcgtccttgttttttgccccatttcgtatacattctcaacagttgacttgcccatatctgaaagcacgggagaaacaataatcattttgttgaacttttacagaaaaatcatgtcaagatcatacataaaagattatcaaacctcagagtgagcttcagatccagctttaataactacacatgctccctcaatgtcatatggcccctttagaagcttggacatctcatactgatccaaaatcttgcttacatctaaagaagcactatatgcttgcttaaaaagcccataattgatagcatctatctcagccaattgagttattaactttgcctcttcaacctgcacacataatatagtaaataagaatcaataaacataatcattccatctaacagagtaaaagtggtaatgaacggcgatacccctttatgttttaactttcatatacttaaattcttgattttttttttttttttgtcgcaatatttccttaatttcacttctatttgtaaatttgaggcgtcaattaaatttcactgttaaatgttaattgggattgctagtgtaaacctgtgcacatatggcactaaaattttgaagccaataaaaacatgccatgtatacataggtgtacacagtgacaatccaattagcatttaacggtgggatttaactgatgcctcaaatttacaaaaaatgaaaaggaagcattgctaccaaaaacagaaaatcaggacatcgagtgtacacaaattaacatataagatagttcaccagctcatgtggacaagttctaaagactgttttattgacaaaaatcataacatgtatgaaaaatcctatgcatgaattatcaccttatatgttaaatccttaagggcatcaacaatttttgcactatcagccaatttggcaagaatgacatcagatttagctggatcatcccaaaggtcataagctcttatcatttcttcctgtttatttcgttttgcttcttcacgttcaagtgcagcaggggccagcatttcagctctcaaaacagcctcttcaatcttccttttcaatgcaaataatcctaaaacaaattaccaaaaa

SEQ ID NO: 42937 - DNA, 4340 bp, Cannabis sativa
tgtaaaacgatctgcgaataaagttacacgtgctttaacaaaaacctctattcatgttgttgattgtattttagtaggtaaacatttcatccttacttttggataaaatttaataaagaagtttttttctttcaataaaaatgttatttaatctttatttatataataatattatatgatatttattttaaattacttaatcaaagtatattttatattgttacataaggtagttattgttttcaatttttttttttattgttaaataattttaaattattagttatttgagttataaagttattgaagttataatagttatttaaatattattgaattagtgctcctgaatctattataaatactaattgcattttgacaagataaatcatttcacttttttcttatagtttttttctgttgaaaatattttcttagaccatcttcaatgggagatgtaaaattgatctatatttgacacaaaaagtagttttgttttatttttacatcaactttaactattgttctccattacataattataaatcttgatacaaaatttaatatgtcatttaatgctcaattaattatttattaaaaaaatataaaataataataattcaaagaaaatataaaatttaataataattataataataataatgcaagtcatttaatataaaagagcatgttaactaaaatttaataataaaatattaaaaatggcataaagataaatataaaagcaaaatttttattgtgatgcaaattttactttatgtcatattgtgatctaaatttggatcactttttgttatgtgacatatttgcattacaatttgatggagtagactcttaacaaagtgagctatattttgcatttgcatcacttatttgtatctccattggagatgctcttatagtgactattgtttttattttttattatttttatctattcatgcttattttgtttatttgtagtgaaaataaactataaatttgctacaataatttttgtttttgtttaatcctaataatgtataatttatttatgtgtagctaaaacactattgttccttcaagctttcaaagaaaggataacaagttaaattgggtaactctaatgatgacattgggttaaaatctgttaccaggattttacaattgtgattgcgtgtactattagaattttctactataatgattttaagattattattagaagtttttacaagtttgttattgagatttctaagagcgttcctaatttgtgttgttcgtagattagttgtacatgcttttcgaatgaacgaaaaacttgatttgctggatgaatatctatattttttgtagggtgtatagtattatcttgatgatcatgcatatgtagtatttatttgataaactggagatgtatagtactcatattattatatttccaatgaatttgttcattgctttcaaaaaaatattattgggaatagcatcctgcattaagattactctaaatctaaagccatcttttatagaccaaaatataaatcttcttgaccacctgaccaacaaagaagtatcccacaaaaagtaccaccaaaaatctgaagtatgacaacggcaaggaaacaaaccccataactgcaccaattggagtaaatgggattgagattccaatggcagaaatcaccactgtggagcaaattatgggccatgaggcgaactcctgaatgaatgggaccttctctgttcggaacaagtggatgattagagtctgcatcaggagcccttcaacgaaccaagctgtatggaagaatttaaggtcttctatggtacgggccttgtagtaaaaccaaatgaaaagaagggtggctacatcacaaagagtacacacaggtgcattccataagatgaacataggtaaacctttttcagaccatttttgtgggattttgacataatcatcttccattttgtcccatgggattgcaatttggccaacactatacaagaagttttgtgttaggagctgcctaggagtcaatggctcattcttgaggaccaaatttgctatcaggagtgagatgacatttcctatattggcagtgacagacatcttaatgtacttcatggtgttcccgaaagtaagtcgcccatgctcaactccagcaacgaggacattgagatctttctcaagcaatataatgtcagaaaagtccttggctacagatgctccagaatcaactgatatacctacattggcagcatccaaagctagtgaatcatttattccatctcctagaaatccaacgatatggccaccaactgtctgcaatgactgaacaactcgaagtttttgtgttggagtaagcctagcaagaactgtggcttttttgacagtctcatgaaaggtttcctgctggagctgctcaagttcaggtccagtgaccacatgcgtggtttcgatgccaacttccttgcaaacctttctagccaaagagagtgaatcaccggtcagtacctttgcttttactcccttctcagctaaccgccatagggcctgctttgccgagtctttaggagggtcaaaaaatgttataaggcccaggaataccatatcagattctaaggtgtcaaaattgttgctgctctcagttgttgacttctgcatgataaatattgcattgttagctattggcattaggaaaccgacctttattcattgcataagaaatgagaaaaactaaatgatgtagggtcaaaagataagatattcaggcacaccgttttcagtctctttgtagctaccccaataactcttaaaccttcattgcttatttcttcactcatacctaaaattctttgatagtcttctggagtgaaaatagtgatttcacccctatcaacatgctccacaaaagaacaaactctcaatacttcttccagtgctccttttgttaccatgaacttttcatggaaatgctggtttatgttttctgagacctccatttctaggataatagatactcgtcttcttataaaatcaaaaggaatctcatctatctttctccacttggagggctgaaacctgtatccatttgtgaatacatatgccaaaatggcgtcatccaggggatatttctgatccgttttaaaatatgagtttagaaaggcataacataaaaccttttctctgggcataccccagcagtcaatatgattaaccataattgctatgttcatggttagtgtccctgtcttgtcaatgcatatgatatccctgcaacagagggagcacatgatcaagttttacaagaaataaaacacaatgtgaattttcttttctacttgaagaatagtagtgtctggaatgaaattaatatgtactaactacaaaacttccactttatgctcatgacaagccctcgagaatagggtggtcaataagtctttaatctttttcctaaaacatttggtgaatgcattctgctattttgattttattttacatatcaggagagcatagcccagcactaaaaaaatatacccctaaactcaaagctttttcatgtacgttccagtgaaggaagagtaaaataattaaaagaaaatgacagaaataaggctagtgttttttgtgtacttgatcagcttaaagaaacccatcaacctaagtctgatttgaacttgatgaaatggaattccattgtactttgcattcgtgtgtgtgaactagagaaaagggtcttatataactacacgtgaagcacttacatagatcccatgtctcgtatggcagttgcgctcttgactatacatctatctttggccatagcaagagctcctttggctagacatgtgttcacaatgagaggaagcatttgaggagtgagggcacttgcaactgagattccaaatagaaaactaccactcaggatgtgacacgaaaggtcagcagttacaataatgattatgactaccccaagaataacagtaaccacaacgtaagatatgcaacatatccctttctcaaagtcatctggtagtctttgctttcccatggttgaaaacatggtactcatgtatgtcttggatccagttgaaactaccagacctgtgccgctacctgatattacatttgttccctgaaatatgtaatcacaattcgagattctattcaatggtaagaaataataagtgaatactaagttacactattacaaaattaaataatttattcgagaatacttgaggccacaatggatgttttgtttaacaccacatgctatgttaatttgttaggtgtaaaagaagagtaaaagagtaattatacctaccatgaa

SEQ ID NO: 42938 - DNA, 2040 bp, Cannabis sativa
aagaggaggaggagaggaaaagacgacatctatggccgagaatgtgacgtcggccatagcttcggatcccaagtttagagttgctgtagcggctgctattacatctctaatgaacaaagatcaacaaagcaaccataataataatacgattgttggatcatcatcgagtacttttgagcataataataatcctaataataataataataaagatggagatcatagtagtggaaatgggtcttctacaaataattgggtgcttgaaaacaatatctcctccaacggtaaggcaattcgtcaaacaccttgacaacatgctagctatatatatagagaatatctcaaataaaatatactatatatagtacattttcatataattaattaattaaagaaaaattgaaaggatttcatacaatatgtgtaccattccattttctatatagttgtagatttcgaataactgatattttgttattaatcatttcatagtgaaactgaattattatcataatgtgataatagataaagggttttcgtttaattttgttgtagagttaatgtaattaattactcgtattataattttgtttttattttaaatttttattttctttcatagctctctaatagtatttataatgttagaaactctatgttaaatatgaagtatatataattgtgtatgaaaatacacaattaaacatatatacatgatataactaaatgatcaaaaaatacctccaattattggttttttgagtttcaattccacataagttttgaatttgcaaagaaaaagaaaacttattaatgggtaattgggcttccaaactctttctactctttttagatagatttattctgtttcacaaaaggcgaggtcctatatttatatagataagaccttacatcgaggtatttaccacaattaattgttagaatattctgacaatcaattaaaaaaattaattggtgaatcaaaaactggtcatagaatacttatatttattaaataattgatttgaaatcaattataatgaatataaaatatttcatacacctaaaaattaattaaatgatttatgcttaatataaaaatattctaatattctttcattcggtcagtatttagatttaccaagtaaatcaaatgttcctcattatacaataaacatatgaatcatagaaatagattctctttatatggggagtattatttgtcatgtattacaatgtattcattatataacaatgtactttacgtggcaaatataattaagcaaataaatcctaaatcttatgtttatcctggtcctctaaagataattttctcaaataaaattaaggtacacatgaatataaaaaaaatatcaaaattagagtttcattgaataattttagttgtacaactaaaaactgcatatataagggctaactgaatctcatatttagtttacgatccttaaatttgtgttgcgacattcatttagtcaaggatatgtgatcacccaattcaggaattgcatgcttattgaccacttatcacgcctctttatagctaaatacttaatgttgataagctgctagcttcaacaagaaatttctgccagaagattgcaaaacttttctaatagcctgaaatataaatctaaagtctaggcctagtataaaactctacaatacactatatatttgtatcttgaaaataataaatgaatgtgacttttataatagaaataacaattaacttaagggcgtaatcaaatgttgattatagctagttaagtacgttggaatctaataagttaactatatttccagaatgtcaattcatctcaataaaatatgtataaatataatatttcgtatcttgaagatacctcatcactttgtatgaaaaaataaagtggtcttaactttagatattctgataccacttaataatcttgaaataaatgcaatacaaagtcttattgaaactcttagacatacattaggcttctaaaaatagaagcaaatgaatgttcttaatttatt

SEQ ID NO: 42939 - DNA, 2519 bp, Cannabis sativa
aggtagcaaaaaataaaaagggacgttttttttgaaaggattaagataacaacggtaacaaaagttacacaaaacgaagggggatttcttccatccaagaaagttacagagtaaccgataaaggaacatttggtttattattttaaaaaaagggacataaactttcactagagaaagaaagaaataagaccatttgtttgcatttccctacaaataatataacagcattactatagtaaaattgacatgatttccttttttttttttaagtacaccttgcgggaagtagacttaataccgaggtaaatatatataagagctcatatccaatccaaatgccattttacacattgctgattatcatttgattcaaatgcatgcatgcctcaaaaggacaatacaagctataaaaagagaattaaaatatatataaaaaaaaattgaaattatgaaacaaacggagattcaatattgtttcaatccagtttgtttattcgagaaccaatcgttcgaagtaataataataataataaaaaaaaccttgtaatcttgacatgggaccaaccaaacacaattatgaactattcctcatctcatcatatcatgatcatgaggatcatgttcttcttctagccatagacgtagcattcccatcaaacagttcatcaataaatgtctcaatgtcttcaggttgatacttaatatacttctctgcttgtcttccggcatccaaatactgcttaaacctccctaagaaagccctgtaagccggtatcataacagccgaaatcgaaacccgaagctcagactgaagctgatcatcactcacaacccaagtggattgtgtcttgtgtatctcatcgaacatggcattgaaactcttgaacctctctttcagtactggcttcgaaaccttaccgttcacctgaagcccctcgtgggctaaacactgcagcactttcccccaagtctcgcgctggtagttcttgtggtactgtctcaaatccgaagacctcttccgacaccatgtatctcccatcagttggtgaatctcgtttgaacctttgatcttttgaacaatgtatctcccattgttcatcaagaaaacatagctcaatgatgggtctctgtacagcttcgatttcatctccaaattagagtccaacagatccatcatcgacatcagctgtttcgaaaacggcgtcgtttgggattcccctgtttcatcaccctgggaccaatgatgagcgctctgttcaactggatgatccgcattgtcgtcctcaaccttgtggcattgcttgaaaacctgttccaacgtgtctttatactcacaggcgtattttaggtaattcataacgtaacgagtcaggggatggactgccccacttgggacaggagttcttccattgtcgctcttgattgagttttcaaggtcgcagaagatgctgactgcagcctcccccagccggcttttggccgtagtagcttctgtggtcatttctttagatatctccggcgggtacgattctccgccgattaccggaatgagatcccggagggtctcgtacatgtcgaggaacttgaagagtttctctgcggagcgcttggttagaaccacagcctctgcgaaatcgagaagcttgatgacaaacgcacgagccatgttgctgaagaggctctgggagattgaagggtggtcagagaagacagagtcgctgagcttcatctcgttgggaaagagtacggcggtgcattgcctgacgatcgtgatccacgtggcgatctctccttcgagcgattcccattgcatgcgttgtacgtcgtcgatgctgatgctgtcgtagccgagtttctccagggctgctttgaatgcagatcgcctagagatactataagccatacaacattcggtgtcgtatccggctgagatcatggtgttagcgatcgtgtttagtttcgaaacagtttcttgagagaatccgggaaactcctcctctgaagcctgaccagattgttgttgttgatcagaatcgccacctataacacaacgatcggaatattcatgattgttgttgttgttgaacgaagattgtttcgaagtcttatcctgggatttaggatccgaggaggaggatgatgaatctttgttgtcgtttttcgaatcctcaagaagagcacgaaactcttcttccaaaaacgacattgctctctgaagaacagagcttgctctgttcacactaacattgaaaacagggtattttcccaactcgttcgaaagtttggatactcgtctcaacgcatccgaaaacgacgtgtcgttttctgggtctctaccgaatttgatgagactgctctgtccttcgttatatttatcgatcatggactccgtcattttacagagtagctccaccgagtttggagcttctcccggcacatctgaatcgttcaaactctgaaagaatcgatcaacgtcttccagaatttgattgtgattcatatgggaatcggaattggca

SEQ ID NO: 42940 - DNA, 3826 bp, Cannabis sativa
ttaacccaaatttcagtatttttgtaaatttcccttataaaaatacccatatatatatatatattatgttttgacttttttttggtggcaataatgtacatgtatatttatttttaatatttaattagtttccaaaagtatgaattaccataggacgattaaacttactgggctacaaagatagcggtcgttgggtttcataacttaaaaactacttttagtttttaaaaacagaaaacagtttttaaaagctaacataaactgtttggcaaaaaattctaaaaatagtttttttaaaaaaatttgagttttaaaaaattagaaaataaaaaacatcaaactaatattttctgttttcaaaaagaaaaaattatctaatatattttattttatatttttgctcacatacttaaacccagatcttgaacccggaccccgaccttgaccccgacccagacccaaacctcaaacccctaccccaacctagagttagacccgaacacagaccccgaacccggggctaggtccaagatcctatgttgggttcggggtctaattctgggttaggggtctgggtccgaggttcgaggcccggccttggattcgtgtctgttgtctagggttcgaggttcgggtcttggttcgaattcgagcctagggttcgagtccgagtcctagtctaggcccggggtccgggtccaagtctaggtctggggtccgggttgggattcggtgtccggggtccgggtcggggttcggtggggtccggatttgggctggagtctgggttcaggtccaggtctggatttgggtccgggataggatgggttcataatatggtatggtgtagaatattaaattttttttagtaaaaataaaatctaaaaatagttttaaaaaatttgagtcaaacaccattaaaattttaaaatgacaaaagttattttctattctcatttttaaaaatacaattttaaaaactgaaaatcaaaaatactgtcaaacaaccttttcttttactttgcaaaaaaaataacttttctcttatattttattaatataatttattttcgctcttgaattattaaaaaaaattattataagtgtccataaaatctacaaattaaatatttaagttcatatatattgtagtattttcaattatgaagaatttttttgtaattcaactaatacatataaaattaaaaaaaaatatatatatggtaaaaaaataagcatatttatagtagtatgtgcagtacagattgaaccgcaattattaaactcaaaactgcaaactacatcgtatcgcatgatttggctaaaatataaatcgcaaccacattgtaaaagatttcaaactgcatttttcttgcagtgtggtacaatgtagacagtttgtgcaggtgtgtgaaataagaatataaaataaaatctttattaagtgtaattttagtagaaaagtatgattgtaaatttatctttgttagttaatctcaacccctttcaacttaccaagaaatcatttacactaaacaccccctaatactataggctttaattagtgcctattcaagcttagacaggctggtgtaatatcccccatggacaagtttatcaaccacaataatgcctctttcacactctcgtttcctaccaaaaaaaccccttccttcccattatttggtaaagatacaaatggaaaaatgcataagaaaatggaatggtgggcacacatggataacaaaatgaaaagtagctgaatctaaagttacaaaaccaatagtaatggtattagctgaacccaatttgttgactgactaagtgtggttgttgaaggtatttttgtggtccaaaaccaaactttgtttttgtggtgcaacaaggaacttgaaatagtgattttaatagggcatgagggttaagacacgctcagtaaaaagcattcaagaatcagaaatccccacctactttaatggccaacttataatgagatgatgaatcactatttttttttttctttttctttttttcttttatgaatcattatcttaaagagagtcttggcccatgtttgtttaagttgatctaccttgcagaaatacatcaaataccacccaaccaaaatgtttcaagtgaaagataaaaaaaaacaaagtgaagatttatgtaccaaataagtacctccaagaacaattttgataagtactgataactctcaaatagagtatttgaactaaaaaatttattagataattaatgaactattgattctaagccatctattcaaaatacttttattacttattcttaataaactaaccatatatagatgtagtaagatctggaaagtaaaaaactcctttaacatctcttcatcctcaaaaaattctcgatgtgaagctattggtggtacatttcaacatctcaacttaaccctaacatagtgccagtaccatcataaaatgtaatatttcatcagtgtaattaaatattcaccctaacattataaatattagtagtgttgcgccaattaacatttacagaaaagcttcagtaaataattattacaacaaaaaaattgacaaccggatttttagaggaacatatgaatcttgtaaggttatatttccaccctagggatatatgcaaataaagaaagtgagatcgacaccgtaacaaaaatattatcaccccaaatgaactaaaaaaaacagaagtatttgtaaataattaaatattgtttactaaaagatacagctgaaatcgataacaaatgggtctttcagtgtccgagcatatcattaatgaaaacacaaaaatattcaaaacttcctaaagggtaaaaagccctctccaaattttgactaatttaatgagacttcacatactcctgaacaacatgaagaccctctgtctcctcaccaaaatcctgcaaaataatcaagcaatgagtagagagcaattaaaaaaacaagtactaatttccattgagcaaaaaagaaagacgaggattgcagtctcggatttgttcataccttcacaaccacacaggaacaaccaaccacctttcttgccttcccttctgaatcaattttgcataactgtgaaaacaaagtaaacgaatactatgaggaagattttcaaccaatattatcagatattgtaaaaataaatcaatcaaagatcagcagatctatttgcatattggaatctgaagagatcaatcaaagatccagaaacaataagcagttcctggagaaatttcagagaaagacaatggatgtgaaatgtagcaacatattaatcaaaacgaaagaaaaaatatcagcagatgtgtttgaaaacatatagaacaaagtcaagactttttacatgttataaaatgtgcttaccccaacccattcaccgagagttttagcactaggaactgagatcaacttgacattgtggtcagcacatagacccttgatcaacttaacatagtctggttgatcacaatcctcagctagcacaacaatctgtgcagcgtgcttctcaataacctttgctccctcgtggagtccacgtgcaaggccactatgagccaaggccttccttaggacaagctgcaatgctgtcataaggtccatgggctcccctggggcaacaacaggggcgggagtctcaacagggacaggagcagctccgtcttctctgtagtaacaaacacgcaacaaagaagataaataagatgcaataaacgcaacaacaatcatatgatgatcatgctcgatgaccattaagcccaccaggaaaaaaataatgacatgtaccaacaacacaa

SEQ ID NO: 42941 - DNA, 20380 bp, Cannabis sativa
tttttacatataataattttttttattatacatatatattatttaattattattttatatatatataaaaatatttgactcggtcaaaccgagtctttacaccttcggccaattgcctctgtaatgagctttacaagataatcacacgaaggtaatggctaatcgaatgaaaccgttgatgaacaacatagtagcagagactcaaagtgcttttatttcgggtcgtctcatctcggataacattatggtttcctttgaagtcttgcattacttgaagcggaagcggaaaggtagggatggtttcatggctctcaagcttgatatgagtaaagcatatgaccgcatcgagtggaacttcttgaaggcagtactttcaaagcttgggttcggaaccaattggaggaatttaatacaacagtgtgtctcgtctgctagttacaaggtagttcatgggggacgggaaatggggcctataataccaagccgagggattcgccagggggatccattatctccgtatatctttattctttgtgcagaaggtctttcagctttgcttcaaaagtatgagttgagagggtggatacatggttgcaaggtagctaatagagcaccaagaatctcgcatatgctcttatgtattgtaaagcaactagtgaagaagctatgagaattcgagagctgtttcacaaatttgaagttgcatcgggtcaaaaggtcaatctcaacaagtcctccattttttacagtacaatacccaagcatctatgaaacaacaaatcaacactctcttacagatgagagaagcagaggagaatagcttgtatttagggctgcctagtactttggggaggaacaagtcaagtgttttgggttatctcaaggatcgggttagaaagaaactccaagggtgggatgcaaaaattctttctcgtgctgggaaagaggttctcattaaaatagtggctcaatcattaccaaactttgccatgagtgtttttcttctgcctcttgagattagtcgagacattgaaagccagatggcgcacttctggtggaagacttcacctggtgataaaaaaggcattcactggatgtcatgggagcgtatgtgtcagcataaatcagtgggtggaatgggttttcgcaaccttcgggatttcaatctagctcttttgggtaaacaaggatggcgtcttctcacaaaaccattatctttggctggtcgtgtatacaaagctaggtattctccaaatgaaagttttctcaatgcttaattgggaaataatccgagctttgtgtggagaagtatctgggaggctcaatctgttgtcagaaagggggttcgatggagggtgggagacgggctttctatctcagttttgggtgaaccatggttgccggacgaagaaaatcctatggtggtgtcgtctcacccaggattacaaggggctgttgtcaacaatctgtttagacaagagggtggtggatgggatatggagatcttagaggatatgtttggtcagcgagataggaatttaatcagcaaggtgccttcacaattgactcatgaaactgaccaaatcatttggcacttggagacttcggggctttacactgtcaaaagtgcctacatgataattcaacaagaaaaaggttggattaacgaagagtctatcacaagtttttggaagcgggtctggactttgaagattccaccgaaggttaaaaacatgatatggcgggcaggtactttttgtcttcctaccatgactcagcttataactaaaaaggtggctgtaaatgtcgtgtgtcctatatgcaatgtggaggaggagattatcttccattgtttagtcacttgtcaggatgtcaaatgttgttgggacagggtgggtataggcacacatctgctacatggtgacaactttctagtttggttgaaggacatatttgagcgattggagcctgataaaagaggtttaatagccactctctgctgggctatttggaacgccagaaatgagccagtttggaagaagaaaaaggtaagtgctttggatattgttgcttcagcgaagaactatcttaaccaatggagaaatgctcaaaattttcaaattgaaacaccttgccccgatcttcaaaagggtgatggtgcagagcattggacttgtccacctgttaatagtgttaagatcaacattgatgctgcaatatttgaaattgaggctcggtcaggcatgggagttgttgcccgagatgataagggaacgtttctggaaggcttcacgaagatttacagtgaaaagttggacccaccacttgctgagacattaagcatgagggaggctttgagttggctcatgaataaaaactggcaacaagtctttcttgaaaccgactgtcttactgtagtcaaagcaattcgcagtcatgtagaaatgttatcttgttttggtattgtaattcgtgactgtagatgtttactgaaagagttaaaaaatgtctcgttatgttttgtaaaacggttagccaatatggtagttcatagtcttgctagagcttctatttgttaccttgatcgtatgttcagtttagagaatgtctcagctgttgtgctacctcatttggtagctaatcttgaaggttaataaagttgattttcctttcaaaaaaaactataaattcaaatagcccctaacctgtagataagggaatttattttcataaaaaaatgttagaaaattactataaatccaattgaagagattgacaattaattatcttatgctatttgcatttttcagttaagatatacttgataaagtaaattattatgctcgtaaatgttgtaattataattgctttgattactcctactgataagcttagactatcagggctcgtttagaacgccgtattatattgtaaaaactagattgaagtgcaagatgactttaattcaaaaataggataatttatttatttaacttcatatcttaattgaagtagacttttaattattatttttttacaaacaaaaatatacattagagtaaatttccaaaagtatagcttcaaattagtaccgtatctcaatttttttttttttttccatgattacatggtaaacaaaaaatgttgaaaatttttatagaaaaaaaaaataaaaaacttattaagttggagctgcacttaaaaaaaagttgcctacgtaccctattaagtaatagggatcaagctccacgtagttctttagacctgcaaaataattaaattagtaacaaatcatgaagacaaataaacatgtaaaaatggaaagaaagtaattaaaaacaaaaagttatagaacattataacagacgtaattcttgcaaatatcatgctatattataatttataaaggttaaagtcaaataaatgcactcgactaaaaaacacatccatatatttatatcattcctttcccaattttaatttgtgaaatataaacataataaattctctttgttaaaataattcaattaactaaaaaaataaaataaaaaatataattatctacaaacttataactgtttagttatgcataaaaatatttaattgaattatattgttcagataaattgttgtaaaagattatatatggtattaaatttgaaggtaatgtttagaacctatctttttaaaaagatttccgattaacccataaatcttatttccatagtaaaaaaatcccataccaaacagcccccaatgttcaaattatgatgcaaaatacaaattatatattttatccttcaaaatataaatataaatactttcaactttaacaaagataaatctctcattaatgtaattgtaaaacatataatattctgaaataatctaatcaataatttttagaataagccaacacataagataaaatccaaatccaatcactttagataaagtttaagcaaaaaacacatgagttgattaaactttgtaaatattattatatgacctaattcctgcaaagaaaatatataacaggacaaatttcattaactataaacataaagtgtcaaatggccatatatctccaaaactgacaacaaaactaggatacatcagcacaaattacttaaaaagcacttgatgaggagtaagattttattataccagatttgagcaacacaaacaacattcagaagaagagattagaacactagataacccaaacaaatctgtagttaacacataatgccaaaccatgccagtggaaacaatgggactgaaaacacgagaaggacagcatgaatcgaaatccacaactattaaagacagaatgcaaactgcagcatgaagataaatactataaaccttcactaaactggtactaaaaaacgaaggctgcaggcctccaacatttaatacatcttctaaacctgaaaatttattgagcaaaaatatagcaacaatgcaagtcattcaaagaaaatactagaacaagataactcccttccgaggtgccaaggtatatcttctgataggaattattgaagcaagttcagaacttaaaattattgaataaatgcatggatagtcttgaaccatttcccatcacctataaaaagatagaccaaaatccaaacaatgtagcacgttcagccaacggagaaataaaatgtaaggttgaggatgttatgtcaaaccaaagaccaccacaattttgattatgttgaaagttaaaacaaacagaaaattcgattaaacaacaaatggaaagctaggtgacaacattcacataaacatcttgctattacaaaatttatgagcaaacggtattgatggcaaaaaggataaaggaaaactaaatgacacgtaaaacgaaagaagtaaacatagtaaaaaaggaacaatatactatgacacacaaatgcaataattttctcgaaacaccaccaccatggcagggcacctttaattagtttaccaaagtcaaataagtactgaaagaaacaacagatttaccaaatgagaaaaaacatataaggagagtgagaaacaattttaaaaaggataagtatgtcaagctgaaattcttatttttcacaaaataggtaggttgttgaaaatctcatgttgtctattaaaagatattatgataagttaactcccttttgttgggacctgagaagatgaagacactaattatgagaatattcttcataaaagttgaacctgaaaattcgttgaacaccccaagcaaaagacatgcacaaaaaatcacaatgtagtgaaagaaaaaaagtcgtctattaaaaatactataacaagttaaactcccttttgctgggactggagaagatgcagaatattcttcattcttgagagctaaaccctgaaaaatcgtcgaacaccccaagcaaaagacatgaataaaaaatcacaatatagtgaaagataaaatgtcgtctattaaaagataccatacaagttaactcccttttgctgggactggaaaagattcagactttaattatgagaacattcttgagaaaagctgaaccctgaaaaatcgtcgaacaccccaagcaaagacatgaacaaaaaatcacaatgtagtaaaagataaaaagtgtctattaaaagatactatgacaagttaactcctttttgctatgactagagaagatgcagaccccaattatcagaatattcttcagaaaagctgaaccctaaaaattcgttgaacaagtaaaaaagctagctgatgacattcacaataaacatcttgctaattaaaaaatttatgagcaaacggtatggatgacaaaaaggatactaacccaatttcttgtgtataacttgatagcaacagtattagttttcatcctaatatcaagaaaattcaagaaaggaaaactaaatgacacgttaaacaaaggtagcaaacatagtaaaaagggagcaatgactatatacgttgttcaccgttgccggccaactttaattagttcaccgaagtcaaataaatactgaaagaacgacaaatttacaaaatgagaaaaatatacaaggagactgagagaccattgataaaaagtcgtgtgttataagatactaagataagttcactccctttcgttgggactggagaatatgcacttgctaattatgagaacattcttgagaaaagcttaaccctgaaaaattccttgaacaccccaagcatagacattaacaaaaaatcacaatgtaatgaaaagatgaaaagtcatctcttaaaagataccatgaaaagttaactccctattgctagaactagagaagatgcaaaccccaattatgagaatattcttcagacaagctgaacctgaaattcgttgaacaccccaagcaaagaagaacaaaaaatcgatgtagtgaaagataaaaaaagtcgacttttaaaagatattattacaagttaactcccttttgttgggactggagaagatgcaaacataatttatgagaatattcttcagaaaaggtgaacctgaaaacaccccaagcaaagacatgaacaaaaaaccacaacgtagtgaaagagaaaaaaaaatcgtttattaaaagatactatgacaagttaactcccttttgttgggacttgagaagatgcaaacactacttatgagaaaattcttgagaaaagctaaaccctgaaaatttgttgaacatccaaccaaagacatgaacaaaaaatcacaatgtaataaaaaataaaaactcgtctactaaaagatagtatgacaagttaactcccttttgtttggactggaggatgcagacactaattatcagaatattctttacaaaagccgaacactgaaaattcgatgaacaccacaagcaaagacatgaataaaaaatcatagtgaaatataaaaaattgtatactaaaagatactatgacaaattaactccctattgttgggactggggaagatggagacactaatgatgagaatgttcttcaaataagccaaactctgaaatttcatagaataccccaatcaaagacatgaacaaaaaacacaatgtagtgaaagataaaataagttgactattaaaagatagtatgacaagttgactcccttttactgggagtggagtgcaaacactaattacgagaatattcttgagaaaagctaaccctgcaaattagttgaacaccccaagcaaagacatgagcaaaaaatcacaatatagtaaaagataataagacgtctattaaaagatattatgacaagttaactcccttttattggaactggagcagatgcagaactaatttaatgagaatattctttagaaaatctgaaccctgaaaattagttgaacacctcaagcaaagacatgaacaaaaaatcacaatgtagaaattagtcgaacaccccaagcaaagacatgaacaaaaaatcacaatgtagtgaaagataaaaaatcgtcgtctattaaaagatactatgacaagataactcccttttattggggctggagaagatgcagacactaattaattttatgagaatattctagagaaaaagtgaaccctgaaaatttgttggagccaaagacatcctctcgaaacaagaagctccacacgaaatataagacgaatcatcttcctaaagcttgtaaattgccaacaaagagcctgaaactaattaaaaaacaagacgaaccacataatgacttgtaataactgcatgttcaaagtccaaacaaaagcaaattcaagctaaaacgaaaaaggagaactaaactaaaccacaggtatgagataaaagtagtgataagggaagttaacacccttccaaggtgcttgtaaataggaatattgaagcaagtcaagttcttggaggtaacaaacaaaggcagatgctaagattgcctgaaaccatttttcatcacctacaaaaatcctcaaagaagaggaggtaaaatgtaagaacatcttttaatgaggcctattatatatcttcatatggtcaagatagtaacataagttcagtgtgaacgattgcaaacaaattgatcactagcttggcaaacatagcatatctattgttaataaaatgccagcttaacaacaaaaggtcaacaattatcttaaaagttaattaggaaacataatcagtaatatgacgagcaataaaaattcagattagagattaacgtacaaaaagaatcaaaatacaaaattaaaatatgaaacataagcacatttctagtaaggcgcaagccttcaaaatcataacagtttcaaaacttcaaatgtcaactgtttaatcaaataacacgacactgtcaacaataatctcaaaccaaatataccagtccagatacattgaacaaagccatttagaaacagaacgatcaaagtatacacaacaccaccctctccaaataaagttagatcaaagagaacattaccaccaattgaatgtcaattaaccagtttttctataaatatataactcccctgagcatttgaagatagaatatcagagagaaatgtagtgtgaacactatcgcacctaaaaaatagtccacactgaaactaggataccatcaaacaaagagtgtgatcagaaatcagattaatctcccaaagaattataaatacgacaccaacgtatcaacaccatagtaaaaccaaatgtctaacctcataccaagaaacagttggccaggcataacaagttgaggggcaatatcagtaggtattgccttgctctgcatttataaaaaattacaggcaataaacaaaagatatcaatcaaacatctgacatagcatcaaggcatccaaccaaacaagtaccacgacaacggattaattcatgaaaccaactatctttcaaatgagtatacaatgtagttccaattccatattcatagattattcaaaagaagacgaacacactaattaagaaaattatttctagaaaagctggagcctgaaaaaacattgaacaccccatggcaaaaacatgaccaaaacattgcaaagatgtagcagaagataaaaagccgtgttagaaaaaaaaaactatgccaagtcaactcccctctgaggttaattactaaatctgatagtgtcatcaaagttctgcatatagtatcaaatttaattcaagcaaagcatgaagaaaagcgtccctgatttaacacagctaatggaaataatctttgagtaaaagcggatcactgaaaaattcattgcaagtccgtgagcacaaaagaataaggccatgaacactttcacatcataaaaaaacataagcccaaattaagatcaatgaattgccgaacctctagtagcacccctatcactttaagccttgaacaaaacatttgccgacctaaaatgagagaattcagaaaatacttggatccctatagttccgaaaaaaatatcaaagggagaccaaagaataagtaaacatataacttaagtttgggaagggaacaccaccatcacaggaagcatccatacgagtacctaagaaaagatgcatttacatgagaaaataccaacatctagggaaagagagccaatttaaaattgagtatataaaaataaaactcttatttttcacaaaataggtcagttgtagaaactccaatttaagaactacaatgttgatcgaagggaagaacaaaaaaatcaagaaaaaatagaaaattataaaaaatgctacacaaaagtagcaaaagtataaaaaagcaaacgatgattatgataccaccagtgcaatgttgttcttggaaaaccacaccacaattgcaggccagctttaattcccaagagttttatccagtcaaaagtcaaatatgtactgaaaaaacgatacatttaccaaatgaggaaaaacatatagtgagaggggggaacaacaatttataaaaggataagtatggaaagctgaaattcttaattttcacaaataaggaaggttgtaggtaatccagagttgactatgtgaaaccatggtcatggtagccatctccataggcttaaaaacaaacgacgcatttacctaatgaatatataccatcatatagggagagagaaaatcaattaaacaatgcttgctagttgctatctccatgaaaactgcaataacgtccaaaggccaaatcaagaaaattcaagaaagaagcactaagcaatatgtcacacaaaggaagtgaaagagtaaataaggaatgatgactgattccaccaaccaatgcaatgttagttcacaagagttctatctattcaaaagtcaattaaatacagaaaaaaccaacacatttaccaaatgagaaaagacataggtaaagagtaacacaacttcttatttctcgcaaattaggtaggtaattggaaatctaatgttgaatatgtgaaaccatggtagctatctccagaagctgaaaaaacaaatgcatttacctaatgagtaaatactgtcatataaggagagagaaagtcaatttatcaatgagaagtaaataaaactagtgttcttatttttcacaaagtaggtcagttgcaggaattccaatcatgactttgggaaaccatgcttgctatctccataagaactgcaatgatgttcaaagtgcaaaacaataaaaatcaagaaataaaggaaaactaaaccataagtttcaacaaataagctcaattcccttccaaggttaaaatctttcttaaatagaccccataaaacaagggaagccttagtcgcatccatgatctaaaatattctggagtgaagacaagtgaaattctcctcaacaccactcaataaaaagaaaattattagtttggagctgcactttataaaaagttgcctacgtaccctattacttaatagggatcaagctccacgtagttcttaaaacctgcaaaataatttaattagtaataaatcatgaagacaaataaacatatccaaatagaaaatttaaaatatacacaatcgactaaagaacactttcatacataaaaatgtaatcgagaatacaaattgtacatttattaacaaaaacaaatctcttttatgtaaaagatgtagggctcgtttggtacaccgtttaaatcgtattgtattatattgaattgagttatatatcatatttttatataataccatatgaaagttcaatttataataaaatactatatatttaagtgcccatgaaagtcaatattaccgaatagcaaaacaaaataaacaatgtaaaacaagacaaatttcattaatgtcaacaagataaggcatggactataagcataaaacaatgaagaaaaaaccatataatctatagagctttgaaaactgaaacaatgacaaaacacatgggagcattatgagagagccaaaaatcacgagtaagattttattataacagatatgggcaacacaaacattaagaagaacaggtgagaacactagatatcacaaatatgtagataacacatgatgcgaataaaaaagcacaacaaagcacaaaagaacaaaaaagttttgacacataatcgagatacagatatagcaaatgcaagtcataaaattttcgaggtgtcaagctgcatgtttagataggaacattgaagaaagtccacaaattaaaattattgagcaaatgcatatgctaacatagccttgaaccatttcccatcacccataaagatagaccaaaatccaaaccaaagcccaccacaattttgattatgtttaaagttaaaacaaacagaacactcgaaaaaacaaataaaaaagctacctgatgacatccacaataatcatcttgttaattacaaaatttatgagcaaacagtgttgatggcaaaaaggatactaacccaacttcttgtgtataacttgatagcaacagtattagttttcatcctgatatcaagaaaattcaagaaaggaaagctaaatgacacgttaaacaaaggtagtaaccaaagtaaaaatggaacaatgactatgatacactaatgttgttatcaaaacaccaccactattgcaggccacctattagttcaccgaagtcaaataagtattgaaagaaacaacagataaccaaataagaaagaacatatgcggagagtgagaaacaaattaattttataaacgataagttgaaaaaacaaacgacacataagcaagaaaaccaaggatgtatatctaaatccagatcccaaatataaaacaaagatggcaacatatgcaatgataatggagagaatcacaaaaccctccattggtaaataaatttccgcctgcacaaacacataagaatttccacacttcaagaaaaggcgcatagatgcaaaatctaaagtcccagctcaatatgcaaataaaaaattagcaaagttctgcatcaagttagtgaaaataagccatagtatgacctcctatgtgaagataatgatgaacatatctaacccacaatgctgggacgggagaagatgcagacactaattatgagaatattttttaaaaagttgaagcctcaaaaatttgatgaacacccccaagaaaaaacatgaacaaaaaatcacaatgtagtgaaagataaagtcatctattgaaagataatatgccaagttaactcccttttgctgggacgggagaagatgcaaacgctaattatgagaacattcttcagaaggctgaatcctgaaaaatcgtcgaacaccccaatcaaagacatgaacaaaaaatcacgagatagtgaaagataaaagttgtctattaaaagatactatgacaagttaactcccttttgttggcacttgagaagatgcatacacagattatgagaatgttcttcagaaaagctaaaccctgaaaattcgtcgaacaccccaatcaaagaaatgaacaaaaaatcacaaattagtgaaaaataaaaagtcctctatttaacttccttttgctgagactggggaagattcaaacactaatcatgagaatattctttagaaaaactgaaccctgaaaattcgaaaaacaccccaagcaaagacatgaacaaaaaatcacaatgtagcgaaagataaaaagtcatctattggaagatactatgccaagttaactcccttttgctaggactggagataatgtaaacgctaattatgagaatattcttcaaaaaagttgaaccctgaaaaatcgtcgaacaccccatgtaaagatattcacaaaaaatcacaatgtagtgagaaaaaaagttgtgtattgaaagatactatgccaagttaactcccttttgttgggactggagaagatgcatacactaattatgagaatattcttaagaaaagttgaacactgaaaaatgaacaaaaaatcacaatggagtgaaagaaaaaaagacatctattgaaagatactatgactggaggaatattcttgagaaaagttgaaccctaaaaaatcgtcaaacaccacaaagaaattaacaaatcacaatgtagtgaatgataaaaagtcatctattataatgattctataaaaagttaactcccttttgctgagattggagacgatgcagacactaattatgataatattcttcaacaaagctgaaccctgaaaaatcatcgaacaccccaagcaaaaaacatgaacaaaacatcacaatgtagtgaaagataaagagtcgtctattaaaagatactatgtcaagttaactcccttttgttgggatttggagaagatgcaaacagtaattatgaaaacattcttcagaaaagttgaaccctgaaatcaatcaaacaccccaagcaaagacttgaacaaaaaatcacaatgtagtgaggtaaaaagtcgtctatttaaagatatcatgacaagttaactcccttttgttaggacgggaaaaaatgcaaacaccaattatgagaatattcttcagaaaagctgaaccctgaaaattcattgaacaccccaagcagagacatgaacaaaaaatcacaatgtagtgaaagaaaaaaaaaatagtctattaaaagataactacgacaagttaactcccttttgctaggactagaagaatattcttgagaaaagctgaaccctaaaaatcgtcgaacaccccaagcaaagaaatcaacaaaacatcacaatgtagtaaaagataaaaagacaactattgaaagatactatgacaagttaactcccttgttggggctgagaaagaatcaaacgctaattataagaatattcttgagaaaagctgaaccctgtaaaatcatcaaacaccctaaacaaaaaacatgaacaaaaaatcacaatgtagtgaaagataaagaatcgtccattgaaagatattatgtcaagttaactcccttttgttaggactggagaagatgcaaacactaattatgaaaatattcttcagaaaagttgaaccctgaaaattagtcaaacaccccaagcaaagacatgaacaaaaattcacaatgtagtgaaagataaaaaatcatctattaaaagatactatgacaagttaactcccttttgctgggacgggagcagttgcagacaccaactatgagaatatttttcagaaaagctggaccccaaaaattcattgaacaccccaagtagagacttgaacaaaaaatcacaatgtaatgaaaaaaaaaatcgtcatttaaaagatgttatgacaagttatttctttttcgcagggactcaagaagatgcagatactaattatgagaatattcttaagaaaagctgaaccctgaaaacacccaagcaaagacataaaaaaaaaacacaattgaaaaggtaataaaacataatgaacaaaaggtaattaaaaaagatgatatgtcaaacccaaaaagatgaaaagctacaattttgaataacttgacttcgaaaaaacaaaatgaaagaataaggttggtgaagacattcatagacatttataaaacaatccatccagtaaagaaggcccaatgaccatcacctgaaactaacgtatttaaaaaaatgaaatcaaaaattaagcaagatgaaaagactacgcaaaacagactgaaattttgagatgatcaaatataaatctctcccatgcataaaaaccaatcaagaacaaagttgtcaagtaaatattaaacagacacaagacaatcgttgcagccaaagacatcctctcaaacaagtgcaccatgaaagactaaaacctaagagcctgaataatgaaaaactatgcatgaagacaagtttgaattttatatttagcagaaacttccacagtatgaataaaagagagaacacatacttaatcataagcaaataacgaaaacaaacatgaaagaaacaaataaaaggttatttggaccaagaaactacccacgaaatattaaaggaatcaatcatcttcctaaagcttgtaaattgccaacaaagatcctgaaattaacaaaaaataaataaaatatgcagtacaagcaatagcttgcatgtacctgaaaaaaaaattagggaaagacaaaaagcttcaacaaaaattaaaaattaatgacttttcaaacctccaatgaaatcatgcttgcttccccacataagaactgctggcctcccataatttttgatgagcgcatatttataagataaatatgatcaatttatgtgttaatatttttaaattgattctttaaattattgattagtgtgattttaatttgttaggctattttaaagactattcatgcatttagagtcttttagcatattttggaagaaaatagtggaagcgatctcaattttacaaggcagaacttaattgtaaattcggatgaccttagagacagaactgaacttggagctcaacatgaaagttttaaatctcgttcttagctttcaagaacatcttgaatcggccaattccgggtaatatcgcgagagttatgactaaaatactatcagttgtcacagcaggaaatttctgaaaaaaaaaatagcgaatatatagcttttaaagtaaaattgcgatttatttctttatttaaaaaaatgaattatcttttcttttagtgagatatttctatgagtttctctctctaatttttccttttagaattattcaatttgtggcctaagaggtcctatttatagtgcttgaatatagatcaatcctcttggaattaagattctatttatagtgcttgaaaagataaatgaatcctcttagaattgagattctatttatagtattaacaaatatctcactaaaagaagataaaaaaatcacaactctacttgaaaagctatctttattttcactatttttttttttttgaaattcttgcgatgactgatagtattttagctataactctctcaatattaccggaattgaacgattcaagatattctaaaaagctaagaatgagatccaaaaccttcatgttgagctccaagtccaattctgcttctaaggtcgtccaaatttgcaattaagttccgccttgtaaaattgagcttctcggcttccactattttccaccaaaatatgctaaaagccccccaaaagactctaaatgcatgaatagtctttaaattagactaacaaattaaaatcacactaatcaataatttaaagaatcaatttaaaaatattaatacataaattgatttttcttataagacaaatatgaattcatcatatcacctacaaataaaatgagcaaatggtatacaaataggtgatcaatgccaaaaaaaaaatgagaaaaaattgatcgttaagtcgtaagagaattcataattattgtataataaatttattacacattgccatcacataacaccttgtggcataacacccgtttttgttccgcataaaaaacttcatatggtcaagaagattataacatgatttcagagtgaccgattgcaaacaaattgataagtagcttgtttaacattgcatagctttttcatttttacttttgtagggtcaacattgcatagcttggttattgtagtgattattaatgttttcagcctcattgattactagacttcaaattctatcaagagtaagctatgtatcgtaagagtaagctatgtatcgtgtggctaaccaagtataaaatgtcaagtaaaaagtaaaatatatttggttgcagtcagttaaataaatgccagttttatcaacacacacagggtcaataataaagatacacagttcgggagaaaacataattagtaacatgacaagagcaataaggtacaaaaagaatcattcttaaaacataggttcatatcttgtaacatgtaagctttcaaaatcaccacacagcttcaaacatcaaaggtgcttcacaacttcaaacgtcaagtgtttgatcaaataacacactgtcacaaatagtctaaaaccaaacatcaaatgtgtttcacaacttcaaacgtcaactgtttaatcaaataacacgacactgtcaacaataatctctaaccaaatataccagtcccagatacattcaacaaagccattcagaaacagaacgatcaaagaatacacaacaccaccttctccaaataaagtttgatcaaagagaaaacattaccaccaatcgaatgtcaattcaccggtttttctattaatatataactcccctgagcatttgaagatagaataacgtagcttgaagactatcgcatcctaaaatgaagtccaaaccgaaactagttaccatcaaacattgaatttcataaagtccaccatctcattaacttggaagatcataaatcagattaaaaccaaatatctaacctcgtaacaagaaacagatggccgagcataacaagttgatgggcaataacagtagacgatgccttgcactgtatatatcagaatttactgggaacaaacgaaagatctcaaaaactcaacaaccaaatattcaactttatagtgagaaacatttgacattgcattgagagcttccaaccaaacaaagtagattaattcatgaaaccaacttccttacaaatgagtacacaatggagttccaagtccaaattcataggctattcagaagaaagtcaaggttgcatatcaaaaatccagattcctaaatataagcaaaagatcaacatcatctgcaataatcatagagatagataaccacaaaaccctctgtagttaaaataaactattaattcatgaaaccaatttccttacaaatgagtatacaatggagttccaagtccaagttcataggctattcagaagaaattcaaggtcgcatatcaaaaatccagattcctaaatataaacaaaagatcgacatcatctgcaatgatgatagagatagataaccacaaaaccctctgtagttaaaataaactattagcttccaacacaatacaaaaattataccaaacagatctccgcacttcaagaagaggaacagttacaaaatccgatgtcacagctaatggtgcaaattaagcttgtggactatgacctcatatgaaaagatgatgatgaaagatatctaacccacgctgctaggactagagaagaggaaaattcatatgatgaaaaatacactgtagcagatgatgaaaaacctccagtagcaccactatcactttaagccttgaaaaaacatttaatgacctaatatgagagaattcagaaaatacttggaatcctatatttccgacaatatatcaaagggagaccaaagaataagtaaacataaaactaaagtttgagaagggaacaccaccaccacaggaagcatccatatgagtaccgaaaaattgatgcatttacacgaggaaatactatcatatagggagaaaaaaaagtcaattcgacaatgagaagtgtataaaactagtattgttatttttcaacaaaataggtctgttgcaggaataccaatcttgactctgggaaaccttgcttggtatctccataagaactgcaatgatgttcaaagtgcaaaacaagaaaattcaaaaaagaaagtaaaactatacatcatataagttaaaaagtgagaagggaacaccactatcacaaataagcactgaaagaaaaaaaaaattgatgcgtttacctaatcagaaaatactatcaatactttcatataactcgcatccttctttgatcatggatccccaaggaaaagtttaactgatagtaataaagacacttttaaaataatttaacccaggtaaaacaaaaattggccatacaatatgtatagatcaaaatttccaaacatgtatatagatacacatgcaaagtaccaactgtaagtcaaaccattggtgatgtaagtcaaaccaccgtagaatatctggaaatcatacctagacgtccaaaactaaatatatgaccttttaatgtgaaggtccaactgccttccaaggttagagtctggcttaaatagactcgataaaacaattgaagccttagacgcatccaaattttgataatattcttgagtgaaaaaagagtccttaaaattcactgaacacctaaagaaaagacaagaaccaaaaatctcacaaagacggaagctaaattttaaaaaaaaaacactagttcaggacaactcccttcaaatgttagattcttgcataaatagacacgataaaacaattgaagccttagtcacatccgtgccttaaaatattgaagagtcctgaaaattcattgaacacccaaaacaaaaaacatgaaccaaaatctcacaaagaccgaagaagaaattaaaacgaaactcaaatctacgacaactcccttccaaggttagattctagcttaaatagaccaaataaaacaattaaagccttagtctcatccatgtctcaaattattcttgagtgaaagaagagtccggaaaattcattgaacaccaaaaacaaaagacatgaaccaaaaatctcacaaagaacgaagatgaagaaaaaaggaaacactagtcgaagacaactcccttccaaggctagattcttgtttaaatagacccaataaaacaattgaagcctttgtcgctttaaaatattcttgagtgaaagaagagtcctaaaaattcattgaacacccaaacaaaaggcataaacgaaaaatctcataaacaacgaagctaaagttaaaaggaaatagtagttcaaaacaactcccttccaaagatagattcttgcttaactcgaatggataaaatgattgaagccttagtcagtttaaaatactcgagtgaaagaagagtcctgaaaattcattgaacgcccaaaacaaaagacatgaaccctaaacccttgaagcctttgtcgctttaaaat

SEQ ID NO: 42942 - DNA, 3685 bp, Cannabis sativa
  modified_base (3642)..(3656): a, c, t, g, unknown or other
atttaatcctttaaactcaaattttggcagtaaaattttccaaattattaaactgtgttagtaaattatttcaatttgtcatttgattaactgacattaactacttatatatatacacttttatacacatgatattttatattggtacacctaatcttattattttaaagtttattttaaaattaaataaaattattcttgagagaaatatttgtaaaaagatcattgatataagcttaataaagttgactaatgaactatgactcgttagcacataaaaattgcttgattatttcttttttgtccttaatttaagctctaattctcttctttaaatcggtttctaaaacactcagcaaacacaaactaatgtcaattttaaactcgtcaaaaaaaaaaaggtttatatattaaacccacacacatattagagaacaatcacatctaaaaaataatgaaccctacaataataaataaatattattagttgaaattatttgtcaaatatataaatgtgtgtgacacaccgaaaattcacacgaaaaagttcatagtactaacttttactctcccaactttaatatataaaaataaaaaaaaattatgtgcttgtttttaattaatagatgaggaagtcttattttttgacaccataaatgcatagttttaagtttttgggctagccaacaacaaaaataataataattataatatgcaaatctaagaaaaatgctaaccagggcgactcttgactaaagcaagttaggctcgtgcctaaaattcgttcatataaggctcaaataaaaaatatattttttttaataaatatacatatttcttgtattttttttttaaaataccatatacaagtccaaaagtttaaatcaactcaaggccaactttgatgccaatatattcactgtttacataaaaccacaaaaagaaacactcactataaatatatttacaaaacctcttaatcaacaaatacataaaactcttttaaattgactcaccctatatgtaaaacaagttctccctcataaaaatggcataattaatttcctatatatatgtatatacatattataataatcccaatacatcaactccaccacaaatactaattgcctcttgtctaagttgatcaatttcagcttgagcctgtgccctaatctctgcattgtatgactccaaacttggcctcaagctttctattttccttgtaatacttctgatctgtaattaattaattaataaattagaccccataatatataattgtaacaaagtttataatatatataaattaattaagaattaattaattaacctttctataaggccatctatgcaaaccacttttacgacaaatcttttttagaacagttgggcaaacattcatagcctttgcagcatcctcgattgtaagatgaagataatcgcgtagatccatcagtgtcaaccttcctgttctttgtctctgtattcaatccaatccaattcatcgaaatataaaattttgatttttaatttcgactttcactacaaaaaatcataataactaagaaataaaaaaccaaataagcatagaattaagaataaattttagtggatgcacacacattttacacacttaatttgtacactatgaatggttttaaatgtatggtgtgtaaattaagtgtgtatctattattaacatttaacttaataatcacaaattataataactttgactttgactacaacaaaatcacagtaaaatattgaaatttttaatagtcaaattatattatatattccaatctactctcctaaaaattaattagtaataagagaagaaattaaacagtactattcactacactcaatagatgcacacacatttttacacactattaagtatatatctattattaacattcattttaataatcacaaaatatactaataaattaagacacagatttcaaattactaatcagcactaaataattttgagttaaatcatatatttaagaaataattaagaacctgttgagcaagagacagcctggtattattattcctttctaaatcactctgctgggctggttcagtttgttctggccttatcacttcttcttcttcttcttgttccaaaaaattaaaatctcctaataataattaacaaaaacacataaaaatgtaaatgataataaaaaatggtatttttccaatttatttttaaaaatggtatttttctaattttttaaaaaatggttacctgaattgagtggagaaaggggaaagaatggaaaatcatcccattctaaaccaacacacaaagcctcataaaaagtagccaatggatcatttatcataacataaccttctctctttctttctgaacaataatccactagaaacctcttcacttcttctatgctttgtctacaaaaactgttcaaaattcatatttttattatccatacatataaatataatcattaatctatatatatatataatcatcacttactcaaacatttgaaatcgaggattttctgaagtagaagtagaagtagaagacttagtctcacaaagtgcatgacaaatcataccaagtcttccatgaatctcaagtttcatgtagttgttcaataattcttcaaaagagacaaaaacgacattaagttagtcaaaacgacaatgaaatcactcataataaaatgtgacaataattagttaccattgacatgaatgatttctctaagaacttgacaacaactacaattgaatggaacaggagaaggaggccaattctgaagcaacattggataattaccaccaccaccaccattattattattattataattaatattatcattattataattataattagtactagtattgccttgttcaaaaaatgaatgattattctctactgataataaagcaggatcaatattaggatcaattggcaaactatcccaagtaatcattggaggaggaatttgattattattattattattattattgttattattattaatattatgatcgtgtggcggtggtaaatccatcaaggttggattttgatctccaccgttcaaaatcattgaaatgaattctgaaaatgggccatcaaatgattcgtacagagataaaaacagggcctcttcatctgttgccatacatggcgattttcccacttttttttttctttatttgggggaatttgtgtatatatatatatgtatatatgtatggtggtaagtagtagtagtagtggcggcgcgtgtgaaccaagcgccaccactgaaggggggtgttgaagagagcaccagtgatgtttggtgattcggagaaattgaagttttgaagtttgaagaattttatgtgtgtgaagagatgctttggtgatattataatttaagaggtagttacttaccgtttggttggattcaaaaacggttattttggtctttttgaaaaacattaatttattatttaaatatcaatgtttgtttgtttgtacttcaaatgattttagcaacgtcaccacttcttaattagtttgttaattatggtcttaattattattattattattattattattattatttgggaaatttacatggtatnnnnnnnnnnnnnnnttttttacaaaaatactaccaggcggtat

SEQ ID NO: 42943 - DNA, 1961 bp, Cannabis sativa
tctctctctctctctctcctacacgccctaggcattgtagaagaggccaagtccctttcatcacatttacttgagattttcctactgattctcatattttaatcttaagagagccactttagaatccacaactcttgtgatctgaatggtattatctctaatattaatacaaccaaataatgagtaagtcattacccgctaattaagggggttgaacttctataaatatattgtgtctctttattttcctatttttattgtgtacacgtagtaatattagtcataaatacgactccactatcaattggccaaattcgaggtcaataatatatattgatagattatgaattgatgaatttattattttttacatgaatgtgaatcgttaattatatggtaaaatttgattagaaatttcacagttttactagaaaaataaaattatacaccatgatttgtggaataggtttcgatgttattatatgttaaaaattattcgtaattttttattaattaatgtaatatgaaaatccacaatatcttcattgatgagtgagctcaggtttaaggagtaaaccacggcttcatcgagatgacaaagttctaaaccatgaatgatgagccacgaacctcaaatggttagctacaagccaaggggtcgaacatgtgatttctcatgtacgcatgcaagcatgcatgttgcattcccatcgaagtcgacatgaagaagaggagtcgaaggcttgtgagttcggattgcaccaacagccactgtggggacacttcttggttacgtggccagagatgatgacgttgattggccttcctgactcgtggttgacacagacggcggtggagctggaccacggtggtcctctatccttaatggctccaattgggtcacacgatccatgatgctccaaactagagttttgctctgtttagcctctacacatactagtccaaaactagccaactcctcccttaacggccttcacggtcgactccgacctcggaccaccaccatagcaactaaatggccgaccccattcatgtgtatatatatattagaataaattttttaagatactattcattatattaataaataattattttttattataatactaaaaaaattaaactcgtctcgcgagagcaattatattatttagtttttgttatatagacacatttaatataagatagacacaagttgaaatctaacaacggtctccgtttaatattgctactttaactttctcttctaatttgttctcgagaaagttaaaacatatcaatatatttaaaaatatatatttgtaatttgtttttgtagtttggattttaaggagaagggaaaatctgaatctcagctcattttgtgtatgagccagagcagtttatttatagcacaattcagaatacaatacagccgttaggcatgacacctggcagtgattacatgagcaaatgactaaaatattcagcctaaatattcccctaatgattacacaatgacaaggcataacagaattcacacaaaacaaattacacaattgaaaatacacaaattcggttacaaaaaggggacaactgaattgtatggctgcaatgtatattgctggtgtaggaatactgatgcagaaatgctattccttgacatcccctctcaaatgaaagggtgtgttcctcacgccgagtttctcaacaaggaaggaaaatgagaaggagataagcctttagtcaagcagtcgacaatttgtgattcatgtgagagggaatgtatctcgaatctcaagccgtttctgcagtactttatcacgaacatagtgcgcatcaatttcgatgtgtttagttcgagcatggaatgacgggattcgcggcaagagcactggcactgaggttgtcacaccatgtcacagatggacttgggaaaggaaaatgaagttcattcagca

SEQ ID NO: 42944 - DNA, 2694 bp, Cannabis sativa
  modified_base (1122)..(1129): a, c, t, g, unknown or other
atatttttttttgatttagttgaaaatttgaagataactagaaaagaataaaaataaattgaaaagtgtattttttaaaaatgacgtcataatcatcatagtacggattgtaccgggtaagcatgtactaaattgcatgtgattttaggtgttttgtgtttgttttttctctctttttctggtggaactgtggtagtggtacagtttacagtagtgtggtatgaatttggtattgagatttttttttgaattctaaaatgatcttcaaaacttaaataaaaagatattagtttggtagtaaagaaaaaaattggaaagatagaaaagagagaacatttccttcagatgccaaatgcactcttaattatgaaaaaaattctttcatggaaacaaatagggcatcgatgtactctttttatgtagtaatatttttattttttaattttttaattacaaaaataaaaaaaaatttatgtttttaaaaaatttatgtttttaaaaaatttattttttaaaaataaacatgtcttctataatttttttttttcaattatataactagaaatgaattttgtaaagtttatttttatattttatttaagtcagatttaaatcggttctagtcggagtccactcaattaaaaaatttaaaatagtaaaaactgttttataaaatataattttgaaaattattttaactttttaaattttaaaaacataaaattaattaatataaaataattatatatgcaaaaataggtatatgcaaaaccaatggtagcattctttgaagatgctctatatctccacatcatccaaaatatagtattttattttatttttcttctatattatttttgacacatttacttttaaaaacactccaatggtataatatcttttaaaaatgctataattatgatattacatattattatatatataaatttttttctttattaaactattatatatattgcacttttaattttttattgtataaaaaagacatagcatcaatgtcattgtgtgacatcaatgcaaatttcaagaataaaattcttttatctccaatggtatagcatctattctctatattttgccacataagctttccacctnnnnnnnnattctcttaccattggagatgctctaatacacttcatttgtatttatatatttaaaatatctaacatctatatattcgagctgtactttttatattttaacttattttaaattttttaaaagttttgcatcttaaataattacaatatctaaacatgaaggagagtgcttatctatatttttagggtgctccgtagaagcatcctatatttaccaaataaaaactgaaaaaacaaacaaagaaataagagtacgagaagaaaaataataaaaaaaagatataattatacataacataaatcattaattaatttattattttttttatgatttttctttcaaaataaaataaaataatcatccattaataagaaataataagaaactcattctatattccaacaaaacaattgaatataatatttttattattttaatataacacaagttaattattttgcacctattaattctatttcattatccgaacaaagtttgactattttattttcttgtttcttatttttgttattaactgccaattatattaaaaacactcaattgagaaaaccaaaccacaataaaatttatgagccccaccattaactcgttcagagcctcaaaaacagttgcagacctccaatcaggagctttatgagccaaaatcccatgtactagttgttggaaatatgaagctagagtcaaactgatccagccatggagtctgcataattgagcagcatgcaataaggcccaagtctctgcttccaacaggtcactgacatcaatcgtaactagcatggcctccacaaaagcacatgtaagatcagtagcaactaatcctttataggcaacatcagagtaaacaacaaagtttccattattaagaacctgatcatcaaaggagcattggttgttgctgcaatgaatgaagtctctcccgcagccacaagcaaccttactgcttcattaattcttccttgaactcttggggcagttagagtgacctgatcatggaaagaacgattcctagaagttcaacgttcatcgcacaagcacacgccaaaccttgtaaaggagagtcgctagcatctgagggctattaaagctcatattttcactatcaataccccattgacttgtaaatccaatcgattttgccagtggacaatgtcagtttatgttttcgaaagaatcttctaaagctccacaaatagcacatctcacagtattgtcgaataaacgttggagcttattcctgaatagaagaatatcccatcctagtttccacaagaagtgtttcaatctttcagtaagatttaacttctgaatttggctccaaattggatcgttagatcctgtacgatgcttaaggacagcctggtagacccccttaggggagaattcaccatctgttgcttgtttccaaacaagcagattagaatggtgacttggaaggcgagtcaccaaattcaaggagctagcaacactggacactaactaaaaattcttctgatgaaaattccaatctccattatcccgtgataaccaagacagttaattctg

SEQ ID NO: 42945 - DNA, 2090 bp, Cannabis sativa
ttagaaaaaaaaaataaaaaaatcaaggttttgcatttttcacaactgtccataatgctcagttaactaaacaaatatagcatcggtaatttttgatccactaacatttacccttgtttttaacatgatcacaattcgcaagtggagtaaaataatataaagaaaaaagcttagtctcgattacaacttttaattcaatcgtacaattgcacccaaaataataataataataaaatatttttgttgtgaaactaagttatgatatacatgtcacctcaatcaaaccagttttgacaagtgatgagttattactaactaaattggcatgactagaattattattacatcaaagtgacacctatatgccttaaaaggagccaacttgatagagacatctcctactattggaggtattgagattttaactgtcatcacaatttacaacaacaaaagactgatagtgatcatagttacacaacatgatactttgttcaaggtccatcactgagcaaaagaatttgtctcaacattagacctgttcttcaatccaaaaatacaatgccaaatattcatcaacctgatttcataatcaatttccataaaagaaaagaagtttataaagaaatctatatatgatcaatggtttgctaattcatctcatatcttcaagtttcaaatgccacaccaacctctagcatcttcttttttatttttttcaaacaataagagaaagacaataacaaggttcatcaaaaagggggctcaatcaaattttgttcagttcttactacttacacttccatctcctgttttgagagctttaaacatttatccattgaataattgaagaggttttgaacctgaaataagcttcttttgtcctccttacacaaaaaagagcaaaaagacttctttttttttttcatcttcagctcatctatagaatacacttacacaagtataacccaaaagcacaaatctttgagaacaaaatccataaattaaatcaaaacccatcatgtccatacaaggctacaacaaaatatgaacaaaaacaaaaaagcaaacaaaatccccataattagtattacttgaagaattcaatatcatcaccattatcatcacaacagaatccaaacaagctctaatttttttcaagccctaaaaaaaacaaacataaacaacaggggataataataaagaaaaatcaaagaaaacaaataataaaaattacccatattactttatcatatcagaagaacacatcagagccaaaaacacacaccaaatgcatcatcaacaacacaacaatggtttacttggctaccattcttgcaatgaaatcttcgtatcggatcttcccatcggaaccgacctcaacctcccggatccactcatcgaattcggctggctcaagcttctcgccaatgctggttaggatgtgccggagctcagtgacggagacgtagccggtgcactccttatcgaggaccttgaaagcatcgcggagttggcgatcgaagggttcgggcttcatgtgcttagccatgaggtccaagaatcgagggaaatcgaagggcgcagtgagcttttcttcggcgataatggatttcagctgggcttgggtggggtttcctcccagagaccgcatcagaatccctagctccgacggtgcaatccgaccatcgccgtcggtgtcgaatagggtgaaagcctccttcattgaagatacttggtcgtcgctcagatcctttcccatggctaccagattaacggagtgagtgggtctggttcctttgtcgctctagaaaaagaaatctctcgactttctcactttctctctctaaaactccttctttgaaatggtcgagcgctctctctctctctctctctctctctctacattcgtgtcttcttcttcttctttgttttgaattcgaaacccgttcttacggcgtcgtttcagtgggggctgaacttgtcatttctcatcctcaagaaaaaaaaaatcttttaaaaagctttgagaaattttattgggtaattctacaatagacaccttaaaattaaaattggacctatcagtagac

SEQ ID NO: 42946 - DNA, 4850 bp, Cannabis sativa
  modified_base (237)..(237): a, c, t, g, unknown or other
tgacaaaatggacgctgtatttttcaaaatagtacaaataggactctgaactgattttttatcaaaataaaatttaataataatccgatccaaaagtgttttgacaaatgtatttacactgtctatatctgtatgtgttaggaattgtcttcaagttggttttattaaaaaaaatttgtcgaaaattaagcttagagtgctatttttaccattttaaaaaatatagggtccattttntcatttaacaaaacagagggtctaatcgataatttttgcaaaatacagggtccaaaaaatatttacccataaatagttatgtatttatcaattataaataagttaaaataataataaaatttaaatataacagtgaattaaaaaaaataaaattaaaactatatattaatttgtttataaagtatgacataaaaatttaagtatttatgaataaatattaaaattataataattttaatagttttttaatataattatttgtaaaaaattatataaatataattgaagttatgagaaatatatagagtattgctatcagatatcagtggtgcctaataccttttataagtggcaccctctgattggttagcattattctctaaaagttattttcttaagttatatgagatctcctacttaattaaactaataacgatatgactctaaaaaaagtgagacattaataatactttttagcaattctcttttaataattggttcattaattataaaaatagatgtgaaaaattaaagtacgaattcgaacctgaatacaaaaagagagaaaaatgggccaacaaaagtaaaatacgacacaaatccgaatacaacataaaaatatgagtctacattgacacgacacgacacgactcatatttttttaatagcacaacacgacatatttatattttcttttataacaccgacataactcatattttaaaaagtacagtatattataaaccgagttagcacaacacacacgaatttacaacactatcattattgagagaaactttctcttcctttcaaaaataaaatacaataaaaaaaataagaataaaaagaaaaagaggcaagagggtacaaatattggtatgttccgttgaagaaaacccttttagaagaagagagggttccatattcatattagggttttagactttgcaccactgttggagccgcacttcaccttctcaaactctcaactctcaccatgcccaagtctaagcgtgatagacctggttcgtctttctttctctttctacgcgacttcacttactctttttgtgcttaatctgtttctgtttttgaaaagttgaaaaactaattgaactcgaaatcagcttgtagaatatttttcattttttggggtgataaaaaagctttatttttattaacatactgttttcttgttgctgttcatgtatgaatttcagctcggtaattttcaaattagctcgtaatttctcttttcttttattttgggttttggagttttaattatgactatatattggtgcccagaatgcgatttctgtataaacaaagtcacactactaaatttagttacttgaatttggaatgggattctgaggctccatttattatttttcatggaaataaattcatttttttttctgggatatatggttttgtaatgagaacctttgcatatgaaattttttgactcattgaaatgtgcttttgaatgatttttctggtgtacattgcagttaccttatctaagacaaagaagaaaggtagggagcataaagaagctgttgtaaattcgataaggaaggctgtggaggaatacagttggatatatgtattctctttcgagaacatgagaaatctcaaatttaagcagtttagagagcagcttaaggcaaatagcaggtagttttttataatatttagttgatttggttggacagccaaagaaaaatctggtgtcaacttgagtttcggatttgaattttgttgggtacttaaaatttgaaatccagtgaacttggtgataatagctaagggtgttttattatatatattggtttctaatgatctatcagttgtgtatattgatttttattcattaaattcatgaaggattttgaggttttaaatgttagatagctaaaatttcctgttactagcatactggtagtctttgatgttacatcataaaataaggcctatatgtttaagttggtgcttcagtagtttttgtaatcctattcttgggtgtgttttctgctgaagaaagagaaaatgaaataacaaaaaaatgaccagttatattggttgttcagtgatttcttgatctcaattagctgtgtagatatatatatgtatatatattaaatatgttttttttatcatgatgcttatttgcttgatttgtttgagtgaattactgaattaaatgcctgatctgaatttcatctttttgaagtcagctctgtttttcagctaacgagtaggttaatgtttttttttacttagttgccttattgttttgttagatttttccttgggtccaacaaagtcatgcaagttgctctaggtcgatccgcatctgatgaaatcatgccgaacatttacaaagtttctaaggtgagtgttttctctttcagccagtaaattttgactattttactagatttcttttttgtctcatacgtgtctttgtcctattttagcttctgcgtggagatgctggacttctctgtaccaatttgccaaaagaagaggttgaaaggtaatcaacagtttttctctatgatatcctcaaactatctgggttaaacttaaagataaaaccaatctttcttcagaataaaagtaaataagaaagctattattgtctgatcagtcaatttgacatcaagcttaatgttgaggattttgaaagggattaggctttgcagctgtacaaatttcgaaataatgttctggtagactgcttctttgctttcaccttggaacatgataatgcataatggatgatttctttattgggtatctgcaatactaaatgtggacagaattacagttaataagaatgtgcattcaaaaaacataataatttggtttttatgtcttacttcattaatattaaattgtttaaaatatatttttttgcaggatatttaatgaatacgaggactatgattttgcgagaacaggaagcttggctacagaaacggtaatattcattagttcattatatctattcttaggtgtagattattgagcttaaagtcataattggttttggagtttaagattttgtttgctggtttatcatttttctttcaatattgcctgtagagtactgttttcttaaaattactattaggttgctcctctacatatttttttctcatttcagctgtcatctactgaactggattttaactatttctgtcattataaataagtcttaacttattctgcaatcatcttttgtacatgattctgaaactcttaggtggagctcaaagaaggtcctttggaacagtttacccatgagatggagccctttttgcgtaagcaggggatgcctgttcgtttgaacaaaggttagtatattctttcctctttcgccagtccatttattttagacgagcagctgtacttatttagccgatgtatatgtacaggtactattgagcttgttgcagactacgttgtttgtgaggagggaaagccgttgtcacctgaggcttctcgcatattggtatggtctataatcactctttaaccaaccactaagttttcttgtaggttccttttggaattaggtttttctgctaacatcacaagagcggtctaactgatctatctagttttttgctaaatatatagggattaaaatggatttgtttctaagatatagtcggaaattataactttcactgagtgtgttaaagtttcctccatttttgttggaagcattttatggagaaactagtgaggccaggttcactcctagagatacaagtggcttttgagcctttagaacaaaaatctaacttgtaaattgtaaagcaattgaatgaagctaaaattagataaaatattcaccgaaatctctcttgattttctatgcagaggttattggggaccaaaatggctacttttcgacttcacttgatttgcagatggagtcctgatgattttgaactctacagtagaggaacagaagattcagatgtggaaacttcttaaaaagcctaaagcaaagttttggttgttatcttagttttaatatgtttgagtataaattattgttcaagttggaatactactgatcaagaattttgttttatttatttttctcacatcttgtggaatgatgtgtatgtatcgataatatttgcagttagtgacaccatagttttaatgccttaaatatatgctcttaaaattgttttaaataggttaatttccccaggagagtatctgttctgcctctgctaatacgtttgtcttgtttatgacttattaaagagaagagatttagggaaagctggaacaaaatacacactccctttaaaacaaattacatactgaaaattaaatatttttttttttaagaaatcatactgttattaatagattgattagttataagacccttcaatgaataatataaaagcatctaaaagaagtgttaaatttggctaaaaatggacataattgtaagagataataagaattattctatacaggttaattaagatttttactttttaactttaacatgtattagataatgttctttatacttttctagctggtaaaaattttccttgaactattga

SEQ ID NO: 42947 - DNA, 2432 bp, Cannabis sativa
tgggaagaaagagagcatcatatggtgacttgtttaaaaaaatcggaacaggaaaattcttccatggaaaaagaggtaaataggcttgtgaatttgctcaaacaagccgaagaagaagctgatgcaatgaaggaggaagaagcccagttgaaggatggcctaaaggaagttgaatccgaggtgatatacttgcaggaatctctttcgaaagcaaaagccgagagcttgaaactaaaggagagtgtattggacaaagagaatgaattgcagagtgttattcaagagaacgaggagcttcgagctaaggaagatgctgctttgaagagtgtgttgtacaaagataatgagttgcattgtgctattcaagagaatgaggagcttcgagcaaaggaagaagaagctttaaagagagtcgacgaattgtccaagttacttgaagaagctttggtcaagaagcaagctgaggaaaatggtgaggtgacagatatcgaaaaagattatgacttgcttcctaaggtagttgagttttccgaagagaatggacatgtgagtgaagaacaacaacaacaacaacctaagattgaaaatttcgagcaagagaacaaggaattgaaagaggaagttgtgcatttcgattcattcaaattcgaagctttgaatggaaaatccaaggaagataataataataatgagagcaaagacaaagatgatgagacagtagaggtagaattcaagatgtgggagagttgcaagatcgaaaagaaggaatttttaccagaaagagaaacaccagaacatgaatcattagaagaagaagtggagtcaaaggtggatagcagtgaggccggctttgataagatcaacggtgtgtcttccaccgaaaccattgaagaaggaagtgtctctccatcaaaacaacaacaacagaagaagaaaaagcctctgctcaaaaaatttggaagcctactaaagaagaagggtagcagcaacagcaacaacaacccgaaataggcctaaattgctctcagctatgaaggcaaggtatactactgatttttatttggcatctaaatgtgtttgcttttttatttttttcttttttaatttccttctgatttccagaatagggtttaaaaaatgaagagggttgtatcattctctaggtttcttatttttattatattttttctttctaaatgttccaatgttgtatgtgaggatattttttccaccccttccattttcactctctttttcttcttcttcttcttcttatatagattttgtgagaagactttttttgtaacttgaaattgtttcattatagtctttcatcaatttcctttagtagtaagtaaagcacaactatattttgtggcaaagaaagatgtgttcttgttccaacaacaatgcctaaaatcaagagactttgaagcttggtttgagagaggagacaccctataaaaatggtatctttattatatcaaatagtgctattagtaggcttttttgtaacttgaaattgtttcattatagtctttcatcaatgtcctctatatgttcctattccaacaacaatgcctaaaatcaagagactttgaagcttggtttgagagaggtgacaccctataaaaatggtatctttttaagtgtttgattggatgaaagtgtatattttatcaaatagtattattagtaggctttttttgtagagcttgaaagtagaaaatccaaacataatgaggccaaatatgtatgttgttcaaatgtcaaaaatctaccattgaattggcttatgtcatcatcattcatttatgtatctaaagaagaaaaaaatgttcattcattattataatattttggtcaaatattaacacttttacaatgggagctattcactatataaccaaagtttgagtttttctttttaggcaaatgaattttctacatggggccataaaccaaacttgactaaatcataatttatgatgatgaattggtgggtgagtgagcttaactattttttttgaatttggaagacatctacacaataaataaagtgagaaggaaaagaaaagcatgaacccccatttggtagacctaaaagcaaacatctttatcttttgcttttgcttttttacctttttgtcttctttcttttatttctttatttttttttttcaaaattcttgtggtggtaagtgagcaaggaaattacaccaatgtccaatctatcctttgatagacattgttaacaacttcctagggttttttttcttttacaaaacaaagttgttttatgagtaatgttagaggcatacttaaaatacttttttaatcatacactataatgtgttatcaatcttattcatttattgtttttatatgggaaattatagtgtataatttatgtgtgtctaatctaaattata

SEQ ID NO: 42948 - DNA, 2126 bp, Cannabis sativa
aaaaaaataatatataagattaattacacaaaataataaagaacatgcctgagtataaattaattaattaattaattctacattttttatggattaatatataaagacatgattcatatatcatacgttaattattactattgattattaatattaagcaaataatgaattacatattacagattatcaaggaaaagccacaacacaagcgtttataatgcgagacaaaggtgaagatcacgacaccattgtagtggcgtttagaggaacagaaccatttgactctgacgcgtggagctctgacgtggacatctcatggtacgagattgaaggagttggaaaaatccacggtggcttcatgaaagccctaggcttacaaaagagcgtaggttttcctaaagacctagacacaaacagcgaactcaacctagcaagaccaaaacccttagcttattacgacataagagaaaagctatacactcttttgaaggaaaacgacaaaaccaagttcatcctaaccggacacagtttgggtggggccctcgccattctcttccctgcggttctttcaattcacgatgataaatggttacttcggaaacttgaaggagtctacacttttggtcaacctagggttggaaatcacacctttggagattacatgaaaaatgaaatggttgaacatgatattcgttactttagatttgtttatggtaatgatttggtccctaggctaccttacgatgacaatgcccttatgtttaagcattttggcacgtgcgtatatagtaacagacactaccaagctaaggtacgtgttatatttatttatatatatttacacatgcatgcatgcatgcacgtaaaaaaattaatggcctattaatgatatttacttggcacgtgcagatagtagaagaggagccaaacaaaaactatttctcaccactgaaggcaataccaatgatgggaaatgctattggagaattagtgagaagcttcactattccaaggagtatgggtcctgaatatagagaaggtggttttttgagattgtttagggtaattggtttggtcattccaggagtaccagctcattgtcctcaagattatgttaatgccactcgcctaacctctccagatatttttctaccacctaaggaatccaatgctactacttcacatactaaaattcaataaggaataaattagttaatctttatttatttatttattatattcatattattatgtataatatatgtgataataagctatctcgatctgttcttaataattagtgtaataatatttatcaatgtaatatgaaagcataatgaagcccatattaacaaattaagtttgcacgattattataacctatgtgaaaacataattactttagtttagcaaaagtaaaattaacaaagactacaatttttatctgatcaaccacactacacactacatatatataccatggacacttttattttactaattcactacaaatttttttacttttagtcacaaattatgacttattataaaacatcattcttacgttgtaactaaaaggctgctgatttatattgaaattttttagggataacaatatagctattttatccagtacagttatagatcttgatgcccttgatgatgaagtcacggtaatccactacaaagtttgtaagattgtccaatgcaatttcactttagcaagcctctttctcaaaagaagttttgatctgcatattttttccaaattactttattggaatgttaactgcccatggaatttttggttcgaaaatttgaagtggtatgtttttaaagaagtaataatatgtgcacacacaaatgagacacatatacgtcattagggcttttcgcagggcgaatagtaaccttttttttcgaaccaaaccgcatatgcaggttttgtaatttctcaaactgcaaccgcatcacgagatcttaaaattacaaaaatcacactgcgaaaatacggtgcggtgcggtgagcaatttacgcttacatcattatcaaacattatatatgttgcccctgatttcacccaatatacgtggaccaatcgaacagggacacgtggatcagacaa

SEQ ID NO: 42949 - DNA, 3241 bp, Cannabis sativa
cctgtgtctagggcccatctagcctaggaacccaaaaacaaattctcctcatcaaattacatattttttttcttgatttttaaaaaatactatattttttcattaataaggattcaattttttttttttctatagcctactaaatttcaagatcggctatatggcccatgaggttgattagtcaacaactttgaaaaagttgctcaaccgctaactttttcaaaatgtcgacgaatctggctatccaacataaattatgaaattgctcgagataaatagcataacacttattttcattaaaaaataaattaaaattaattaagaaaattacctttacttcaagatttatcacataagcaagaacaactcccaatggtatcccaatcaaataatagcaaaatatatttactatagcaactgttccttgtaaaccagcaccaacagccacacctacaataaaataattataaaaatatatttatatattaaatatagatgtaaattactagattttattttttaagtcattttatatttttgctaaattttaataattctttgcaagatgaccctcaagctctgtttagtgtcagaggccattttgcaaaatattatcgaaactagaccaaattgtaaaacaacccttttaataataaaacctaataaaattgaataaatacattttaatattatatttttaagtcattttatacttttgcttagtttaatttcgataattcttatataattatcgaaactaaaccgaagtataaaataacccttttaataataaaacattaataacaattatataattaattacctgatagaactggataaatactatttaataagatagaaaaggcaagtagaacagagagatctgctacagcatcagccaccttttcatcatctgtaaaaatataagaaatttgtcgaccaaatatcaaacacaaaatccaagagataactcctatcacaatggatgtccccataatcacttttattgcaaatttcgccgcttttgcatttcctcgccctagctcgttcgatactcgaacactacaaatccaccaaacaaaaaataattatttcgatattcaattcatatgacaaatgataatagagtggatagtttattagtgtttaaatagatatcacgaagagtcatactgttattagtgtaattcaatatcgaatctctcttatttactattaaaaaaccgatagcaattaaattaaaccaaagtataaaataatttaaaaagaattattattattttgcactttggcttagttttaataattttttgcaatatagcctaaggatcaacttatctaaaatttacaaagaattatcaaaactagacccaagtacaaagtaacttaagaaaaatatcattttgggaaaagaaaaaaaaccccattaaatgaattaatatatatacttaccatgcagcacctaaaaatcccaagcaaatcatgaactcccaagctgaaatattgagactgcaaacatgtaattaatttttgttaattaatataataagaattaagaaatagttttacaatttggatttgtaattaattaattattaattaccaaatagagaaagcagagatggcagttgttgcatctttcatatatccagctaataacaccagaatcgaattgtaccataactccaaactatacattaaaaaacaaaacaaaacataattatattaatttcatcaataatattagtaattatatatataattattttatatgaatgtcattttgcaaaattattttctattggtaaaatagactcttttattttctaaagttattttgtacttcggcctaattatgataattctttacaaaaaaaacctttgtttaaaatttcgaccagcagtcttaagtgttggaggctattttgtaaagaattattgaaaatggaccaaagtgcaaaataacataaaaaatatcatttcactggggggacccacaaataaattacctaaaattacgtgtataatttaatattggattatttataccacatactgaaattttcaacttttttactgtgaggcggaaatttttcaaaaatgctgtatttttttgctaaaaaatattgtgtaaattttattttgtgtattgtattaagttttcattgttgttctacagttgttatttaattgttctgttttatgttcaactgttattttataaaaaaaactataaattttacgttttgcttcaactaagttatatattacttgatactatgcatgaaatgagaaaaaatacttaccacaacataaggccagatgacactgatagctttacaacaggccacatatcactaaaagcagcagtagtgaaacctttccaagagtttggacaccaacctccaaaaatgtagatgaattgtccaataaccgaagcccaactcgcgatatttaagccaccaagagcaccggccacaccccaattgagcttgtaaacgaaaaaccacgacaacagcacgtgaagcacgaatgatgaggccgaaagccaaccaaccaccatattcttgagttgagcttgaaggtacatttggatagtgaaactaaacacgaagtaatagagatatggtatgcaccatatcgagatttgccccgttgcaactgcaatatcttcttcctcgcctagcgctctaaggatttgtgtcgagaaaatgaagagagggaaagttatcgtcgcggtgatgatgttgacaatccatgatctttgtaagtaaattcccatcatgtggtattgttttgctccatatgcttggccacatagggtttcggttgcacttgacattcccaactattttcatatccaaaatcaaaaatttaaattagagagggataataatatataacataacactaaaaaaaaaaaaatagcgtctaaatttcattttagtcacaacaaaaaattaagaataaataggatttgaaactcccaaacgacttttataaagttttttcccttgaaatttataacatattaacaactttattattatttacaattttttcacttttaatcactattaacgtaaaattgaaaattattgtgtattgtttttttaaagattataactatggagcaaattataatttaatttttggaagaaaaaatatggggcaaattacaaatagagaaatgctaaaagatattattagtgtccatcattttttgatgtgttatatcaaa

SEQ ID NO: 42950 - DNA, 3557 bp, Cannabis sativa
caacgcaatcaacgtcttcgaatgcatccacgtggtgaaccaagccgtgagcgtgattgtcaccgcctgccgcggcgtcgacgtaacgcctgagaagctaggaagaaagtacgccgagatctacatggcgttggacattgttctcaggggagttagcaatatccgactcgcggccatgctcgcttcgttgcacggcgatagcattgcgaagatggtacattcggcgctcgattctgagaacaagatccgcggtgctgataattggaccagtgtggaggtgaattccgttaaacactcggcgaacattgaggtattttcccacgcttcgtttgaaatgccgccggagactattgctgccggagacgagatcgctgctactatcgctccggcgttaccgactgagcagttgcaagatcagaaggaggagatagaggagattgaagctgaaaaggatccttttgctgctagtgataagattaacgaaccggcggagcttgttgggggtttcaagaagaacagagacccttctgctactgatttgactaaagctttagctgggcttgaggtaactacgttgcctcctgcggaggcaacacaatcgactcatattgctgttgaagggtttgaaggtgagtatggtggaattgagtttgggaatgaacaagcttctcttggtgaaacttttgaagggtttagtgatgcttggggtggaggattggatccatcggaatttgttggaccaactaaaggtcctaagacacaaggtcttggaggactcgaattgcttcagactggtcctgataatgctcctaaagtggataatgctgcagccaccgggggtacaggtacgcctcttgatgaacttgttaagtctactgaaatgaaaggaccagagatgtatatatctgaacagattaatgttgagtttagagaatcattacttgctagagtaggattaatgggtactgtctatttgaaaactttgcctactaaaacatctggtgataaagaaactgaattttcattccgagttgagggcacaacggctgttaagagatttgttattcagagttctcgtgttagtagtttaggcaatggaatgttccatgttaggactgccgcttcggatgaacctttgccggttttgaagtatagtttggttcctagattaacaccattgcctctgaggattcgtcttataaaacgttttactggaaccttgctatctctgatgattcagtatgtatcgaaccctgagttgccggtgccattgaatgatgtaacattcgttttgaaactaccggtagacccttcattgttgcaagtttcgcctaaagcaatgcttaataggtctgagaaagaattgaaatggcatattgctgagattccacaaaagggatctcctggtaggttgagagcaaggatgcctgtggatttaaatgatggtgacgaagagatggatatcgttgtttatgtgaaattctctatacaaggaaagcaatcgctttccggggtttgtctacggcctgccactgaggggaagactgacttctatgaggttaatcacaggtttgaaaatggagtatatatgtgcaattgattcattatgaactatgattgtttctttcattgtagatttttcatgtttgttcttatttttcattgagggaattttgcaatatgatttgtttgttgcattctctttaatattgaggttgtaagaaaaggtattcgattaagtgtaagccttttttgtttgtactaactcttgttctacatattctttttcctttatatatttttattgaattgagaactctatacctcactagggagaattggggtcttctagaaaatttgcttgttcattgtattgagaatcaacttgagttctgttatacaattgttgttgattaaaatcataggtttatatttatgcttagctcctatgttactcatattctaggtttgctttttacccaaaaggggctccaatggtcaagtattcttgattttcttctgcatattttttttttcctgaattctcttattggtggtaaaaattcaagtttgagttttgatgttttcatagtgaaatttgtattatacaggaaataagccaaagagaaagttaaggcatcatatataagtttgtcattgtaataaaatggcaaatgacctctcccccaagagagttttttatatgattactaggttgagttaaacttgagaaggaaatatgataattaagaattccgaaagcataatttttttttgataaattttaatcacattcatagcattgattcaattattaaaattctatcgtagggttataacttggtagttgtgatgtgagtgagtcagtgagttttcaaggcacatttaattgtgtcaatattatttcaatacttgcaaaattattaattttttttctaaaaagtttgcaaaataattcaaaaatacataaatactacttagagttaacaaatacttttaaaatataattctttttattttaaattgaaaaatattataatatatatattattatacaactaattcaatctttcatctcaaatacaaacaattgtcctaaaatggaaaaaggatgaaaagagataacagtatgttttatagttaaacatgtaattaaaatggtgtttttttctaactaataagaaaagacaattttttttcctaaactatttacattttttttaaaaaaaaaaaaacagaaaatgtggggtttagaattagaactaaagatagctcaagtggtggtgtggttgcaagaaatgagagaagagagttgctatttgcttctacaaagctatgtaaggctgattctcctcatattgcagctgaattaggagccataagagatggtttgcaggatggtcttcaatggcggttgtggagatttacagtggaatcggattgcctcgaggcagtgaagatggtgcatgaaaatgaggtcagcggccatgcaaataagagcatctccaatggtgatactcattaagcatgtcaaaaaatttcatatcacctgaaaattaaaaaaaaattattttttattttttactttttttcatattatttttcacactttttattctaaaatgttccaataataaacacctttcaaaagatgtcatttttaagcattcttacttggcatttttaattcactttaatagtaaatctgttaaaagatgtcaaaaaaatatatatatgtcatcaagtatttttttaaagtatttttattggagatgctctaataagtcttcttgagcaacctttgtaatttgaagttcttttatagaaaagctatagcttagccaaattatactttggtgatcaaagttagtattttgtgaattggggttaattctccttgttctagtaatgctctcaggcaagacttgccattttctgtgtaatattgttcaagttgaatataatagtttcatttcaaaataaataaataaataaactcacaaaattaataatttcataataacataaatcacaaaaataataatatataatagaat

SEQ ID NO: 42951 - DNA, 2908 bp, Cannabis sativa
tagtccatgagtcaatattattaagtattttgctagaaaagcttaagagattacaataagtatcagcactctattctttgcctgagcaagtatgccaagattttttaaccttttgcatgaatgattcaattagtatttatagtgttacagaggtcatactagttacccatttccctctaagggggagtttacaaataatgcattgactttgaacttatttggtaagcccaacgcatgatgtgccttgtgtatgctgacgtggtggccttatcaccaagttatttgtttataccacgtcttgtattcatggataatcaatgacatattaattactagatttcgagttatttatttatttttatttagtgagatttcatcttccaaaattctttgaaagtaattttcgatcttttgcgatttagataaaacaaaaactagtattaggcttccaaatacacgctaaggacctcattcacatacacagagataatctttctggatgctaactaagcttaacgaaacttcgtttgagtgagttgtattggtgttctccctagatagaaaataggtcttgggcttggcctaatttattgaaagtatataagaattatataaaatatataaaaaaaatacaaaaagttattaattattttagtaaggggcacatgtgtaaataaaaaagagatatttattatagtgtaaaatttgattatattatattttgtgttaaatttgatatattttgtaaacatgcgtgaaatttaaactacattatacaatttatactattattggaatttgattttatgagtatgaactgaaaaataaaaaaaaaaaatgtatatacatcatatttataacactcaattagaaatagtctaagaggacacctcaataaaataagacattttttcagctaataaaagtgggaaagggggattagtctagtggtaactgctaaggttgactactgagtcaatacccgcatgttaccaatctactctgatcgcgaaacacctaatcatatctcatctgcttctctccgaggagtagcagcaccactaccagaggaagcgtgatccaattccaatttgccatcttcattaaccttaaccaaaacgctcagaaatggcgttttctgtactatcatcctcttcccttctttacctcccattgaagcccagaaactttatcttaccaattcgatgttcttcaccacagtcgatttcaacccaatcaaagtcgacccaattcgatttgaagacgtattggacgaccctcatagccgagattgaccaaaagctcgacgaagcgattccggttaagtaccctgaacagatctaccatgccatgcgctactccgtcctcgctaagggagccaaacgatctccgcctgtcatgtgcgtcgcctcctgtgaactcttcggcgccgaccgcctcgccgctttccccactgcttgtgccctcgaaatggttcgttcttatcttgattaaaaaaccttactttattaatttcaagttagcattgatttttctcacttttcattgtttgttcattttttatcaatcggttttggttttttctttttttattaatgaccagaagcaacttcgagaacattaaattctgggttttattctttcaaaaaggagaatctgtgtttaatctaagaatctattcccccaatccaacacaaaaaattgaacaaaacaatactatataatctttttgtaaagaaaaagtaccctcaaaattgacaaaattagagttaattcacaggtacatgcagcttcattgatacatgatgaccttccttgtatggatgatgacccctcacgccgaggccagccctccaaccacacaatctacggcgtagacatggcaattcttgccggggatgctctcttcccgttgggatttcgccacattgtctctaacacaccttccaacctggtacccgagccccgggtcctccgcgtgatcactgagattgcgcgagctgttgggtctacaggcatggcagctgggcagttccttgacctggagggcgggccaaacttcgttgaattcgcgcaagaaaagaaattcggtgagatgggtgagtgctcggctgtatgcggggcattactagctggtgcagaggaggatgagatagagagactgaggaggtatggtagagctgtgggggttttgtatcagttggttgatgatattctggaagagaaatcgaaatccaagaatggtggggtagtggagaagaagaaaggtaagagctatgtggaagtttttggtgttgagaaggcaatggaagtagccgaagagcttagagctaaggccaaactagagttggatggttttgagaaatatggtgagtctactttaccactttacagcttcgtggattatgctgctgatagaggttttaagattggagattcaagttcatagacacataaatttaataataattattattataattagtcttacgaatcatttgagattaaagactcagtataagaagctagccaatatctcatttcttcctaagaaaacaaatataccgctcgatgtgaattttctttattcgtgttgagtttgaatacgttgttcttaacttaatacttcttagcgctaatgaagattatagagaacaaatagtattatcaagctatatatatatatacacaaacaccattactgttaatgaagattgtagagcttagcagctccctttggctgttttactaggtgtctaaagctgaacaaaatcatcttcgtaaatggaattttaaggtataatttcagttagggtcgtctggttctttaatggccaaacgaaaagtcataatggcaaatacttgctggatttaaagaaagtttatctttttacttttaatgaccaaa

SEQ ID NO: 42952 - DNA, 2422 bp, Cannabis sativa
aagccattataacaagtattaattaagttgaacatatataaattttatagcttgatcttcaagggttagaggttgtagtagtaggtggtgtgaatatgttaggaataattgtgggtgttgtagctgaaatcgccgccggcaagggaggagacccgaacgtcgccctcggaatagtgaacatatccttagacaaggccatgggcttttccacagactgttgtgcattggatagataaggaattggtggcaattgaggaaggtatggcgacaagaatggtagaaatggaatactactaattcttgatgttgtttgtaggagtttacgagttgctaagcttgattcaaagcttgaaaatgttaaagctacaaaaagagccaaggagaaaaaggtacggatggccatagcttataatcgatcagtcttttttgttttttcaattagaaaacaaaaatgtatatatatgttgctttgatgagaaagatgtggttataagatgggtatatatatatagtttggagagactaattaattggtgtggtgtatgataataattacttggtttggtacaaatgaaaactgaatatagttctatttgttaatagaaaaacgatattgatataataaggaactttaaagagttagagatggggatggaacttaatttgttgtatatataattgttgaactggttttgttacaacgaaacttgaaaattatacaaggaactacactaagaagattcaacttaatgtataacagttcacgtaacatgtttggcttttttaattgatttccctatttatgagtagaaacataataatttttgttaattttacttttaaagcattgaaacgaaaatatggtcttcatatattttgactggttcaactgtacaaaaaattccttatcaattataccacaagctttgacaataaaattgttatgcaccccacattattaaccacttgaggctagttcaaataattataggagaatgtgtgttagagattttgaattcgaatcttatattatatattgtattatataaactctcaaaaaaaaaaaaaaagaatattatacttaatattggtggcttattagtgatttagttgaatcatgttattgggttttcttccttttatttgtaaagggcttgtatagtctaattttgttgattaatagctagagcaatattttgatgtgatcaactatgtctgatttattgttcaaaaaaaaaaaaaaaaaaactatgtctgatttacaaaaatttcgtttaccttaaataaaatatatatattttacgtaataaaagaaatccattttaaagaaccaaatagggtttttaattaacaaaataaaaggtgaaaatcaaacaggaatattattcaaaccaagtataagttttagaaatgactcatctcttatgattaaccgataaatattaatgcaagaaagaaaatatgcaaacattttaataaaagaattaatgtctctaaccaatatagatattatatatatcatgttctttgacatatagtaaaatataaaacgtgagttgcacgttacaactaaatatattattgcatgcattcaaaaccaaacataattaatatgttgaaatattcatatatataattacgtcgtacgtgtaattatatgacatgacttagatactatctagctagtttactgtggaatttaattaatttattttaactataagcttagccactctctagtactacacaaaccatgcaaccaaagcctttttggcatataatattgagctcttatgcctctctttcatgattttctaatcaaggagatggcgaagattgcggggttagagccgacgacggtgttgcaaatggaaatatcagaattcccggaactgatggaatagtcactggaataggcatcgccggcaagttaattggattttcttgaagaagatgacgagctgctatggcaacatccaagcttagaataatgctaagaacaacaacaagtaaggctaaaattattatgcaatttggagaacccatatgatgaaatgatgagaatttgtgtattaataataataagtgttttatgtataagcaagagctcaaattaatggaacatttatacaagtataccatgattagtatgagtgatattaattataattaatgaaagcataatcttaggttgaggaatgagttgagtgatctaattgttcaatattgattagctagttaactagttcaccttcttaatgatccattaaaaatacatgatgtgtaattaattaattgtttagctatctaatattaatatatcttctaagctgtttttgacctacaattgtcattcagcatataaatatgcatatatagatatatatatatactaggtgattgttacgtgccaagccacgta

SEQ ID NO: 42953 - DNA, 2763 bp, Cannabis sativa
agaataaattcgttattaaaaaaaataagagaataaaagataaaattatgtcaaaaaaaaaaaagaatatgacactaaaaaattatattctaataaatgtaaatggagctatataaaatattatgtcaaaattaatatgatataatgatataatttttcttttttacaggaataatatagatttttaatctatgcaagagaaaaaaataattaagtaataaactaagtttgaatgagaattatgtatattgtggatattttaagttttttaaaagatgttcttttaaaattattaaaatatttaagagtaaatttaatttaataacagcatataattcatatataatgttcatagcaaattttaccaattttaaagaaaaaataataattttgagctttcatcaagtgaattaaaacttaattattatatatattttttagctgaataaatagtacttagtttaactaaatgtaaagattattattcattaaactaaaaatattttattatttttatttaacttttttacatatgttgtattattatattttttttttataaataaataaaatatattaaaaatataatatttaaataatgttaaaaaagaaataaaaaaaattgataaatagtgtaatgtaaaagtaagaaaaaaaatagaataaaaaataagattgtggtgtattttgaagaatagaattgagtaaaaaattgagtgctcttcttttaccacttaaagacaaactaattcgccattattccatgactaaaattaggaatcaactatcactaattttatgttgttcatttatttttcactaattttgttatttttaataatttcttagtagattaatgatccatgaatatttttttttatcatgaattgaagattgagaggcacgttaagtgtggattaaaaagagaagccaattgggtcgcacgatacatctgatgtgatccactccactcaagcggagccggctccacgatacactagtaaacataaaaatataaaaatttacaaaaaaaaaataatacaactaagtaattatcccattatcatttcataaaaaaaaaaaaaaaaataaaaataaaaaaagccaattgtaagacaaaaggacaataaatatacaatttttttaattataaccgtacaagaagagctgggtattacccagtgggtatcattagccacagcacaagttcagtaaaaccacaatataacactacaattataggcaaaatacacggcagtaatatgaattcgtagcaatacaaagaagatctgggtgtcatcctcacaatgcaccgtagcagaagctcacaagaggtggtgttatgtgttgcagccacgttgaaatgcgtgactgatcaaaccaaaaccgtatccatttgcatgcacaacaattgtttttttcccttagcaaaagccattttttttcattaaaaatgataatttatagctttgtattctgcttgttctgcaactgtcatgccctcgtcccagcacgtgtcaaataagattccttcttaataattttcttcatccttttatgagctcaaacaaaacccatcatgggttttttacttcagcttgaggtttgctttggctagctagctctatctactccaaaataaattaatactagtattagattagactaccacatacaaggtaagtgtttttaattttgattttgatcaagcttctacctttgttgatttttttttaaaaaaagagttataaaaaagtaatttgatttttttttcattatatttataggatggagaatcacaatgaggagtgggaaattgtggattatccatccaatgatgaagatagtaatgaatggaaaatgagttggattttgagcaagggtttgggaattgggaagaaaatacttatcactgggtttgtaatgtcttctgcacctttggttcttccaccacttgtggtgatttctgcaattgggtttgttgtttcagtcccatctgggattttcttggctagctatgcttgtactgaaaagttcatgaataagcttctccctatgccttatagaaatggagaagaagattactatagtgacatgcaaaaagaggaagatgaggaaagaaaggatatacaaagaggggttaaatcgagaattgaattggaagatgagagggctagtagtaatgatgaaattgaaggggctgattatggggaaggagttaaaggaaatgcagtagagattcctatagaagaaaatggctatgagaaagatttggggaaggaaaaagcagaggaaaagttgatggtagaaagtaaaaatgagaggaaggaagagccagtcaaagtagaggaagttgtggttttgaatttgactgaggctgatgatgggagtggaatttcaactgttgatgatgtatttactgctgtgattgaagaaaaagagagtgaagaaagagaagaggatttgacaaaagagacaaggactttgctggaacaaatcagggatgaaggaaaagctgatgaccaaaaatcttctcaaggtaaagcctcataaataaaatggtgatgatgggaatttgacacttaatttgtttctttttggttatttgattagtaatttttgttttgttttctttttccttttatgtaaatatgaagattcttcaacttccaagggggttaaaactggtgagcttcctgtttcaagtggggctgaggttaaagatgctggaagcacttctgaaaaaggagtcaaaagtgtccc

SEQ ID NO: 42954 - DNA, 2882 bp, Cannabis sativa
ttattattattattagttttgattacttattactaacagttagggcgaggaacttattccattttcaacagaccacaattgacaattttgatgtgggtttgtttcgagcttctttttaatgtgattcttctcatgtaataacaacatgatattaatatttgatctttgatcttttttttttgttttgttaacgtgaatcttgtactgtatattgtgttcctgagattgtagtatgtattctcttagaaaaagaaaagtcttactagagatatgagaagaataaaagctttgctatttgattgtattagcactagtaaagtaaaatgttacagagactggtgtttgtatagacccaaaaacaaaaggttaagtctgttataaaccagattttacaaaactaagtttattctaacaagtctatataaaattagttttgtttgagtgatgccattttcttaagtcaaattagttatgatataaagcttacctgatcatggcagaaatgagaagcttctctgattttccaaaggagatactggaggtaatcttattattgttacctgctgattcactggtgcgattgaaatttgtgaacaagttttgctattctcttatctcgcctttaatcaatgacccggaatttattgccaaacacctcttccttaccaaaaaccagtcttctgcatccctacttttcagattgccttctccccatgtcaatcatagtttattcacattcccattgttgactatattttatgataatgataagagcaagccttttttatcagtcaccgaagctctcagtttgccactaattcaaaatgaaagatataaggatatggacaaatgggaccaggcttaccactgtgatgggctcattctgctagtaaacgattttggaacaatgatgttatgtaatcctgttttgaaagaatccatgcttcttccacaaccaaagaatgctattcttgaagggtctccttccactatgggatttggacttgatcctgaaagcaacgattacaaatgtgttgccatttggtgtcatgacaattgcaaaattcaggtgtacacactgagttctaattcatggagagagattattatgcctgctgattctgaagacatgatgtacaccataacatattcttatctgttcagtggtttatgttggaagggagtttgttactggttggtgcataatccagatgcttttgaatttgacaaggtccttagtttcaatataagtaatgaagaatttcatctgatacatttgccagttattgatgatttgatttatatgcgagatattgataatgattattgtgaatacggattccacctttcagtgtggaatgattcagttgttgtgtatatgaaaactgaaaggggaagctcttgtgagtatcatttcttcccgattgatggtgctgaagatggtgctatttctcggactaactattttcgcgttggaccactagaaaatgttaggagtgagatatcattttggaagaatgatgagaaactgattgaaatccagaaagatggacatgtacagttagtgtcttgcaacattcatacccaaaagtttagagaagttgtttgtgatctagagggaatcagatttgatcattgggcttgtttctatgtgaagagtttgatttctattaggaggaggtgaagtttgatcctgtgaaagattttgacctagaaaatggagcctcaaaaatgggaaatggcatgtttaaacatttgttgtctcgggaagtatgtaattgaaagtattggttcatatatattaagagcgctttaaggcgtcccagagaaatccatctcaagtttcctctgggtattttagctctctttctctctgtgtgtgaaagaattaatgaatttcttcatatgaatttatttccatttaaatattttattttccatgggcatcttattattccaacttcatcttcatctgtaggttagtttatgcataaagtatgtattttgttttcagagtgtttgttgcatttgtactatgctgcgagtgattttgctatggtttttctcacttacattattcttagcaatattggcggttaaaccatctaaattttacattttgtaatacttaactacaaaaatcaaaattttgatggcaaaacctacggaattctcattccgttttgttttgtaccctccgtctaaaaatcatagttaagtgtcatggtagactgtccacgtgtacacacttatacacatggtaaatttttagtgattcgcgtaattttaattattaaaatatttaataaattaaaagttataaaaaaaatacataaattacaaaaaatatatatatatatatattttcttttcttttcttttcttctcttttattttttatttttttatttttttctttctttttcttctttttcttctaaaataacctaaaactaataaccctaaccctaattccatctccttcatcctctctctctatatatatactagaagaaagctacgtgtaatgcacgtatatttagttttatgttagatgttttataatttaattgagaatggttcaataatcattagtttaagaatgagattttgctctcaagtcgattcgggttgggtcgttctttgaagaatggctacctgttcaccttaattgcatacagaactgataattttgcacatcgatgtcctatctttcaaaaaagaaaaataatttaataaataattatataatttaatttatatcatagtctaattgattatttttatgaagtgatttattcaagaaagttaattttttattattgtgtggagttatttttatgtaaattaaagtaattaaaataatgttgttataaatgtag

SEQ ID NO: 42955 - DNA, 2018 bp, Cannabis sativa
cttaacttatatttcttctcgtcaatctaacgagcgaatgttgatcaaatttctgcatcaacatcaggtatattaaattacaataattaatagttataaatacctcttgaatatccaaaataccgtaagttgcaaggttctcgcagccattaaagttaactcgttttcatttacttgagcaaccaacgacccttttgatcatgagattaatcgggtggaatttcattgaaagtaaacacatgttctcaatgagtcacattcattcaagttcacaactccaacaaaaatataaaagaccaatgtaaaatttacactggttacttcaataattcacttcaaacaaggtagatgaaccataatagtcaacttagtaatcacatttttatatacatggcattaactgtcattataaatagcatttcagctggttttggggaatagttggatagtctttcaaattataaaagctatttggggttggtcaagctcaggctaaaatcccacagttttttagccaattcagcatctttagcaagagtggtcggattcgatttgttgttgtcgacaaaatactcaccgctcactcctttcacctgtggatgcaatgccacatagcattgagttgacgctccctataaaaatccgtcaagaatttgttaggaaaacaactgaagttgcatgaatgctagaaaaggctgcattaaaccgaaaagagttgtctgttcgtggtggtaaaaacatacctgctgaacatttttaaggacaaatttaccaactgcattagcaacggctgcattaaaccgaaaagaaaggacatatcaataaggagccaggaaggaaatcaaaatagattctcagcagctgatcaaaataacattgcatagcagcataatatagcatgttcctcaatatatgactagaagcactcactacccgtaatatggagcaaataacaaattaacaaaatgcatgagcaattgaatttgagcatgtaaatcagaatgattccaaccaaactagagtttggtcataatctatataagaacatgtgtaaataaatacatgcaaagggtttcaggatatactattcaagatactgtgatggcgcagaagattggtaataattgatcctggatgtagagcattaacagttatatcaattccttccgcctgttgaaaaaacaatataacgagagagaacagttaaattttgtgtctcgcagaatgagatgggtgtggttgaaagtgtcaacagaagagactgaatgaaaatggtgataaactaaagacaaacaaaacttatttcaaaaaagggcatgtattcaattgataaaccttgcattagctttttattctttcataagaaatgagtagaaaacaataccatttatcattttttttcagcttatgattttaagcacacacatctcaaagttcattactatgatcattaaattaaaatcatttaaatgatatctgaatcgatgcattccaagttcaagctaagtaccttcagacgcattgaaagttcattagcatgcagtatgttggcaagctttgattgtccataagcataaatgctgctatagctgtatcattcaatgaaattcaaactatcatttgatcaactcagaatataaattcattagttactgcaatctacagcagttaaaaaatggataaaactgtcaaatggtttagccaaaatgataccttgattcctcattgatcttatcaaaacgtattccttctttatatggaaacctgtgagcctcagaagacaaaataacaattcttccctccctgccactttcaagtaccgtctttttcatggtctccaataaaaggtttgtcaaaagaaaatgacctataaaagggtcatgagagaactctaagataccacttccacagaaaatcaaagaataggatttcaagtgattaaaaaaaaaagcttgaaaacaagagatagatcgattgctaatttctctactcagatcttttcttacctaaatggttag

SEQ ID NO: 42956 - DNA, 6779 bp, Cannabis sativa
ttaaacttaattggacattttatgggcctaatcctggcccactgaagcccaaaataatgatttggctctgagaagattagtagagtagcgctggagagagtagtcccaaatttggtttggatctccgagcttcagatcgttctgctctaatacagcttctctgtaagtgatttctaatctctggatctttgctcctttctttcaactcaaggtttgatttcgattttgattttgatatcagtctcatagagatctattcctcttgggtgggaaatgttgtagatctgattcttatattgcttcaattttgatggatatggtccttgatttcctacttctcttacttatttttcttcaattgatttctctgtgattcatattattcttaatttactgattcttctcgcaacccctcgccatcggaattatagaacattttgtggtgttttttttcctttaatattatgtatttaagtacatatgtttttatgaaataccaatactgagaaggtagagttcaaaaaacatataattcattatgtctatggaaatgtctaagtgggttgctctttgattcgtagatctattggtattatgttttcttttttaatcctgcaatatttttttaggagcctccgtaggaagttttggtttttagtttgtgagatcttgatttattactctggttttcccaacgtgatccacctcatttttttttgtcttagatcatagcaaaattactgcttcgaatatttgaatgtaggagtgaattggatctagtttcgtaaaatattcaattcaaatccccattcttgtcagccctgtttttttctctcggaattttgttgtactgcttggggtcggtggtaatagtatatacgaatttcagtgagacatggttgaaagttaaattggatcacgattttagtcaaattagcaagcattggtgtgcttataaaaatgtatgtgacagtctaatgacgacattgagttgcatgatgatactccatattttgttgattttggaaattgtattgttttcttatgttcactgcatttctgcattttaggtgctggattcttcattttggtcgttcatgtttggtttctaatctcgacataacaagatggtaagaatttgcgctctccattaatccttttgtcacagtcatgttttgatttttttttttgtttttccttatcattattattatatggattgagctatccattggtaagtcgtccatttgttgtttagagacatgtaatgaagtaaacgcactctcacaattttgagtaattgagatggccacatgcttataacttttcccaagcattttgctatttcagaattttgatgctatattggtattatatgtttatgttataatgcttatcaatcatcttcacttgctgcgtaggttgttcttgctgcttccattgtaaccaaatctgggaaaggtgcgaattgtcttacatttatttatcagtactatttgataatatagaacaaagcactcattcaaaatgtcatgtattattacatagggccaaacaagagataatacttttattgtaattgcagaactcatgtcttgttcagttgctatagtgctgtcttgtgtacaattgaattgctaagaagttaatgtttaaacaccctaggaatgctatgttataacttaagatgatggtaatgaaacaaccacctcgatgtaaaactgaatttatgttgaagttctgcttggatttttattatttaatgttagctacctaaaagattgcaattgtggaaagaatttgtctgtatttaagctatatttcattgcctgatcagaagattgattgactggaactggtaaagtatgttggtcattgatctgtggggtaggttcttaagtctttatactcttgttttctcacatagtaaagttattttgtagcaacaatttgggatgggtgtgatattttcttttggataggaatgtgattaaagctttcagaatatggtgcacctactggcattgtcacaacatttgttttatttatttttgcattgtctcctttattctttcttgcatataaaatccttcaagtaatttctttgatgttatgggcaagcacaatttacatatcattttataatctgtccttgagtaccttatttcttttagtctgtaaataagtaaattgttgttaagttaggagttctaattggctgttttatttcttgctttgacagtacttgtctctaggcaatatgtggacatgtctcgcataagaatagaaggtcttcttgctgctttcccaaagttgataggcactggaaaacaacatacatattttgagacagaaaatgttcgctatgtttaccagcctattgaagctttgtacttgctacttgtcacaaacaaacagagcaatattctggaagatttggagacactgcggctgctctcaaagcttgtatcctttattagctggtttatgatttttatcacattgtccatacaatgggaggtgttttagcatgtgtatgcatctctgctctttcttactctcttaaaataaaatattataccactgaggaaaaaaatgttacatcacatgaacaacttggcagcttttcaactttaccctggataatttgtgctccacctttggtcaattattcttagcatgtgggttctaatttctataaagggcttgagagatgcatcattaggcaagcatacaaagatagtttccacttcttttgcttacaacacttttgctaagttgtgaatttaaattaatttgcatcactagctcactttaagaaaacaagaaatcatttttctgtgttgacatgttgaggtgttttgtgaaaatgtaaacaacttaatttgccttaaaaatctcttattgaagaaaagtaggacactagggtccaggtgaaccctgatattgtccagctgaaccttctatttcgtggatacctttctgaagtttcttttggtctatttatttttttttctttttttcccccctataaatgtttaactctcagtctcttgtacaataatatcacttgaacaatttgaataggttttatttccatcaaattaggtgggatatatgtataagtttattccttaactaactttaggtgccggagtattctatgtctctagatgaagagggcatttgcaggactgcttttgagctgatttttgcttttgatgaggtcatctctcttggacacaaggaaaatgtcactgttgctcaggttaaacagtactgtgaaatggagagtcacgaagagaagctgcacaaactcgtaatgcaaagcaagattaacgaaacgaaagatgtcatgaaacgtaaagctagtgagattgacaagagcaaggtatatcaggcttctgatgtcgcccatgtagtagttttatgcattctataatattctttgttcgtatgtatcaaaactgagcatcatcgtttcgcttgcagattgaaaagagaggtgataagggagggtttatgtcaatgggctcaggaagaatagagagcagctttagtgagatgagcatttccaatactggaagtggttttggtagtggttctggttttggattgaacactgagatcgatctatatgcaatgaagcctaaaggtttgttcatgttcttcattatgaattttacacaaggcttatcgcacataccatttcttattgaatttaatgtgtaatgctggtacttatttcaacttactgtataatgtactttcaattttttttttaaaataactctagcaatacttaattgtgttctttagactggtcatagttcaatcaagattaaattttgaaggcatggttcttaagctctattttttggttgtcttgtgatgaatccattccatctcttttaataccattgatttaatgctatgactttttattgatgattttcactaacaggctcaggtcgtcaaccttcggctgccaatgctcctccgaaaggtcttggtatgcaattagggaaatcacaaaggactaaccaattcttggagtctttgaaagcagaaggggaggttatccttgaagatgtgcagccaaaagcagcaggccaatctagatcatctgcccctcctctaactgatcctgtcactttgactgttgaggagaaactaaatgtaacactgaaacgagatggtggtgttagtaactttgatgttcagggaacattgtcgctgcagattctaaatgcagaagatgggcaaatccaagttcaggtactgtaatctaagctagtttctactgataattctggtgatagtttaattaagatgaggtgtaatgtatgtgatgacatagaccttgtcctaattgttcatgaggctaggaaactagaaataatgtttcttttgtgagtcaacaggtggtttcctgtcagtgttttcttatttaaaggacttccaagatttttgttcaactgtcctcctttagtttgtcttgttataattgtgctatgttctgccttattttagatcgaaactggtggaaatcctggcattcttttcaagacacaccctaatatgaacaaggagttgttcgccaatgaaaatattctaggcttgaaggatcctaatcggcctttccctgctggtaacagtgatgctgcgggtgttggtcttttgaagtggcggatgcagagcacagatgaatcaatggtgcctttaacaagtagggttttttttttaaaaaaaaataaaataaaattagcgagtatccatcattcttcttaatattttggtttacagtgtcttgtatgttgatgttgtttacatgccattgtttgttgcagttaactgctggccctctgtttctggtaatgaaacatatgttagcattgaatatgaagcttcctcaatgtttgatctgcggaatgttgtgatctctgtacctcttcctgctcttcgtgaggctccaaatgtcagacaagttgatggtgaatggaggtaagaaattaattttcttttaccttttgcttctgaggaaatagcattaagtaaaaacagaatatgtaactgatgttcttgactaactctacatgttggggtttctgggtttggctactttatatatagttccttgtgaaatcaaatgggtgatgttgcgatcatactttagttgtttttttttgggggttgagatagttctcaagtctgactgctgtgatttagtgataaattaataactttattaaattaaactcgcataatacctgttggattttgtggtttgcttttttttttatactgtacaaaaaatcattgctttagtattgccattttacacaaaatagcaaataatgtccaattgccctctttctcctctgtgatgtgtaagtagcacatattgagttacattggcaatgaaatttcagggtatttatcgtatcatgataggttctatcacatttttgctgaactgtacttcatgttgttcaagttctgtatccatttgcattgtttatgagttgcactacattttatttgagtttggtatcgatttgcactttgtatggattgcaggtttgacccaaggaattctgtgttggagtggtccattctacttattgacaactcgaaccgaaggtaagaacttgttactgtcgttttccttttgaaacctatcatacatgatttcaatgcaagtgatcgttatgttgtatgatgaactgcttgcagtggatcgatggagtttgttgttcccccagcagactcatctgtatttttccctatttctgtgaacttctctgctactaatacttttagtgaattgaaggtatgcccttgtttcccattgtatcatctgtataactacagtcgattagtgaataatattgtaaacgtttgttgagaatgcatatgtataccactggtagctttattgactatgaacatctgttttgcaggttgtgaacgtcttgccccagaaaggtggagccccacccaagttcggccaaagaacgcagttgttgacagagaattaccaagttgtctgatttgcaaattttggtattgattaaatcacttattctacagttgtggccgtgacctttcatgaacttttgttgaggctaatgattttattattttgtttttagaatgtgggaactttcggatgcgtataagaaatactctagtaatcctttgagctgtatttctctttcattgagtcataagaaaagaaaatgtgcttgttgttttattcttatatcagtttttatctcgaattcggattcaattagtgaaaagatgtattgatgcttttcaatgagttatcactttctgctgcttatatagcagcatgtttgccaacaagagaaatatatgtggattgagagaaattgtaagaggcaaaattcttttgatattttttagtcaatttattttttatgttattttattcattctcactacaccgaacatttttgtttattaatttattttttcttttcaaaatattgcttttaaaagataaaatcgtaaagttacaaaattcggttttttcattcattttatttgttttttcaaagaaaaaatttggtaaataaaacaacaaaaaaaaaatatgggaaaaatactacagatggacgacaaatttactttttaacaacaaaaaatctgaaaataaatgtacaaatttactttttaacaacaacaaatctgaaaataaatgtacaaatttactttttaacaacaacaaatctgaaaataaatgtacaaat

SEQ ID NO: 42957 - DNA, 2252 bp, Cannabis sativa
taatgttgtttcttcttgttcttattcagggaagaatgagatgcaagtgtgttgcacagtggacaaagatttcaaatcaaatgtgacagtagatgatgagtttctgccacgccaaaatggtgatcttacaattatgtacgatgtgatcagaacatatgactcaaattactgggcacaagtcacaatggaaaaccacaaccctcttgggcgtcttgataactggaaattaagttgggattggatgaaggacgagtttatctacaccatgaaaggtgcttatccaactgtgcttgattcttctgactgtgtttttggggtacaaggtcaacactacaaggacctcgatttctctactgtgtttaattgtgaaagaaggccaaccataattgacctccccctaactaagtacaatgactcaatcctcggattcaaaccttattgctgtcgaaatggtaccattttgccaccacaaatggatgcaagcaagtcaatctcatcattccagcttcaggtttttaaaatgcctccagatgtcaacaggtctgagctctcaccacctcaaaactggagaatcaatggcacactgaaccctgattataaatgtggccctcctgctcgggtaagcgctagccaattccctgaccccagtggtttgcccacgaacacaactgctgtggctagttggcaggttgtgtgcaacataacagtgcctaaggattcatcgcccagatgttgtgtttcgttttctgcttactacaatgaatcagttatcccttgcaacacttgtgcttgtggttgttcgcgtacaacagaccgtacttgcagcacaagtgcacaggccatgcttcttccaccagaggtacttcttgttccatttgagaatcgaactgctaaggccatagcttgggcccaactgaaacatctaccaaatcctaatccaatgccttgtagtgataattgtggagtaagtatcaactggcatctggctactgactacaataaagggtggagtgcaaggatcacactcttcaactgggatgaaactactttccctgattggtttgctgctgttcaaatgaagaaagcagtccctggttaccaaaaaatgtactctttcaatggaactaccttggaattgaatggtgtcaataatacccttttcatgcagggcaacgagggtttgaactaccttgttgcagaaacagatgccctcaacccagagagggatcccaggattcctggaaagcaacagtcagtaatatcatttacaaagaagcttacccctggaatcaaggtggctgctggagaagggtttcccaccaaagtattttttaacggcgaagaatgctcattgcctaaggtatttccgaccagcgatcagagaaggaactcggtcacaatttcttcagtactcatgttggtcttggtgctcatattgatatagttacatctggggatgatgaggaactgggtaatttcgtagctgctctgctgctgatttttttattctttcagtgattcagtttaacattttaggctcaatcaggagtttggcagcctctttagttaaactggttgtgaattctgattacagctggtggaacttgctgcttgcttagttttgcaggagtatatataccatactaaggaacagcatgtcataatatatgtagtcgatgtaaaagtctattttgtgtaaaacattgttgaacaaagcttcttttttatgtgcttaatcttttttcatgtgtacctttacgaatggtgtattgaactttatgttcaatgtccgagtctagtatggttaagaacagtttttgtgagtatatataaattattttaactaacctgttaacttatagaattttgttaaacataatcaagcttttaataattaataaagaaattgattataaataaaaataaaagatttttacttagtttcgtaattaaaatttacaaaatacaatttagcaaaatttctgtaagtctgtaattttggccaccccttctacaacacgagtcctgttatttatagaattatgatagcaattgtttcattattatctaaaatatagttattaaatgtggagatttctagtgtattatatatctactaattggtgggtacgatttataataaataactgttattttatgatctcgatattcattatattttactgagcaacttcattattttttcgggatatacactaagtgattgacacatgttattcacgatcctccac

SEQ ID NO: 42958 - DNA, 2303 bp, Cannabis sativa
gacacaaacatagttaacaatcgtaaggaataactgccacagagaaaaattggtaacttcctctctagaaaatgattttagttagatcattatttattagtttttttgttttggacctattaaataatttaaaagtttataataccaacgaaataagggatgtatcaaaaagtgagtatatactaatagacattgccttaaaaatataagattatttgtaccatggaaaagaataaggcagtaagttgacaggtagatatttttctttaagttggtatataattttcttatctttttctctattttctcaaaccataaaccatattgttcagtaatttttagttatcgaaataaaataaaaactttattaaaatttttcatggattttattttatttattagaaaaaaggggcacattatataaatagtagagaagagagatgaggagcagtccaatctttctgtttactgtttaaccctttctgctcattggggcggtcgccgaatgataggctggttgtcccacatggcatgtcttgtggcattcaattggccggtttagtggattttggggcccttctttctttctttctttctttcttttgtttttctgaaagagagggtatctgctattttcattatgtttaaatgaatcaataatccaatgagtgcatattcaccaacactttttatgctctcatcatatacaatacaatatataataagattataagccactcgtttagtgccacattcatatatttataatgcttctgtcatcctaagctaacaaaaacaatgagaaatgttttctcctatgaaaatttatatatataaataaaatataaaatggttacatgatacgctatactttattatctccttaatttttttattttaattttttttattcagtttataaatattaatagtctaattaattatgaaaaatattataactaatatatattttttcgaagtattttatataatttatagaacttttttcaagtatatattaaaatagtaaaaatattacacaaatatattgagcaggctctataaacatttaaacatcccagcaacaaaaatttacgaaaaataccttttactcttaccatttagcagcacataccactttcattaataatgacacctttcagtaaccaaattagcagaccaactgagaaaccaagccagacggagaaccaccattgatttcgtttacttcacctaagaagaaaaccagaatcaatccaagcacatgttgtttcatattgatgaaaaaatgtggagaaaaactagttcaaaattgattgaaattcaaccctggattcattccaatttaattcgcagaaaactaatcctcctaatatcaattttcagattcataaaaagtagatctccaacaaatagatctggagcttttaagcaatccaaatcaggtataatctaagaaaatgtatcaataatataactaaaaatttgtttcattatatttcgttgttttctaaattttgaataatgaatttgttcataataaatcacgaatataaagtgaattcacatgtagatcgagtcacgtacgtgcaaacactattttggttttttatatttcagaaatgttgcatcacagttgcataaccataaatgaattttcaaattctcaggtacatgacacaattccatttcccatgttttacaatggatattttgataagggaatgaattatgtaaattacgaaatcagtggccaatttatctcaatgagctgcaaatatgatgaactagtacacaactagaaacaagcggtggaatgcaactaaagaaatattcaactgcaactgaaatagagagaagacatttatttgaattccttaaatttgtatgagaactcttacagcatgaaaaagctactgtgatagattgctattaatttcccatactggaattggttttttttttttaaagttacataacaattgctagatagttgtataccatgttcaaaatacattgctataaaaatttctgctgtattagttttttatgagttgcataatatttttgtttacgttgtatgccaaatcaaatatatttaaaatttcattacaagttcataatactttttgtgtcaaattgacgcgaaagttaagaattcaacagttgcacaaatgataaaataacactaaacaaaaattacactacaaaaacattaaaattaactaaactatctaaacactagaataaaattaaaagaatattcacaacccaaaataaaaaaataaaatcacaaagttagg

SEQ ID NO: 42959 - DNA, 4745 bp, Cannabis sativa
  modified_base (4633)..(4640): a, c, t, g, unknown or other
atttaatacttataatttttctattgattttatatttaactctgtcaggaggaagtagatcataaattcataatgacaatcccttgtcgaatgtttaatccttacggaagatttatgagtaccaatgagaatttttttgtttgtttgtttagaattccatatttttgggtacacgtgggtagtagagaagtcgttactcggtaccctgatcatgaggtccgacttccgaggtttaattaattcttcataggaatctacatagtgagatattagagttccatgtttcttggaagcaacatacattatacttcaactccaattctgggttttagcttgtctttgctgaggatccttttggttatgcttatatgtatttatttatttggcagggaaacaattgattctcacataatatctccaaactttggaaatcttgaacatgttcggagtattatatattcaagctttggcggtcatagtaaagctagtttagattccgaaaataggcttcctctgctgtctgatcgaatttctcaaaaggatgactctggtaggatctcaagaacaccatcatcatggtcagataaaactcaagtaaataagcagctgactggtgaattgccaattggtcagggatgcagcttcactcaaactgtctttaatggtgagtaatctcttttattgtactgctattcaacactaatctttgccacttttttgttgtgccttttgacatttggttacttgcttatggtatggggaaggattttaaaagaaatgagaaggaattgaaagttgaggtaacgaaaggattcagcaaaaacttatgttcagaatatgcaagttcaacacatgaatgaatcgaaaagtgaaaccctttaactatttctattccaattaagtattagcaaaagtagctttcgtgattgaagtttgatgaagattgcttaaattctttttatcaatggggatcatacttttgtataaccttttcaggcttgttttactctcttattcggttgatagaaagactttaaatttgtgtctgtaattaaactgcatttcgaactttcatgtgggctgtttgtgattgatttttcattatggtatgttttacttggtacaggaattaatgtaatggctggtgttgggctgctctctaccccgtttacagtgaaagaagctggctgggcaagtttggtagtgctagttctttttgctgttgtttgctgttatacggcctctcttatgaggtactgttttgagagcaaagaaggcattataacataccctgatttaggagaagctgcattcggaaaatatgggcgtttgatcttatcggtaagtcataagtttacatggttatacaaatttcattttattattggtagcaaacagttatttcacttattcttgaaacatggttatacaaatttcaattattataggcagcaaacagttatacaaatttcattttattattggtagcaaacagttatttcacttattcttgaaacatggttatgattcatgtctagttagtatgttgcttgcaaggagacggtctatttttactcgcatgttgtgtctgtcttatccattgtgtaagtggcattgaataatttctatcatgttgaatctttggacctccaaatatgttccatttgctaaagtacttgttaaagataacatcctggactttgaaagggaaagctctagtttattataatggatatgcagatggtttgctccttgtcatgtactgatggtaattcatgttttactcatgctgcagatctttttgtacacggaattatatgtaagtgaaacattgactcagaattttacagtagtctctaaccatatgtcatggatcctcatttttaacaaagttccttttttatgattgcagtcttattgtgtggagtttataattttggaaggagataatcttaccaggctgttccctggaacatccttcaattgggctggtttgcagctggactctgcacacttctttggaatattaactgctctgattgttctgccaaccgtttggttgagggatcttcgtttgatttcatacctttcaggtatagcagacatccacagatccactagtactctgttacatgaagcctagaaaaatataaatgattcccagtgcagtttcctgattttttttgtttcaattgttttggcagctggtggggtggttgcaacaattttgattgttctgtgtgtatttttagttgggactgatgatgcaattgggttccatgaaactggtgaagtagtgaaatggaaaggcattccatttgccgttggtgtttatggtttttgctattctggtcattctgtgtttcctaacatctaccagtctatggcagataaaaagaaatttagtcaggcactgataatctggtacagatcatcatgaattgtattgtagacattctcatcttacttttgtcttatcttctgataccggccacttttctctatgatgcagttttctgttgtgcgttctattttacggaagtgttgcagtcatgggatttctgatgtttggtgaaagtacgctgtctcagataactctgaatatgccaagagactcgatcatctctaatgttgcattgtggacgacggtaagtatgagtttgtgaacttcttttaatttcgaaaaaacttgaaatgattttatacaaggttgctgaacttattttcttgtgttacaggttatcaacccattcactaaatatcctttggacattatatttgctgtcaataggaaatagtgtcagctcttataaattgatgaattcatttacttctaatatattattccttaacacttggcacgtatgctctcttattgaatccattggcaaggagtatcgaggagctattgcctccaagagtttcaaacagtcccgggtgttacattcttctcaggacagcacttgttgcttcctccgtttgtgctgccttccttcttcctttctttggtacgttttagacttgagattccagagcacactttgttgtttctacactttccaattttgttcaagacagtacttcaatacttaatgtcaatgcaaaatatgtaacaaacttaagttggcatgctatgttaaatgcatttcatagataaatgtagacatgaaatttagcaacacaaaatccgggtctaacaactttaatggtacctatatttctcccctctgccgaggtagtaggatataattatgaacatcattgtggaattcatttccttacatagaaaattacaatttatttatttatttatttttgtgattgcaggtcttgttatggcgttaataggttctctcctcagtatactagtggtaagcatacatctcgatttactagttgcatactccgagtacattaattaccataacaaactgttgctacatgggggagtgctctttcttgaaaagctttttgcttaattgctgcacttaggccatctccaatggctacactaatttggtgcaccgttggagatgctcttaagaaacgagtcctttcatatcatggaaatctagattttgcaatttttatctgtgcttgtcttctaattggacgatcatttagttaaatataagattaaaactccccactactacaaaactttatatgctggttttttcatctttaagttacaagactgctgaccggtaattgttccctgtcgattttatcttagtcaaggcacacacaagtacccttctatatgcgtaggcaattgttttgctgacctgtaattgctcccatatcgttgatttatcttagtcaagtcacacataagtacccttctataggaaaatgttccggtgattaacaatggatgtgactttctttcaggcgattataatgccagcattatgttttgtgaagatcatggggaaaaaagctacaacttttcaggtaatcagaccaggaaacactgtttctattttacttttcttgcaattgttctaaatttgttctctataaatgcacaatcaaataagatcgtagcgaggtgaattaagccatattatttgtcaagccagattattactaaacaaaaccagtaaataagataggcagcctaacaaatggtgtcatatagttattagtttattaagtattaggtttcatataatttaatgtaatcattttttttagaatccatttgtaaagcgccgcagtgtctaatagcaacgccccttcagatattatacagtgcacatttctcaatgttactgaaaacatcatctatatacacgtgaaaaacattaaattatattttgtgtgttaggatgttgttaattttagtgtatatatatttattattttttattgacacgaatgtggagaaataaatagtgaaatagttttatgtattgattatgtttatttaattttgtttatctggtttgtttgcatgatcagatcgtttcaagtgttgcgattgcgggtttaggcatcgtatgtgcgatcatgggaacatattcttcactgttacaaattgtgaagagctactgaaacatttattttgttgatttaaagaacagaaattagctttctatacgctctatctttaattattattattatnnnnnnnnttattattattattattgtttcatcttcctctgggaatattaaaaagaaaaagaaaaagtcacggttactaataaataaaagaaaagattttgtggtttaaatat

SEQ ID NO: 42960 - DNA, 5829 bp, Cannabis sativa
  modified_base (4971)..(4971): a, c, t, g, unknown or other
  modified_base (5452)..(5454): a, c, t, g, unknown or other
ttatgtttgtggtacaggtcttacaacaacagactgaagcgattgctagacttggcaatgttttgaagagagatatgagggacatggagattataatggccgaggacacagatatgatagatgattaaagcccctaagcattttggctatagttactgatgctattttgtatgttttcagtcacttgagtcggctataagatcagccagcggtgtcatgtttgggtggtctcgctttgagagccttctaatttttggcatgttggtttgagaacggaagagtatgcaaagacctaaggaactacaatgcaaacactaacatgtttgctcttgctcctagcagtattaagctgatcatccgatgttttgatggattgggcctcattgcctcataaattattgatcacctaaattctagggaaagacaaaagaaaaaagaaaaagttttgacataacatgcaaatttaattgcacaatatgacattttttattaagaaaaacttaaaaaaaaggtagtgaatacaatttagattttactatagtgactcgtagtcaggaactttgtctctaacattgtactatgcaataacttttttaagggtgtaatcataagctcgtgtattaatagctatgcacgtctatcccagtatagtgaacgttttagaaattttatttgaaatttgataagaagcaactctactcccacattgtcataggtgagtctatcaagaatattcttgtagctttgtactccagtccacttgaagtatagatctcattaagagcttctatttactcagccttaaatcgttttaggaattcatgtttctcttttcttataattatagcatgatcttagttttatcacttcataacttattattatccattgaacctattttttaggatctctagtctataggtcaggttgttattctgagtgatttatcaatctaagggcaatagtcctattccttttgatgttttaaggactttctctctagctaaacatttcgtcaaaggataggttaatatcatcatacatgatccactctaacggctcctgttgagagactctctaacaatactgtgcttatgacataatttattgtcttttgcaatagctgtggtactatcgcaataaatcaacatatctgaaataggtctttcccataaaagaatctcagctagcagacttctcagccacccagctttttcactagcagtagctagtgcaattatttcaggctccattatagattgagccaaaatagtctgtctcttaaatttccatgaagcagctccaccaattatggtaaaaatatagccattggttgccttggagtcatcaaataaagtattccaattagcatcattgtcaatgttttttttgaggtatctcataaccctttcaatagcattccaatgctctgcacatggtctactagtaaacttgcataataattccacgacataggcaatgtcgggtctagtacagtcagtggcatactgaacactgccaatgatgctcgcatattcagattgtcttacaccatcactagtgttcttaaataattttacaatgggatcatatggtgtacaagcaagtttacagttaaagtaattatatttctttaagatcttctcaatgtagtgagattgatctaaagaaattcccttttcagacctagtgatttgtataccaaggattacatccgcttcacctagatatttcatatcaattttttcacataacagagatttcactttgttcacgacatgaatatttgatctaaaaactagcaagtcatccacatataaacatatagtagtacaaacgttatatttagatttatagtaaatacatttgtcacttttatttattttaaaactgtgtgagatgataagattattaaatttctcatgttattgcttaggtgcctgtttcaatccatacaaaaatttatttaatttacacactttatgttattgaccaggaacaacaaaaccttcatggctattaaacgcttgattactattgtcgtgcttcaggacaaagccttaatgttgataagccagtcctttctttctccccgaatactttacctgccatccaaactagcctacatcagattttgtagatggctatcaagccttgccatgagagatacttgggattaccttcatactcaggtagggataaaaaaaattttgtttggagaaattaaagataagttatggactctgctttcagcctcgcaacagaaattgttttcaattggtggcaaagaagtacttctcaaagaaatagctcaatctatccccatatgttatgagttgcttttggtttttgaaatctcttgtcaacaaattgagacaatgtgcaataaattttggtggggttctaactcttcatcatctggcataaattggaaaacttggaaagctctcactcatttgaaagttgaaggaggagtgggatttaagagtttcattcatttcaatcaagtgcttttggaaaaataagcatggctaatattctccaatccaaattctctactaagccgagttctcaagccaaggtactttaagaactcgtcttttttggatgcggacttaggttcttacccttccttaacttggagaggtattgtttggggtaaagaactgctgtcaaaaggtcttcgatggaaagtgggtaatggtgccaatatttttggtgcaacggatccatggctgccaagaatcacatcttttaaaccagtggtttttaagggccacaactcagcaatgagagtctcagatcttcttttagataatcgacagtggaatcatgagctgctatcaaatctatttttggattcttatgttacaaagattcaaagcataccttaactctctttgaacaccaagatgaattaatatggcatcatgaatcgaatggtatttactttatcaaaactggttattcccttgcaacaaaatttgatgaacaacaatctgctgccagcgatatacaattgttacaatggtggaaaaaattctagactttaaaacttccatcaaaaatttgaattttcatgtggcgtgctatccatgcttgtctaccagtcgccaatattcttcaaacaagctatatttttgattctgctcgatgctccttatgcaacacagataaagagactaaatcatgctctctttttctgaaaacatgcaaaaaaggtgtgactgtcctctggttttgatattcatgagctttcaacttatcacatgaatcttaaggaattcttacttcatgtatctcatatatggtcatctttacatcttgaacaatttgcaacaatactttggagcatttggacagaaaggaacaaagaaagacatggaactaaaccaaagcctcgtgaggttattctctattatgcaatctcatacctagaagagttttcacgttgctcgtaattttgtcctgttgtttcctcgaaccgtgttggagaatctcagacagagtatgctcaagatgccacctggttgaatccccccacaagccgcctgaaattgaacacagatgcggttgttaatgcagctaatcaaacctctggttttggtgctattttgcgtaatagtgcaggcaaaattgttgctgcaatgtctgccccttttcgaggttgtttctcaccagttgtcatggaagctttggctcttatgcatagtctacaatggctcattgatcttcaactacctgtgcatttaatcgagactgattctctcttagtagttaattactttcctcacaagagctagtttcgaatttccattacttgttaaataacattaatcgtgtagtttctaattttcctggagctcaagtctctcatgtgtattgatctactaataatgttgctcatttgttggctaagttcgctctttcggtgggtactcaatgttcatggttggaggaaatacctcctctcattatcccctttgtattacgacttttgttttaatatagagacattttatctcacaaaaaaataaataaataaagaccataaaaaaacaaataaaaattgtttatggattttggtgataaaattttaatatttatagagaattttggaaataggaataaagctattttttttttatgttgtttgtgtaattatgcgcgagaatatttaggacaactttaactgttgttttagtttataacttttcgacatttaattgaaagacaaatgctcatgagttttcattttagagctgtcatcaatacatgcctggaagattttcacgggccaaattcgatagttgcagtaacttgaataatcgtattttgaatgctgtcatggctgctacgttgtatactcttcggaagaataggaatagatgcattttttatctttgttgtgttgccccaagatgtttgagtatggaagttagaaaaatagttcagcttagatttttaaacaagggtccgtttaaagcttgccaaaaaaagatgtatttactcaatgtaattaaaagttggtagtgttggggggttagtggctactatttgtagcaactactgccgttggttgttggtgtggcattgtacctttgtatttacttgatttttgaataaagttttttctttttcaaaaaaaaaaaaaaaaacttttcgacattcaaagtgggagtacgttattatttgctgatgtgtaggtaaccttataattgtaattagtctctttattatgtatagtaatgaaaaaagccctaaaaaacatctctcacaatttaaacatttagattttggtttggcacaataaacaagttttcattaatgggagggaggtgtgttgacgcaaaaagaaatttcaaataccccaatgacgattggccttttaaaattgtgtcaaatcaaatttacaacggggccttgacacgcaataaacatagagtaagttaaaaaataccacttttattnatcaattaatcaaatttacctttatttttatatttatttgaaacatacatctttttacgtgtattgtacctaaaataccctgatataagagagtcacatggagagtattttgaagtgacaggggcaaaattgacataatgtttaaaaaaagaggtaaaaatgatagattttaaaaaaatgagtaaaaataaaagaggacaatataaaaagagtatagagtgtaattttctcaaaacatataaaaatataagggaaatttataaaaatactgaaatttaatttaatttttacaaaaatactgtcacacgattttttttttaaaaatactatgtttttataaaacgccagtagaacacaaaacaacagtagaacaccaacgaaaacttaacacagtatactgcagtttaaaacttataaaaaaacacggtaaaaaagtaaaaaataccacctgacagtattttgtaaaaaaataacaaaagtnnntataccatgtaaattttctaaatataattgtataaaattttaaatattttttaacaaaaaatttatttaaaacaaaaacatacaatcttttaatatttttatataatttttataatatattcttattaattcattgttttatgctattagttttttgttatttatacattattttttttgttatatttatatatatatatatatatatatatatttttgtagtttttgtattacttttatagaacacgtgaaaatgtaaaacaaatatttgaagctaaaggtgcaaaaaattcagcaaaaaaaaaaaagtattttgtgtaaatttttctaataaaaattggtgtcagcaaataatttaagaaaattaaaaggaac

SEQ ID NO: 42961 - DNA, 3491 bp, Cannabis sativa
tgttcattgataaaaaataatgaccatagatatagtacaaacacacaaactaggaatccttcttcggataattaccacctaaaaccaatctacaaagcaaagaaacagggctgacaatctaaaattatatacgaacaccgtagcaatagattactggtcatgggaggtaaaagtaacttcatgcaaaaggggcgttttctatgtcttacgcaggcacccaacatgaggaagcacaaagaatcctacccttccaaccctgaagcatccagttgctatcttcttcaactacaaaatccctgtggtacccatgtttaacaatagacttcattctcttcacaagctccatgtccaacgggagctgcctaaaccctgctcttgtaatccggagctgccactgcttgtatgtttcaggtctctctactctttccgaaccctcacatgctatgacattcataatctcccgcccaagaatatacttctcgaatgagagtctcaattgatcctctctggctaaaatagtatcagccccatcaagtaatgagctgaagaaaaatagtgtttcccggaagcgcgtaacaaagaaggggacattgtatgctccattaaaaacagcatgagcaaaaatgttaggcttgatcttcctgatcaagtttagaacagcatcccttggactccttaccgcagctgtctcatctaaaatgctcctaaatctgtgtagacaattcactgcaaggacttcatttctatcaattttaaggtcctcaatttggacattttcccattgttttgctatgccgttgtactcaaatggaacaccaaaacgctcacaatacttagctaagacacttcctgtttcttcgaccattttttctggccgaaaaccatgttgtgggaactctatccctgtaattcgaagcttaggtggcccaccaggccttctagagagactttgtatgaaaacaggccactggtaaccatataggataccaaaatctataatatgcagttttgtagctttctcagctgctttgaaaatcatttggtttgcaaagataattgaaatcttcttgtacgggttggcagaaatgtaggtatgataagttttcaggagaatatcagccggtaattttgtagcacccaaagtgtcacaaatctcttttccagtgccatccaatcgtgcttcaagggcatctgcgaataaatggcccaatctctgggttccatcaccaaatggagacgaatgcttcctaatcttctttaatagttcattagcattcctaatatcattagcagaaacagcttgtgcacacgaaatcaacaaagccaacaagtctaccacttccttgtcattgtttagtatcttagtcttagaagcagttttaccactattagtagttccatgagatcctccctcttgctgcctagaggagctgtctacttcattattttggtaggattcatcagatgtaccagaaggagcttcctgctcctcgcgaaaaagtaacaccttgtcaaacaactctgatagccctgtgtcatctgtagaaactgccatttgcttgttgcttctaccatctaccaaatctgtatcctcacgatcatggttcttcttcttctctgtcaatctgatatgcaattgctctctcttcttgtccttttttacctcaactaactcatttgagaccttctcatttgtatatggagacatgttcttattgttttccattggaaaaccaagttgattacctttgggaagaaacttattgccctcctctaaacctctcttgaactgcaacatcaactcattctcactcaaaaaattctgaagctcacccagggaagtacctattttgtaagtggagtttgcagaagattgtgagctcgaatctgaagtagactggttttcaaacttagctgaaggtcggtgtgccactgaatcaacagaagttccaacagaatgagtcgagttgccagtgctggaacaagaactagaactgatatcttctgagcagtcactgacacttgttgtgaaactatcatctgagctttgaaaattttggtctctatattgaggttgttcgtgttcatactcggatggcggatacttttcgccgagagcctcataaaaggatttctcagtagctataagagctgaagggtcgtagaacaaagagggctttgcctccatatcctcatccataagcatttggtttatgtaatcaagagcagtacaagaaaactcaccgtcattaacaagagaacccctctccgagctcatgctcgggtcaaaactatagtccataataatctcactagctctaatatcgtttatgctatctgggtattgatctaaactaacaatgaaactcaaattcgataattgagcaacatttccatcaatacatatcaacaatttaaccgattttcacagtaaccaaatcaatgaaaacttttaatttcatagtaataagaaaattaaaaattacaatcccgaacacaaacgcaccttccctgttgagaaaaagaccatagaagctgtaaaagtcaagcttaactggtagtcgctaactctggcgccgacttcgattaccgttactggagaagtgaaatcgccagggatcaaagcaagaagaggaaaaggtttagtgatgaattgaagagttttatattgatctgaacacaatttgggaatcaatagagtcgtcggagtcaaagtcgatcgttgcagagacaacagttcaagagctgcacctatttaaagttgattccccatttataaaatgacacgtttttctcttattatttcaagagaaatactaaatagcactagtggtggccactgttcgtatcgctatgggatgaactaagtatgaggttttacataattaaatataataaatttagagagtatcgctagcaatcacaacgtgatatgtcaagaaagtactagtacctaataacaatgttatatttccaattaaaagcaatgatttatttttttgaaaaaaaaatattgattggtgtccactagaaggtttttgaggtataattttgtaaaataatgtttcttttaagaaaaaaaattattttattgaaaaatcaatcaatatttcaatcaccaatattcaatataaacttagataaaagaaaagtataaagtggtcacatagctcattaaaattactctaaattagtaagtaaatcgtgtttcgcgtgtagttgtttataaaaaattttaaattgcatatataaatattaattgaacaattaaattataccaaataattttaaatatatttttaagtataattaaaaattatgtatataaagaactttaagactatgtttgaaataatttttgtgaaaaaaaaagtaggaaaagtatcgggaaaaaatgtggaaataaaaaaaataataaattctcatatttggtatggaaagaaagattggaaaacactcaattcaataaattttcatattaagcttaaaaa

SEQ ID NO: 42962 - DNA, 2306 bp, Cannabis sativa
aaaaaaaaaaaaaaactaatgtggctattgtttacgtaccaaattaagttacccaactttgatattaacaaaattatattttccgaacttaaacttttgtactttaaaggcacgatttagtatacctcaaaattacaggccaaaaaatcttaattagcctaatattaatatccaaattggtcccaacaataggtcatcatcatcatcataaaaagaaaaagaaccccaaaagattcaataaaggaaaccctttttacagaaatatcctaataattaataaatgaaaatgaaaggagagtaaatgaaattagaaaaagagaaaaactttaccaattctgagagaatcatgggtattcttgaagagaaacatgagcaaacgaatcgttctaaggctaaacctttggtacccagaagaaagtgcttgctgcaactcattttcatcgatgaatccacttcgatctctatccactaattcaaagctcctaatcacatcaggactcgtcccttgtgggaatttcccatatgaattatagccgtatgaagaattgggttgatgggcatggaattggggataagaagaaggaggatgaggggtagaattgtagtaattttgtgattcgttggggagagaattgggttgatgggcatgaaattggggataagaagatgaagaagaaggaggatgaggggtagaattgtaactttgtgagtcgtcggggacaggaggagcggaaggagtgtatgatgatgattgagaatcgaatctttggaaagatgaagccattttaatggaggagttggaaaattcagatgattaattttgtataaagatcaaaactttatatcatatatatctatatgagattgagattgcttagtgtgtgagtttattaatttacgcggctatttcaattatcattatcatcttctccttgaatgttacttcttccttccactttctattttataatgtatatttatggagaaattttattaatatttaataaaaccctaataataaaaagtaatattaaattaattttttataagagttttttttttttttttttggctaaactagaaaaatcctcctaactattaaagtgcttgtaaattggaaatattatccattttttttttataattaattaacaacatagacggcttatgtgtacattttgtacatgtgtcaaatttatattgacacacctaatattattattttaaaaaattatttaaatataaaaattatttcaaaatttataataatttttattttgtttaaatatttatttttatattttataactttatttaattttaaaatgaattttgaaaataatttttaaataataatattatgtgtactaatataaacatgttatatatacaaaaatgtatacataagccgtccatagtaacagttaacataataataccttaaatttgctattaatttagtagtttgaaaggttgtaccgccaaaatttgagctttgaaagttaaatgcaagtgaaacaataatttagagagtttagccgcaaaaaaactcttttttatttttattttgttgtaattgtacctttaagtgctaattaaatttgttaaatgtaaaattacatataagtaggtttttgatcagtttatactacatgttttttaatttaatgtaaatatcgagctgcaaaattttaagtgtaactcatccaattaaaaaaaaatataactcgaccgtcattgacctaagtgatttttttagtttcaaaataaataaaatttccacccataaaatattaaagagagaaagtgtgagaggtcattgggtttttttttttataattatattatataatattatttatgttataataaaagttaaatattaaaaaatacaaaactgaaaatggtatttttttttttgtaaaacaatggtatttgtcgggttaattcaattaaatcgagtttattaggtgagttgtacttatttttaatttgctcaattcataaattggactgtttataatttggtcaattttttcggtttgtgttttttattgatgtttttaatttagttttgttgggttattcaaattggtcggtttatgaaaatttttgtacaatcctaattaaaagtcaactcaaaaactcgtagtcgtagtgatatattattggactacgtattaaaaaaaataatgtcaattttactttttttcttttaagaaaatcattttaaaattttacacatcattgatctacgatttttaaaaaagattgccacaaagaagttagggattttggctttctgg

SEQ ID NO: 42963 - DNA, 6247 bp, Cannabis sativa
tggtatatgcgtatatgtatatgttcatatatgaagatataaagtccttaacagaacaaggtttgatacttcatgatatcttcgtaattttaaaggtgttgtgatacttttttgctgaaataaaaatttgacagaaagaaagatgagtgccagaaaagatgagtgctagaacaagactgatacatcattgggctgattggtggtatcaattagttgaacaaacacatgtttggaacgattggagttgcttaattagtcattaattttttatatatttattaaatacagaagctcctgaatccggataaaacagagccggtatgatcggacccgcttcacaatctatgtcctaactcctatatcttagtaggacaagaccgaccccaatctatcttaggtaaaaatgtttttgtttcaacacgtatagcaaaatgacatacagattaaccgaaggggaaaataaaaaacattacaagaaaatcattctttgctgttttcagttatttacaacaccatatcttaaaacagtcagtcattggcaaccaaaacatccatagaagtgttctccaatttcttgatgcgcaatctactttggggaggaacgcttttggctgatgaagatgtatcaacatcaacaatgacagtgtcgtcttctttaaaatcacctcttagaactcccattgcaatttcattttccaccagctgctgaatcactcgctttactggcctcgctccgaagttgggatcaaatccaagcgttcccagaagctcaacagcttcatctgtgtagtgaagctcgattttcctctgtttcaacctctccttcaaccggtttatctgatacacgcaccaacaacacacgagttaaaatatttgccactgacagaaaagaataaggaaaaagaaaccaacaattttacctgtatctccacgattttgctaatttctttggaatccaaaggctggaagacaatgtactcatcaattcgattcatgaattctggacggaatgtttgtctagctaactcaacgacctgtttcttcattatgtcatatactgcctctttgctatcttgagtgttacgtagtgtatcaagtatgaaatgggaacctatattagaagtcattataacaacagaatttgtgaagctcacagttcttccctgagaatcagttattcttccgtcatccaacaattgtagcaaaatgttgaacacgtcatggtgagctttctctatttcgtcaaagagtaccactgaatatggtcttcgtcgaaccacttctgtaagctgcccaccttcttcgtagcccacatagcctggaggtgccccaaccaagcgtgaaactgcatgcttttccatgtattcactcatatcgattcttacaagagcattttctgtgttgaagaggtaaccagctaaggtctttgcaagctctgtttttccaacacctgttggtcccatgaacatgaagctagcaattggtcgattagggtcagacaaccccgcccttgatcgtcggattgcatcagccactgatttcactgccatgtcttgtccaatgactctcttgtggagaacctcttctaacgaaactagcttttctctttctgattgttgaaggtttgacaagggtataccggtccatttactaacaatttcagcaatgtcaagatcagtgacctcttctcgaagcaaagattgccctgacatctgaaattcagaaaggttcctctcagcctcttctaattggcgctgaagagaaataagtgttccatatttgagctcagcagcacgacttaagtcatattcacgctcagcagcctccatctctaaattaactctatcaacctacaaaacaactcacaataagttcaaaatcaaataaaacatcctaagagtaaccaaaaggtaaatttacttcaacatctaattttacctcttctttaattgatcttattcgagtcataagcaccttctcacgatcccattgttcacttaactctttctgattttgtttaagcaatgctagatcattttccaacttacttaatctttctttggatgctttatctgtgtcatttttaagagataacttctccatctccaattttaacacagctctatctatctcatccagctctgtaggtttggaagtaatctccatttttagctttgcagcagcttcatcaacaaggtcaatggctgaaaaggaacaattgggttgcaaagagatgtaaaactctaaaattctttaatagagatgaccgatcgaaatggaaaaatgaaaatcatattcagatatccaacatataaatttaattttcatgaaaagttgaaagtttttcttaaagatcatatcattgaatagcccaagttagaaattacctttatccggcaaaaatcgttcagttatgtatctatctgcaagcacagcagccgaaacaagggcactgtctgaaattttaacaccatgatgcagctcatagcgttcacgcaatccacgaagaatagatattgtgtcttcaacagatggttgatcacaataaacttgttgaaacctacgttccagtgcgggatccttctcaatgtacttcctgtactcgttcaaagtagttgctccaatacatcgaagctcacctcgtccaagcattggttttaacaagttcccagcgtccattgcaccaccagtagcccctaaatattgtcaacaaacattttatatcaatataatgatatatgaaggcttcaacgttgcacccaaaatggctgcacccggtgcacccatcgtttttttgacttcaaaataattaattggccaacaacccgattgtttttatatgatagtatatattgtaattatttaacaatcatacgaatttttggaaaattctaaataatttacattactgaaacaacatgtttcacacgagcataaaataataaaaactcatgcaacaaagtatttgaatcatgttttcaggtaaatattctaaatatttaaaaaaatatatgtagaacattctaaataactaaacatgtagtatattctaaataactaaattatacaccgccgttataacaaattggaattataactattcacctaccaaaaacaagaggtgatgcaccaatgcaccccttcctaggaggttgccctttagaatttcccagtgatatataacttgtaatgacggtgtgacacattcaacacattataaagcatcatgaataaataaaaaccgattgaaagttcccaacatttcacctaatataggcacgcacctgcaccaacaacagtatgaatctcatcgatgaacaatataatttggccattggaagaagtaacttccttaagaacagctttcaacctttcctcaaaatcccctcgaaacttggcaccagcaagcaatgaacccatatctagagagattaactgcatagtgcaagatttaattcaaaatccttgaatacgaatttgagcaaagtaaactaaagatatatagtacacacttacagcttatccatactccaaaataagtcttaaacaaacataagtaaagctttaaaacaatgtcaaatgaacaagcaactataataactatacatactaatcaaatagtctcggaaatgtaaaaagctgaaaatgtataaaagaaagcagaagcatagatagaaatatgagttcaattattaagatgataacagaacaatcaaaattaactatatattaatttatattaaactatttggtacctttcgatttagcaatggttctggaacatctccacgcactatccgttgagctaatctaaaataaaggataggaggattaagtgattttatgtacgaaagtggaaattttgatattttaggtcaaattaatagcatacccttcagcaattgcagtctttcccacaccaggctccccaataattacaggattattttttgttctcctagataaaatttgtatacacctccttatttcatcatctcggcctataacaggatcaagctttccacgcctagcaagctcagtcaaatcacttccatatttttctagtgcctcatattttccttcggggtctacaagtgtcaaaaagacgcattaagaaacaaacataaacaaaagttcaaaatgtaacaattcaatcaatcttactgagtaaaatgtcaaaattcaaaaacattacacgtacaaaaggtaattacatactttgatcagtaacccgctggcttccacgaacagctttaatagcatcttttaaatccttttcactaagttgtagtgtcttaaataattgttgcccaaatctcttatcagagtgaaaaaccaacaaaagatgctccactgaaacaaaatcatcccccatttctttcttacacttccgagcattgtccaagagagagcctagatttgagcctataatggggccactagtatcccccgttacctgacaaagacaaacaagatacataaccaaagttcctacactacaaaacaaacaaaaatggtcgaaaaaacccactataccttaggttgtttagatataaaatcatctgtagcttgaagaaccgaagtgttatcaagtccagcccttgtgagaattctcctagccaaaccatctttttgctccaaaagtgctttcattaagtgctctgtctcaatcacctgttgcttgctgactcttgcagcatcaactgcacccacaatgccttcccaagccatttcagtgaactcattttgactaatctggacaaatttcaataccacaaaaagtttaatcaactttctaccatttctaataaaagattcaataaaaacacaattttactctaaccccatgttacataaatatactaaattttaaaacctgtgaagtagttgcagaatagaaagacggagcagaagagtgaaacttgcgagtaaagttgattgaggatagctggcaagaaactatgtcattctggttggcgaagaataaatcagcaacacaagaccgatgaagagaagtgattgaaccacagagtgggcgggcacaagtgactattgtacgagactgtaaaagagagtttcttgcattgatggttaacaaagccgactgggcgagccttgtggctttcctcattgccatctcgacaatcaacagcacctgcaattcaaatggttggttactacacattactaactgattatggaaaaaaaaagtgtaatttgtaaaaagtgcaaaacaaactcactaactctataaaaaattcttgaaaattttaaacgaaagcaaactatgatctaacaagcagtccgagcgaatgattgggcatcagagaaaaaggcattccagaattggtaatagccaaaatgttaaggttaatcgattttcttaaataatcaaattccacaattatcgattccagttttttttttttttaatagttatagagaacaaatattcaaagtaaaatttcctgcacaatcatatttgataaatttgaaccacaactgtcaagagcaatattcaagacaattatccataagagcaaaccaaactatataaaaatgttcaaattaacagcacgccagcaaaatagataatcaaaacatgaaacatagtcatatcaaaaacagattataaaacatcataacacctatccatatcagtaaaacaaataagggagctgagacactgtgagaagagaaacagagtaagaaatccaattgagggtcagcaatgcagtatcagaacaaaatagaattacaatgaataaatcaaaattgaaaataatacctgcagtttagagaaatgccgcagacccaagttaacagaaaactgtacagtgtctgtaaggtgaaggggcgagagaatcacatagactagcaggaaagatcaggagagttagtgagttgagagagagagagtccggcgagtggtgaggtgtgagagaaagcggtggaagtggcggtggcagaagggaagtaatattaagattaagaagaggaagatgaagaagcttggggaagagggcaatggaatgttgtagaagaaactaactaatggctttcgcactttcttcttgattgttctgttctgttctattctattctattctaataaaactttgccgttgcatttgtaaaacgtcatgtcgtcgaccagaagaggagataatgaaaagtacggaaatgcgagttaaactcaacactagggatgcacattttccaggatggcccccgcgaacctgcccct

SEQ ID NO: 42964 - DNA, 5269 bp, Cannabis sativa
cacagcacagctacagctgttttttctcacagcacaactacatctgctttttcccacagcacaactgtgccaaactggcccttaatattttgtttatttataaataaatgatcaaaatacaattgtaaaggtattttatagttaaggcataatttttataacagaaaaaaaaaaattaaggaagcgaaactctataagaattatagttcgggagattaatatttattctaataaaaatttaattacactaacaatagtatggcaagatatttttttaatgataataaattttttggtttgtaaatttataattctaaagtatatatattttcttagtttgtgaaattggagaaagtaagaagctaaaactaaaccccatattaattgggtaatgggtatggaatctctagtatggtcctatattactcatagataagagtaagcaaactatagtcatctatttttgtatataaatacaaattatgagatattccataaataatattttttacaatattttatatgaatttataaattatattattgacataaactattttccaaaaaaaaaaaaaaagaatatataatggtctatttttatcactgaaaattttaacttcctttttttaggtgtttaggagtcttttagagaaatattttcattaattatgtgaattttcatgaaattatatggtcaatatcctaatttaagaacacaaagccaactcattggtaggtggctcagcctcttttctataaaaatcacaataagtttagtgaatatttcttttaatatcactaaattttttttataaaaaataatggtaagtattaagtcctcttgggattttttttttttaaatatataataaaaccactaatttcaagcttcaaccttggtaatataacacttaacttacaagtttagtccttaccaaaaaaaagactaacaattttagtgaaatattaatcatttctttttaaaataataattaataaaaattaaacccctccttttaatttagtgagatgattaattttgacacaaaaaaaaaaatgcaacttaataaaaatgatttgtaattgtacttaggttggcatgacaatattatatgcaattatgcttagatgtaagtaataataataatttattattgaaaaatttatcatcattaattattagttctaacactccgatatgataacatgcatatataacaaatataatatttattattaattgaattaaaattacttaagattttggtacataaatgaaaaccaattgaaactaagatgatatatatgggtaagtttatattacacttcctaattaaatcggtgttttggtaaattttctatttgtttcatttcaacatttaaattagtttgttagtttattttttatgatctttttaaatttttcagaaaatttcaaataatttacaacactaaaaataagatttacatattttattgtatacacaattttttttatatacatgtggtatgtaactatttaatttttttttttttttgaaattataaattattcaaaaatttatgaaaattcacaaatgatcttacatagttacaacgtatgtttaaaaaaaaatattgctaaaagatatcactattctcaatattattggtgcaattaagtatttggtctcatataacttaagaaaatagtttttaagaaatatcgctaaccaattataagacgcaaaatataaaagatactgtacaccactagtgcttaataataatactaaaaaaatatcaaaacagataaaaaatctacacgaactaactctttaaaacggtctagtacaaaaatttccattatatataatacactcacttaaacatataactaatataatattatatactaattgaatataaatttattaagtaatcacctaacctaatcctatttttttttttttattaatttgttattatatatatatatattttatatagtctttcttagtgtgtggaataaatggtccagatcggtgattggtcaattttacatttgttgaacttggacacgtgattgagtaatttgtcagaaaccaaacttcattttattattattattaaattttaaactaattgagatttttaattttaaactttgatctctattaaattatatcttagaattttttttgaacgttaaaaattctctccgaactattgagattgttagatttaagaacttttatccattttcatttaattttactaattcggtgattatccgtgtactaatccccaaactttaatatttatcaaatcatattcctcaaactttgacatgtacaatgtactaaattatctcctttgaacttttattcatgttagacttttctaactagaattgggcaaaagatcttaaatccaataatctcaataactcaagagaaatttttaacgaccttaaaagttcaaagacaaaatttggtacatgtcaacgttcggggacaaaaatcctaattaattttattttaattttaaagaatattgtatataaaaagataatttagatttttatcccctgaactttaacatgtactaaatcattctatctaaacttttctggtctttaaaatttctccacgaactattgagattgttggatttaaagacttttgtccaatttactaaagaaaatcttacatgaataaaaatttaagagttcaatacatgtcaaagttcaggagacatgattttaaaaatatcaatgtttgagaagcacgtacgatttaattagtatatagacaattgtcatattagcaaaattgaatgaaattagacaagtttttaaattcaacaattttaataatttaaggagaatttttaatgacctgaaaagtgtagagaatataatttagtacatatcattatcaacgtttaaagagtaaaaatcctaaaaaaacctttataaaaaaaatcattaagcaacaaaatagattttcaattaattatatataagtaaagaataaacatcttttgataacataaaaacatagatagatgtaaacaccttataagtccaacaaattacctaattatcacaaaaacaaaggtaggtgattcataaatcataataataataattacgttatagagattcattgttacgttacaattatatatattatttatttaagattatatatgtgtaataaaattttgaattttttttagtagactcttaaaaaattattttggtaaattctttatatgtttcagtattaaaaaatatataatataatattttttttcatgatcacgtacattgtaactaataactatttagaatcatttatatatttttttttaaaaaataaattgtttacaaaatttaagtataaatagataattacaatacgtataaaaaaaataattgtacgtgtaacaaaatatgtaaatcttattttcactattgtaaactactcgatttttaaaaaaaaattctaagtggtcctaataaataactattacttacacgatcatgaataaattgactaaacttttttttatatgctgaaataattaaatagggagtctaccgaaatacttttttaaaggattgtacatttgtacgtacaataaacttaccctaattaattttttttattaagaaataacttgttttttcatgctcttgaaattaagatatgaactaaactgtcatacacacaacaatataatattaagtttcatctaaattaaatgtaattggtaagtaaaaaaattaccatattactttgtgtaatatttttatacatatttatattgtagaattagctgaggattgcaacttaaaagaaaaatattttagtgtttattttaagtgcaaattaatatcattacttgctaaatatttgactaaaaaaatacaaaattataaatagatagaatagaagagagaggtgtagtggactaaaatgattatggtggtcaaagatgtagaggatcaatatgcttagaaagaatagaaagaatactccaccgactacttgtagggaaattatattttattagatgaaactatatatatttatataatattattagatgtagatgattaatatatatatatataatattaatgaatatttggcattaattaatagttaatattatattttagacatatgataaattacccatgtagattactagattgcatctcatgctagctaggtaggttttcttcatgccattttttcttaaacaaattagtaacatttttgagtatataataataatatattcctattaatatattctctaattgtttgcgcctagtaaactctttctcaaataagatgaaaaaataagtatgatattccatctgtctaaatctcagctaaagaatgtacattgttagttgagaaaatgacagcaaggacaaaaagttagagctcgaaaaatttatcatttgtgagaagagttttattgatcaattcagtttcattgactatacattcatactaaagtcaaattatggtgcttctaaagaaaattcttaaagagatctcgagagttttctctagaagagacaagcagctttgcttagtccaggagcaatggcctgggatttagtgtgtaggcctaaaggagaaaggggtttaggcttcaaaaatatagtgaaatggaacaaagcagccatgattaaatatgtttggacaattactacaaagaaggataacatgtgggtcaaatgagtgcaccatgtatattaataaagaagagaatttgtgagaatataaagctcccactacaacaaatttaagctttaggggcgaccaatttagaggcgactttatgtcgcctctaataataggagtattaggggcgacaatacagtgtcgcccctaaaggaatctgattattttttatatataatttgtatactattaggggcgactttataattaatagaggcgacattgtcgcccctaataaaattgaaatatatttgttgtgtttgggcgggatttttcccgctaatagtattaggagcgacttttgtcgcctctaaaaatttaatctgacacactttatttattaggggcgacctttaggggcgacttttgtcgcccctaaaagtttacttttatatataaaaaaaccctaacatcttccctaaccccattatctattttattttttttctgcgttttttctttcactctgaatatcaaccaaaatactagaaaaaccagccacccttgctttgtgcgtt

SEQ ID NO: 42965 - DNA, 3062 bp, Cannabis sativa
acaattacaattacaattacatagtcacgtggagctatatatgtttacttggaaaagaactatttgtccaacgtgaacaagtataatagtggtgccaaaaagaagcaaaggaaaatggtattttatttcacatccatactgaattattgaattatgatcacttgaggacacaaaacaatactgtgacatcaaaaaagctagacttgaaatttttgaacttataatggagaatcattgtacctaatgaaaatatgaaaagtaaaagtggaaatgttcactaaaatgtaactttatcatcctatgtcacatcaagattgtcaatttatacatatattaaccaatcattaacattacataattaaaaacaaagcaagcaagcaaacaaacatgcaaaccattttagactatcatttaaaacgtattatgttggtaagtaactatattatcggattcaattgtaatcttcttctcatatacaaactttataattgtatatctcaactatattgtgttataacaaattaatttatagatatatgaacaattctaatatatgcggaataactaaatggattgaacacatataagaaatagaggatcgatattatgcacctccctatttaattagtggcggacctatgttggggcaagggggcagttgactcctttggggatatatatttttatgtgcgaatattcaccaaaagttttcccttcataaaaagactacagtttttcgaatcctacttcttacaattttttacttaaaattaattaaaattatgaaggtggagagagtcaaaccatggtctcattgaattggggtaaaatataacagctatgccaaagaaattttttgaaaatagatgttattaaaatatatttaacttatgccctgctagaaaatattcttggattgcgcctcggaccatattaataatgagtgtaagtagtgtaaatttttcaagctctcactaactctgtttttggtgcttatagaaaaataaatgtgcaaaaacatacttttcattagacaattaactattaagatgaaagtttgtgttgtttgtggatgtttattcataagtaattttaatccaaacaaaaaagaatttgggtagcgaacttagtatctatatatttttatgggtgagatattatatttgccacaattaatagtgtaataaataattaaagatgaccactgatattgaacattttaataaataattgatttgataacaaatgaagccttaacaatttatatgtatattaaattcattgatttatacgtatatatattaagaaatattcttatatattgtagttgtaaagtgtgcaactgtggttatgacatgggttctttcaactcccttgatctgataatgatcttaatcgttgccactgcatttcttcttggtgctaatggcaacaagctaactccacttcactactcccaaacatgtcctcaagcattgtccattgtcaagggcgaagtagctgcagctatagaaagcgaaacacgaatcggtgcttccttactccgacttcatttccatgactgttttgtcaatgtgagttcagctcataaccaacattaattgtcatatcaaaacatgatcgactactagtacttaatatatagggctttgagctttcgttttttcagggctgtgatggatctattttgctagatgatacggccaactttgtgggagaaaaaacagcagctcccaacaacaactcggtcagagggtacgaagtggtcgaccacattaaggccaagcttgagaaagcctgcccgggagtagtgtcatgtgctgatatactagccattgctgctcgtgattctgttgttcatgtaataaactctagctcttcttcttttcaaaacaaaaggcatgtgtccatgccattagtacttggccattcttttacatatggttagaaattataatcatatttgcagctaggaggtccttcctggaaagttaagttgggaagaagagactcaaccactgccagtaggagccttgcaaacacatctattccctcaccaatctctaacataagtcgtcttatatcaagtttctcttcacaagggctttccttaaagaacttggtagctctctcaggtactattagtccaacttattaccaactctccttaatttcaaaccccaagagatacatcctttaacattaattggctgcttcaagatagtgataatgagaaagtaattctatttgatgagttgcaggttctcacaccattggtatggctaaatgcacatcattcagggcacgcatctacaacgacacgaacaccatcgaagcctctttcgccaagtcattccagagaaagtgtccagcaaatgggaataacggtgacaaccttgctgaacttgatcaccaaactccaactcattttgataacctttacttcaagaacttgctgaaaaagaagggtcttctacattcagatcaagctctcttcaatgggacttcttctgttgattctctggttaaaagatacgcaaacaacaacgaggcatttttcaaggccttcgctatgggtatgatcaaaatgggaaacataagtcctcttacgggaaacaaaggccaagtcagagttaattgcagaaaagtcaactagaggaagatgttatagtttaaaatgtatttccttttataagttcaaataaagagtcagtgaaaggttatgtaagaatgttcaatcaaatgcatattgtgtgtaacgtttgcagtactacaaaattagcttttccgaatgaaaactgttaaaaaaagttaagcggagatttttgttaaaaaaagttaagaggagatttttcccaacaatttagaaccgaagcaaagatatacccttgggaaaaataaatgccaaccattataaatgttgggaatacttacttaatatcccatgtttgatttagtatataaaaaaagaattctttttttttttcttaataatttttttttttgtatataataaaaaaaaatactaaaaaaagagtttcagattttttttttttaaaaaa

SEQ ID NO: 42966 - DNA, 2078 bp, Cannabis sativa
acaaaaatcatatgatccagtaatcaatttggtaatattaatgtataaacatattctaaaaacatacatacataagtagctgactagaagctgaaacatataatttatatctcatttgcaattttcaaaataggttgtatttatattttaataattttatattactttttacaaatttatgtatttaatcaaacaatataatttgatcagtaatctaactaaatattcttctgcataatcaaataaaattataagtttataggcaataatattctccacttcaatatttcaattaataaattaagtccaatcttttttttttctaaaacaccgttcacaatttaagtcaacattcaacaactaaaagttaattttttttttttttttacatattttcattttaaatgtgacaatactacttgttaatttaaatacagtattaattctaagtctgaaattttagatttaaaatagtatactttattctgtcactatttcaatttattaatacagttaaattcatttaaattgaagttttaaaattaaattattgtgtagtactataaaagaatgtttcttatatataatttatattttataagtttaaactatatactttacactatagtatttaaattactttgcgagaaaaaaaaaaaaacactataacatttaaatggggattaaagttaaattgtaatattgtttactatataaagttcttttagctatttaatttgaagattttggattatctttaaaagttttatggcataagatatttcttccattcaaatcccatctcggtgaggttttccttctcagttttggcctcttcgaatccgatcacttcacccttttagggtttatgctatcccgaattcaaagaacctttaagtgcatactcctggagtgcaatatagatggatgatctactggaaatggcaaagaatctgaatgttttggcagacaacgaatgggagatcgacgaatctagtgcgacgacaataggaaaactctgccttcttggtagattatgtacccagtaggaatattgttaagtcccttctcaagaccatcctttgtcgaatctggaaattgattgagaaagagttagattttatgtttagagagaaaatagaacaggcactcttcatcatcataaatttcaagaatccagatcacttaagatcaagtggtgtcaaagatgtcgtggttcattcagaatggattctttattctcgaatgaatggagagaacgccattagattaggagtctaaattgaaaatgtttcctctaaaggggcaggtcttgaatctaccctttccctcaatgattaagaacaatctggcgtgactagcgagtatggcgggtacggtgatttcaatccaagaactctatgtacctaaaattacagtaaatggatacttttggttcaaggttatgagctccatattcaatctaagatttatctgagctttccgtttcccttcaatagtggtgtaatctgaccagaatttcaatataaacgattgcgtttcatgtgttttgattgtgggatggtgggacatgatggcaaacactacaatgaaccggtgactatggtttagaaaatgtggggaattatgactcatgcatatgggacttggttgaagatagacccattcttaatatttgagggaattaattagttggtggtattagacaaaaaaaaaaaattgggtccttacaggggacaaacatctcaaaaagggagacgttcaatatcgattcaaataattcaagggtgaaccaaatcatctttggggctcatcgaacaagggacctggctaagaagagtgagcgagtgttactccaaagggaatcttcaggcactgaggttttattgtaggcaaccattcaattggattgtgtactaaatgttgagtctcttgtgaaagttcctctctcttttaactcaggagtcactagtggtgtatagatggagggtctgcccaaaaggaggagatttgtggctcaacaaggagggaagaaacagtgaaggtttacacacaaatggaaaagtaattctcagctc

SEQ ID NO: 42967 - DNA, 3381 bp, Cannabis sativa
ttgttagtaaatctagatcctggtaaaataatttccaacaatgcggccttctaataatccaaatttggagcccttcgcggatatcaagcaactcaacaatcaatggagaatactcttgcttaatcttctttgcatgagcatatgcaacctcacctttaccatttttgaccacaattcccagctcggaggcaccatgccccactttaacaccatcatcaacattaatttttcaagtagtggagttcagggtttgccattttgctctactcctttattgtgagacacctttcttatatccattaacttcttaaaaattagccagatacttcctacaccaatcttatatatcccccactcgagccatcttatccttgtgtttgatgttgttacaaatggacaagtttaaaatcttcctgctgccagtgattagaaaggccataaagcaaaataaatgtatcattgtttttaaacctctgcaagtctccccaaaatctacttttttctaaacctccctactacttatacatccccataaaagcatgaaacagtttctcctcattccctccaaaacacctttcacacataggataaactgtcattcctctcttagacaaaatatagttagtaggaagctaagaaaagcataccttctaaacaaatatatttaaccttggttggtattttgagcttccatagtaacttccaccatctctccatatgttgagtatttgattgagattccttttcctgcaaattggaagccaaaagatatccacttctaacagagtacttatcttttttgttgtaatgccacattattttatcatcaatgtcccaagcaccacttggtaggttcataatcaactcagcatcttcagtattacatactgctctcactaaatcattgtcccatgaaccgtctatcttctttagatccacaacatagagctgcttaaaaagatatggcttatcataaaattgaaaactcaagggtcgaggtagccacaaattttttaacacacggaaactctcaccattgtcaatcctccatcgatatcccttaagaatcaagttcttttcccacaccaaactctgccacacaaaagatccatgaacccacattttgcctctaatatccccttattcagaaagtaactagcctttaatactctgctacataaggacgagggagatctaatacaccgccaaacttatttagcaatcgagcttgattaaataaacttaaatcacggaaccccaattcacttttgtcctttgtcttacaaagatagtcccatgaacaccaatgaatcttctgacttttatctaacgaacgccaccaaaagcgagcagccatccaatgaagactttttatagtgcttttaggaagcctaaaataactcatagtataagttgccatcacttggatgatgacctttattaacacttccttaccagcaattgagaaaatagagcctttccatcttcttatcttattccacactttatttttaatgcctttaaataactcttttttttcgttttcccaccatagacggtaaccccaaatatttgccataactttcgactacctgaacatccaatagttcagcaaccctttgcttattaatcgccacctcagtcctgccaaaacatagctcaaatttatgaaaattaacgacctaacctgaagcaattgtgtacttttacaacactgtcttacagcattgacattcctcttcattggcctccatgaacaccaagctatcatccgcaaagaataaatgtgacactcttagtccacgatttccaaatgccaacccacttaaccgcccccgcctctcctccgcttgaattcaacttgaaaaagctttagcacaaaacaaaaaaagaaacagagacaaaggatcaccttgtcttcaccctttttaaggagtgacatgtcccaaaattttgccatttatcaggaataagaaactaattgagtaacatacaccataatcttttgtacccatcgatcctcataccccaatttcaacatcatagcttggataactcttcactccactttatcgtatgctttagccaagtcaagctttagtgccatcttggaaccattacggaagtaatttttacgcatacaatgtagcccttcatacctgattatggcattgtcatgaattaaccgacctttcacaaaggcactttgcgtatctaagatgacaactccaaaggactgtctcaatctattagcaaacacttcgagaccactttatagataacattggacaaactaatcggtctaaattcttcaaccttttttggtttatcaacctttgagattaaagcaattaaagtatcattaagactcccaaccacagctccattattaagaattgttaaacatacctcaaccacgttagactcaaccttatcccaaaatttctgatagaatagggttggtagaccattcgctcctggtgcattagtcgggttaatattcttcaccactcgaatcacctcatcaactaaaactcttttaagatcatgattcatgacttgagttaccttaggctgcacaacagctaaaacatcttccatgacttcttcattgagctcagaagcagtgaacaaaccttggaaatactctccaataatttgttgagctatgtggctatcattcagccatttttctatagaatccatcagacctttgatttcatttttcctcctacgggatgaagctttatgatggaagtacattgtattttggtctccccattgtaaccacatttctcggctccattgtcgctaggggtgttcatcaaactgctcaaacctcacaaatcgcccgcaccgcaaaaaaaatgcagtttaaaattctttgtggtgtggttgcggtttgaatttttcataaactgtgcggtgcggtttgcagttttgaattgttaatatgcgcttcaaaccgcaccgcaccacacattataaaaatactaacttttatatttatttagtccaatatgtaaatgtccaacctaaaactcactaattattgtattattgaaacttattttttttcatatttattgtcaagccttatggtatttttgacaaatgttgctcaagctttgttgtatttgtgatagtttaattatttagtgatagttcaaaccgcataaaccgcaccgcatcgcaccattttttgcggagtgatttttaagtttcgcggtgcgggtgcggtttggaaaattagaaaaattgcatgtgcgggttggtttaaaaaaatggtcaaaaaccacaccacccgcaccgcgaacacccctaattatcgccaatatttctcatctttgttgagcaatccattaagctttttctcctccc

SEQ ID NO: 42968 - DNA, 2448 bp, Cannabis sativa
aaaaaataacctaaaaaatatggataaattttaaaggagtttcgattctactctctaaaaagaagaaatgaaagacatatgaaatgaccctaagacagagattcctgagcataagtcattcatatgaccaacttttctaacttctctctataacagaggtaagtgaaggcctcaccttttcactctcacttctctttgtgaacttcattcctacttttcagaattgtttttacccttgttataagcctctagcaaagttaaatactatctgatcttctatctaccaagcttgctcgagtgaagaacgaaaatcaatcactgtactaaagtaagtcaacaatatcctcaatcattaacctttttcatttactaatctggtgttattatggttatgctttgagtattgtttgtttttgttaatagataatcatattgtaattttttgtcttactggttccaggtgataattattaggagttggtccttttagccaaaatgcctctgttatctttaggttgtttaggtagtggtagtactgaaaatgaaatagaattagaaatacttttcaagaagataaatgattggaaacttccgagagtcccaattaatcaaatttacaagcaaagattttcattcttcaaaagtactcatgaccacaccataggcaccatagaacaaacaatcaacatatccaaagagcaagaaactattcaacttctttcaaagagtcgatttgaatttctgagaagaaaattcagtcatctccacttagggttggtccaagttgctatcaaaccaatgtcacaagaaagtctgagcacttctgtcctaatgagtcttagagattgtaggtacctaaatttcaagcgatctctgttgagaggtgtggagaccaatctttgtaatggaccagtatatttcgattattatccaaactatattgtgtcattaggggatccaccccttgaagtcttgactctcaatatcaaaactggatctttacctgtggcattgatatatagagttatttacaaggtcataacaactgaagaactaaatgaaatacgttggcttcttaatgctggattaataagtgaggttggattaaaaacgagtacttatgaattagcagaggtaatgcatgtagatctaactagatctaggaaaccgaagccaagaatcattcgactcgaacaagttaattttccagagagttggaaaggtacgtgatcaagaagggtgtgcagaaaacgaagaaaacttgggtgagaattgaacactattaatgaatgtgcatctcgtcatctacgtacctttaagttgatccctatttgtcttcatagctaatttattagtacgttaaagtatgtaagatattctaagttttatgctcaactaaattgtagtatttttatgtattatgtatgacattataaggcattgatttgaaatgaatgatatgctaaactctcttataacatttgatatgtgttttatgtgtgcttattttatttggcttgttttctatgctgtgattgttagaactaaatctttatgttgtgattaattagaacttatagataatttattaaattatttttatcatatattttagtagtcacatataatttaattaaatcaacattataatattatgaaaaataaagaatattacacaaagtttgaaatggaaatataaaagtaaattttttaaaggacacattgtctctagtttttaaaataaaatacttaaaaaaattagtaaattatatgaataaaattgtgtttagttataatagtgaaacaattttctaacttaaaaacacacaattttaacttgattcaaatttattaatgaaaagtattataatacttcaataccaaacgttttataattgtaatatatattccaattcattaaaagttcctctaatgcatctaccctaaaagagaatccaacaaaaaaatagtctaaagcttcaccattctctcagattgagaattgattaagataccaaggtgcagatgacacatactaaggaatatgaatgagggttaatctctttcccatcttcatcaacctttgttaatgcaagcctaacactataaaaaaaaattattttcagtgacaactttttagccacaatataaattttttataactaaatgtaacttttagccacaacaaaaaatcatttgtggctaaaacataatatttagaaataaattgtcactaatttagttttagtcacaacaaatattgtgagtaaaaatatatttagtcacaacaaattgtgatctttataactaatacctttagccatagaccttttagtcacaacatagaaataattatttataatttgaaaaattaaatttttgtaaatgtcaataataaatacgaaaatataaaattgtatacggctgtagaagcagaatgtaattctg

SEQ ID NO: 42969 - DNA, 3050 bp, Cannabis sativa
aaagctatatattgtaatttaaattgagagtaatagttaggtttaatacattggttatttgtagttttataaagaatgtaactattatatggtatatataattaatgttgtaatgttatctataaattttgagtttaaaaaattaaatttatgattatagtttgtatgcttaaaattaaataaaaatatattttaagtttccactattttaagttttagaaaacgataagattgcttttaaatcctatccctatcagagcgataagaaacgtgtaatttgaaaataaaatattttactcaaacaaaccagcaccacgaattatttaattatataaatgcattattttcattgattacattacaaatttctaaatacattattttcaattatttgtgtgagatattttgttccaaactaataaatgcacacacataataattattcgacaaataaacccttataaattagataattttgtccaaaaatgtgaatgagtaatttgacataataatgtgtgtggaatatatatactacaagctttgactctatctctctttatattttatatttatattatatatgtacgtattaatttaattaatacaaacccacttagaaaacgaactttgataacaaatagctaaaagaacttgagttattacaaaaacataagtaattatataatacactaaagtcatccaaaacatcatcacaaaacgacagtgttttatccataacatctacttgccttgtccacatattatatacaatagaattttgcaaaagtaccccctaactttactttatttacactttgttgttgaattctttcaattattttcattaacataataacatgataattggtactcataattaaactacctcatttatgaataatactatttcaaactttgaattaagatcgttagatgttgatttgtgtgaccccacactatttaataattaaataattaattaattaattaatttaaaaccctaactacacacgtgtgagtggcacgcttacatgggcgctaaatctccatgtacgtacgtacgtacgtaacgttcccatataattttttttcgttaattaattaatctttttattaataaaaataagagtacgtataatgtgaaaccaacaaaatgtatacatatatatagattatataataatgacatcattggagtttaaacttgcgtaattaaatagtaaattaagagtcgtattaataacactacaactaattaatacatattttattatataaaaataatattaagatactatataatataagagtctagaaaaacataatgttaatattattaaaagtcaatccaattagttttaacaaccttagtcactacaactccatagcatggatccatgtggccaacgttatctcttattaattattatgattgtgttttcaatacatatatatatataatattttatataaatatatttactttgcccacttgccattcattttagtgccccatatatatattttaacggtaccactaaaattatttaacataatgtaagaaaaagaaaattataaacatatataaaaaaattgtgtgttctgttatgagatctccaatctaataaatatatatattatataatatatatatatatatatatgtgtgtgtgaactttaatgatgatggttaatactcaaaattctatggctaatcatgatttttttgggagacaaattgacggagcaaccacttctactaacctgcactggagacatctcatctaaaccccatcaccttattatatattttcatttaattttttttttttaattcttgttgggtttttaagtagttgaaaataatattgttttgtttatttattcaaaaaaaaaaaaaacaacagaattctttgttatccaacggtcgatatggagaatatacctttgtgttgttgcttttaatttattatgtatataataattccaaattttgtttcactatattattatatagttaattattattagttagctgagttcattattagtgttaattatgaattaataacttattaatgacgtgatttattacaacacattatagtgatttataatgagagagaaaattaaaggtggaaagattgatatgacttattattgaaatgtgatatgtatgatttatattaatttcagtgtgaacttttataaaacattattgctatataatcacacatatttaatattagagtattgttattaggtatcagtggtacttaatactttcttgacatgtcgtgttgcgattgcatggctaccgatacttcctaaaagctattatattaaattacatgggctccgatacttagtttgaccaatagcgatattgacacataggatggtgctaaatactgctggtaccatttagcatttctcataatattgtagttcttaataattatttaattaaaatgtaattacaatatgagcattgctataagctaccagtgatgcctagcaccttcttgacatgttacgttgtgattggttaacgatacttcttaaaaactattatattaaattatataggactcgatacttagtcggactaataacgatactgatacataggagggtgctaggcactactagtgccctttttctcatacactaattataagtatgatgattcttttaacatttctctttataaaaatatttaacaaagattagaataaaaggtgggcccacaccgggccatatgatgatgttgatgaaaactatagaagaaaaccatttaaggaagccgatgatgttgttgaaaaatgttattaacacaaacaaatatctattataaagtacagcaatacatatactttttatgttataaatatatatttattctatataaaatatataaaatataattatgtaatagaatttttagtttaattatattttttgaaatttttatgctaactttaatatatgttatattattatttaatataatattttttttattaattttataatattattaagatcgg

SEQ ID NO: 42970 - DNA, 2177 bp, Cannabis sativa
  modified_base (2121)..(2139): a, c, t, g, unknown or other
taacttttctactttcaattcacaattacgaaacttatatcctgacagacttgcatggagttactgacctagttcaatgtgatattataaatcacataaccacaattctaaaataaaaacccaggttcattgaatctacaacttaacatacctggcttgctttacacatgaagcttgaaagcaccaaaacatcttcaaatgcaatggacttatcaatcttcccaccaaaaatgccctcaaatctctaaaaacgaaaaacaaaatgtgaaaccaatgaggtaaatttacaaaccgcaacaataaaaatagcatcattaagaaaaacataatagtccaagaaaccatatgtccaccttgagttggatgacaagaatatttggggcttgacgaattgacatttgcttccttgctggtaccaatttcttgcaactatacatacaagcataacatcctcgatcagaaaataagccccacaaaagtataaatggaagaatgtaaatatacataagtgcgtatatatatatgcatagtaatacaggtacaaaccgtacctctcacatctgtatttattgttaccatccaaaatctcaggctgaaagaacctttgcaaggcatctttgagagaattactatgcagaacatcaaggctaatatccattatctcatcaaccttattggactcagtgccacaggaaatgcacttcacctggctctgcaaggcacccccaaatatctccttcacaaccgaagaaccaccgctgccactaccaccgatccgccgcagctttttgaggcggaggcatgtattgtgacaggcgtcaatgacatagcggagaaactcatgagcgtcttcctggcggccgccgcggaagtgctccgaaaaaatccgaagacagttctgaatcttcatgggcgcatcgagggagagatcgacgctcaaagacctaactatccgcttctctataatgcaaaaagggcagtcgcgtttccggtcggcgtcctttgaatcacctgagtaaaaattacaccaacaaatcaagaatcagcaatggaagaaataaaaattaaacctagggcacccaaaaaaaaaaacttacagagagaagaatgctgtttgcggaggcagaaattggcaagaggaggcgtataggtgagacactggagaacgctattgaggtagcaagaattaccgaggttctttaaccctaatggaggaccggtcttgcgtttctgactcagtaaactcggctgccaactcatttgcaattgcaggcccatcaacgatgacctcccgttgatagcgatgccgcatcgcacgccgtcgttttgatgcttccactccctgaccgccacgacagccaccgccgccaccacctcaatcgcatgacgcgcccccacttcccctcttttcctttccctttctcttttttcttccctctctgcttctcttactcttactattatttagcgccttctttcttcgtacccacggccaaaaaatacaaatttgttaaaaataataataaaaagaaaaatagatgattgagaaataagtttgcctctctctatttctctcttcaggcttccaggaattgggattatttagatttttaataacccttttaataatattgatattattattacacaatttgcagagggtttaggtttattattgaagatgaagcctacactgtaaaaatatataatataaaaaatagggtacaaaatttatttatttttttttttttttgagaaaggtacaaaatttattttagatgcatataaaataaaatattattttaattttattttcaatgtgtttaatttttttaaaattgagaatattttaaataacaataatatgaacgtgagaatttaaaaagtagagttcaaatagtctatttcacacacatataaaataaaatgatcatgtatttttgtaaaaattttaaaattttataaaaaatcttaaataattatattcatgagaaaaaatttatataaaaaattattttaaataccaaaattaataaaaatgtattggtgcatgttaataagatgagatgaaagaagaaaagaaataataccaaatcccaagtgcatgtttggcatcataannnnnnnnnnnnnnnnnnnttttaaaaacagaaaattgtttttaaaaacaatttggc

SEQ ID NO: 42971 - DNA, 2928 bp, Cannabis sativa
aaaaacaaaatttttaaaaacaaaaattttactttcattttgttattaaaaaatttgaaaacaaaagtgttaccaaacaacaacttaatgttttcaaaaaacagttttcattttcattattttttaaaaaacacttcaaaactttgagaccccgatatgaacaaacccgaacaaaatctagaccccggaccctaaccccggcctcggcctcaaacctggacctcgaatccagattggaacccgaaccccgtacccgaacacggacctcagccctagacctcgaccttggccccggacccagccaccgttccggaccaggacccggaccccagacctacacccgaatccagacctaaatcgatacctggacccaaacccagacccagacccagaccccgaccccgaccctaaccccaaacccggaccccatcccgaaccctgtcccagaccccgaacccgaacctgcacgtcagacccaatccccaaacctcgtaccccaaaccaagactaggacccggaccctgttcttagccccgaacctagacgctggacccagattctagacctcgtaccccagatccaaactcgaaccttggccctgccctcgaacctggagcttgacccgtaatttggtgccggccccagtccctagaacccgccctagacttggactcaaattgcacgtaatattataatttgccaagacatggtgcgaaggtatgaccgaaaaagtgccaaatcaacttgcttattcaaactggaccttcaaaaagcctatgacacaattgattagaacttcatcaaagaaatgatggaagcactaaattttccaggcaagttcatcaagatcataatggtatatatctccacttctaaattctctttctttattaatggggttcctcatagctatattcaatcaagaagagaattacgactaggagatccgatgttgccactcttatttgtgatttgtatgaaatatttctctcaaattatgatgaaaattattgagaaaaaggattttaagttccacccgagatgctaatctcttactcagaggatttaagcttttttctgagagctccaatcttgaagcaaataagaagaaatccaaaatttatagagcatgtatgtctaactctaaaattgaaagaattgttgatatgtctggtttttcaagaggttccttctccctttaaatacttaatcatgagaattagctctaaaaagctatctaaaaaagattgtgattgtttggtggataaaatgttagttagaatcaaaacttggagtacccaaaatttatcacatgctaagagaaatgtgcttattaattcagtcatgttaacaataaatgcttactggtctcaaattgttatccttcttaaaaatgctgtcagaagatagctcgagttttttgtgcttttcattggatagggaaggaagatagtacagggcctgaaaaagttgcatgatctactctttacaagtcaaaaaagtaaggtgggctaggatttaaagacattgctctttggagtactaaacgagcaataagtaagcatatttgggcaatttcatccaaaaaaaattaatttgtgggtgaagtgggttaactctgtttatataaaaggcaatgactggtgggagtatgaagctcccttggaagctagctaatatttgaaacaagtgattagcacaaagaacttgatcaacaacagagttacacagattcactttcagaattgtcgttattcaattgctgatatgtgtgacaaattgaaaagctctcaacatgatatactttgatttgggagagactttgtactccaaagcataggctaactctcaaaggcaaactttccacaagagttcggttgaagagaatggggatcatcaatgagattgattgcttgatttgtacggagttaaagatgaaacaaaatcaacatgcatttgtttttttgagtgctgttatggattggataggcattaaaggaatgatcagtatacaactgcctgcaggtattcttaattggattaagaacagtaattaaagaaccacttgaggttagttcaagtggccataggtgggtgtgtgtgtcttgaaggtcctgggttcgagtctcaggtaaaacatagttgtaatatataaacgcttaaataaaaaaaaagaacagtaattaaagagagttggtgtttctatgcgttatctccactacggtgtacttcatttgaaaatcaagaaatgaagccttatggaacctcaaagtcactacagtcaagagaaccttttacaatatagtgcatatatatgtttgtaatagaattttatgtagttacacaaagaaaatttcttgtaaagataggaggagatgggtggataatttgtatatagattgtgtttagctagcttgtaactaaaagggacagtattggtgtttataattgttttcggagaaagaaaatctcattgtccctagaaacaaaaataactttcatttaagtatagcctttgagaaaagacattgttagatgacggtgcaaatcatattttgaaatatacttgaaaagcaaagcaaaaaaaaaaaaaaaaacaatgaaatgtcattaactagtaatctatacaagtaattgtaaaagagaagaaccacatgcactagtaacagtacttagagattctagagaataaataatattattatcttataaggatatatataaaacttaaattagctttaatgagataccattaaaagtgtggtcgtctcatcaatggctctatataggagtctcttcttgtacacttcagtagtaagttgtaatttttttttcttttttttttttttttacacatgatgataatgtaatgtaattacaaggctcataataaattttcagaaaaatctgaataattttttttttttt

SEQ ID NO: 42972 - DNA, 1961 bp, Cannabis sativa
ggattgatcattgatattgatgtggggttccattgcctgcactagtacacgacttctacgccacttccctctacttttctcttctccaaccactgcgcccaccgccaccgccctctcttctttcgcatcctttgcttctcgttctaacccaaggttagctaccttccctttctttctttctcagttgatgaaacaaagtaatctttttgtttgatgcccttaattgcttttctgtttgttgtgcccaatttctcatcaatttttcatttttcttgttttggcatttttgaatttgaaattatatatatatatgtatatttatattagtggtggcagtggaagagatatggaaataaagagtgatagggaaagatcaagaggtcgtggtggaggaggaggaagaggaagaagtggtggcagtggctctgggtctggtaaagataagattgatgcacttggtagattaatgtaagaatctaattacctgcttatatctttatatgttctttgcttacttatgttttcctcaaaatgatcattattattgaacatgaatttcatggattccatgacccattacagataggaaaagaaatttaattttatggggtttaatgcaaatgcttagttttagtaaatgtaaaatttctactgaagagggggagaatttttctgcttatgcaattgaagagcattttgttctgttatctttttctagccctttaattcttatatgctcactgttatatttttctctaggactcgtattttgcgccatatgtcatctgaattgaatttgagtatgcgaagtgatggatttgtgaaggtcaatgatattttacagctgaatatgaagacatttgcccatattcctttaagatcacatacagttgatgatgttagggaggtcagtgttcaaggattaatttccatttgtgttggaaatggaggagtggataccttgttgttcatgtttagttatattattgtttagtttaatcgtcaaggtctgaggttcgagtacttgaaacggttttgctaggtcacaatgtttcatgttgttatatccatttctgttgcatgaaatgtctgaaggaagaacttgatgtttttttaggctgttcggaaggataataagcagcggtttagtctcctagaagaaaacggagagctttttatacgggcaaatcaaggccactctgtaacggtgatatatcttcttcccatgcttttttgtgtttaaatttaactcttggttattactttcacctgatgtaaatgccaatttgttgaagggatagttctagatcatcttatgcttcctcatgtcatttacacatttcctattggattatttaacttctgttttgctgtaagctattcctttaactgcatatttgtatcaccggacttagatggtgtttggttggaaggaatgaaaacataggaacaagaataacgattcctttcatatttcaaaatagaatagtcattctaccaaattgatggaaaagtctttccactagaatgacattgtaatattttaaaatgcaaccaaacaaaggaattgaataaaattgtttcatttccattctgtttcattcattgcctccaaccaaacaccaccttaataattaaagtctgaattgccttcttttccacacaacatcaaacctttcttatttgctgcactaacaaattgtccaaaaatgtgaaacagtaatttgcactaacaatatcgtttgatttttcatttgaaccttgcagacagttgagacagaaaagttattgcaagccatagtttcagctgaagaaattccaggtttctttttctttccttcttaaaatgtttgatcaagtcaaacctattagttaaggagaatacccttgagtcaatatgtttgaattaacctttttgtttggctaactgtttctctttgcttccgatttgcagtgtgtgt

SEQ ID NO: 42973 - DNA, 4050 bp, Cannabis sativa
  modified_base (4003)..(4025): a, c, t, g, unknown or other
ttgttattttggtgttatttagatattatttttatgtagtttttttatttttttttatttttatgacaatcgtaaaaatgtaaaaaaaaataaaaaaaaacatggtggatgatataattatctcatacaatagcctcttttccttttcttctcaagttcttaacggtgatcaagtgttgattaagaagggagaagccgtacacctcttcttctgtggataaaagaaccaaaacgttgtcgtactacgaagaagaaatgcttaggccttctattggactcggaaacctcttctccttctccaagctctttcggtacggtacttcactcttttttcctttacaattataacaatatctctattagggcctcattcgtatggattccaatgtctaaattactcagctgagtcttcaatgtcggtttatgggttttgcttgtagaggtgatcaaaatttagtcaggaacatagaattcaaacacctagggttcatttcagaccttcatgcaatttgtagaactgaattgggttgaatttgggcaatgtataagtaattagcctgctcttaataacatttttatttgttgggggtggagggggtcgtatctgatccatcccctttgagtgaaattatcatgcagaagaagatctgggtaactccattttgggtcggattggatttggatcaatagatttgtgttcttttatgagtttaatttatttcatcaaaatatgatttcttgttcactattcttatgataagcagttttgccacatttgtgtgatgagtaatatggaaatgagattgattgcaaccctgattttcttttcattcacttggggttgtgctccccttttcttgattgatcttgacctccttatccgtacccctcctcaacctaccaataggctggctgattcatacctacagcttgtgacaactttgctcaattatctatgttcttatctagaagtagaagtggctcctagagctttacctatcatttcaagtgttgtttgattgaagcatttgagtttagcaacaattttggatccagaaaagatcaacacaaattaatcattcactacaatataaggttacatttggttggaggtaatgacattgaatggaatggaaaagaatcaattttcgtttcattgttttgtttggttgcattttaaagtattagaatatcattggaatgatttttcaaccattttaatggaatgactattctattttgagataaagggaaagaccatttgcaagatgataaaaaatttttttatcaattgttttaacctcaaaaagtggttattgagtagagattcacaatatgaaatcctttttaagaagaggaatatgaaatggggtctaacctcttcagtttagtaaagtggctttcaaagcttgttctacttcggaggtaatctcagaccagaaatgtattctacatcaccaaataggagaaacgtctggttttgtttttgtccattgcatgctcttaattgcatctgtatttttcttgttattcatggacaagggatataatattgtccatttgaatgtggtgatttaattagtatgcactcaccaataccatgtttcaattggcatatttcccaaactgagcaattcttttcccttgatgcatttcattgaatttttagtagagattgtatacttttgttgtaataatgagtttattggactcctttcatattgaattttctagcttagatcaataatatgatgacatgaggaggccaatcttgtttatagttatagaatcaatggaagcttccatgtatgtatactagatgcttatgttatgaataagagagagtaagtttgggcaggtctcaagaatgttcagttatgcttttaatgtcttcactttacttgtgtttgtctttcaaatacttagagaaaactattttggcccttcttcttatctcacagtcagctggagcaagagatggaaaccgtggtaaatgtgttgcagcctggacctttaggaatcatagagcacaagttctctggtgaagagattcgcgaggcaagtgctacggttcatagagctgtagagaattggcgacgaaatgcaaaactggaaccaacagctcacatcttaaacgattacattaagaaatgaagggaagatattagctaaaaccattttccattgatggctcaagattcttatgtttttgtcggaggatgttgaagaacttggtgccttcgtttaacttttgtacatcaacgagtttgattgctgttgtcttttatattttttttttctatatatcactaccccctattttacaagataatgtttgtatattctctctttttctcaaattgaccgtcatttgttccttgtgttctgtccttatttatagagtttagagtcattgttattccattggagtcttatcactgaaactattcgtgaaacgtggacaattcccacattttatatttagattacatgagataataataaataattgctataacctttcattgtctttatttataaacggttatgttgactatgcttcatctcgcaatacaaacaatcctcttaggctgctttattatgaaggtagctttttgcaaggcaatgagatgaatatattgggagtatttctcatagtctttcaacatactcatgagtgagtttgttggtcaataagctgcaaactcttaaaataattcattatctactctttctaattactgttgttctgttgtgtatcctgtgtattccgagatagaacttctacgttagtttttcatctcactaatctcataaaatggtagttattattcacgactcacccttatctttgaaaggttaagttcgaatatttctactaattgtattcgaggcaagtttattgaatgcatttattgctttataacacgagttagtttatttttcatcttcttaatacgtgtcataactatattaattgttcaaaatatgagtataataattgcccctcaaaaagtatttttttagaattaaaaaagactttttaattaatagagggtatgatcgtatttttcctttttaaaagaaaatgtgtgcttcattttggcaattcagtatttcgagaaaaatatcatttcaacatttattaatctgacccttctttttctaatagtttccatctattcgatcagtcatcattacaatcgaacggtttccattttttttgaatggaaaatagcaacttctaatcacacatcagcttttaaataagagtccttacctaagaagtgggccactttattcacaattcgcttaacaaaatgaattgaaacattaaacaattctgataacaaaagttttgatttgtggattaaaatgccgtatagagaaaacatactaactttactctttatagcatgcaccacgttgacacaatcagtttccaccatcacgtttgaccatccatgagcttttatccaacttaaggcctctttcataccgactgcctcaaaaaattttggattaataactcctggtttaaaagaatgaaaagcctcaataaaagatccatcatgatctcgagcaatgcatctgaatccatagctattagattgactgaagatggcaccatctacattaactttgatcatgtttaagcttggtttagtccattgctcatctttcactctaactagtcataagtttttccattttattacacaatgatttagagagtaagaagacattcatagcatagctaggtagggattgcacaacagattttatcattgtttccttcccagctcgagataagaatttgccatcccaactgtttattcttttttgtatcttgtcttggagatagccaaggatcacattcttttttctgttaagggtacttggcagattaaggtacttgttgttctcattagctagttaaatacctaggtcagagcagatttgagatcttgtggttgagagaacatgttgggttttatgcccnnnnnnnnnnnnnnnnnnnnnnntcagatttacttattaataaatatc

SEQ ID NO: 42974 - DNA, 2192 bp, Cannabis sativa
gcctctccatcaccacccacaagatccccctcggctgtcccatcttcgacaccttcctccgcggtggaatcccctgcaactccatcaccgagctagtcgccgagagtggctgcggcaagacccaattctgtctccaactcgctctctcagctcagctaccgctcaaccaccacggtcgcctttccggttcctctctctacatacacaccgagttccctttcccctttcgccgtctccaacaactttgcctcgattctccgattggcgggaactcagataatatatttgttcacgctgctcattctgcggaacaactgctcgacgaaatgcctaagatagaatcgtttcttgttgattcccaatcacgcttgccgattagactcattgtcgtagattcgattgctgcgttgtttcgttctgaatttgataacaccccttctgatcttaagcaaagatcatctctttttttcaagatttctggacaattgaagcttttggcaaagaggtttaatgtagcggttgtggtaacgaatcaagtggttgattttatgggagaaagtggtagtttgaatggacttaggattgggaatttaggctctttgtattcgtctggaagacgggtttgtccagcattggggatagcttgggcgaattgtgtgaattccaggctgtttttgtctaggaatgaggaggttataggagcagaaatcagctcggaaaatgctggtgatgggctctgtaggcgaacaaggcggcgactttatgttctctttgcgcctcatttgcctgaatcttcaactgaatttgtgatcagaagagaaggggtttttggagtcaacagataacaaaatttataatgatatgtaagtgtacatgaatgaatctatctgtggttagcttagtattgttgagttttgtttcaactttgatgtttgtgaatttgtttgagtgttttgatagtactcaacaagtggtcattttgctgcaatattttttcatattaataaattattttgaaattctagtttgttattatcagtggagtttaatcaactgaaaactaaaacacttaacaacctttttattgtcaagttagcagtgagccgttgtaagttaattagctggacatgtcatatatagtcgagtccctttgtgtttaagggtaacataaagacagaaatgtaagatagagagaagttacaagattacaagtgagagaatccaagaagacaagctgatgatcatggtttcatggtgttcaagtagctcatttcgttggagtgtttgagagctttattcttctgttttggaactcaaagtggttcacaacgagttggtgtttgtaattcacattgaatagtggagaaagtagaaactccttgggaggagagctggattaggactcatattgagatctgaaccaggataatttctttgtgttttttttctctgctctgcattgttcataatctgaatttcttttcttttgttgctctctttgaaaatttgattcttaagttattgagtatgtgttgttgaatcacaacattatctaataaaatatgctatgaaccatttcaattcaatcccctgattttttgtactttatttatagcattacaccatattactaagcactaacaagtacttaattgaaagtaggagtattttattataagcttattattatcttcttactaaaaaaactaagctgaagtacaacaaacacaactcatcccagaagagaaaaacctaaacagaaactggtggtcttcctaggtaggtttttgaataacaaaggacatgcactgaccctggtgaatattatcaaaagctaaacaacgtatataagcagttgggaatgcttttttgcagtcatggatttcactgaggacctgagaagaatcattgcagccaaacatgggtagcttccacattgtccaatatcttccatcatagtagcctggcatcttgctgttctccctgtatacatgccccaccttcaagcaaaacataagtgttacaaggtatgattctttcttaataacataacctaagctagaagactaagtattttagcttctgacctcatcaaattcaaggcaagggatccatccctttctgatcatgtaatttatctctttggcaattgaatcatctgaaagaggtgggagataggatagtgcctcaaa

SEQ ID NO: 42975 - DNA, 4282 bp, Cannabis sativa
taggatctgttctggtatttatttatttttatttgtatttcgtctcttctttgtaaaactgtaataataagtattacagagggatctaatttaacaataactaaagactaaacaagtaaatgttgatctcatgtacccattttgtttcatgtgttatttgattgtgaatttgcttgatcatgtcaattcgactacttagtgtaatagtttatgattatggcaattggttttttgggctgatagaaaacagttagatgttgtgattggggctgctatgataagttggagaatttggaaagcccataatgatttgttttggcaaaaaaagtcttgttatgcagcagaagtaatgagatcggctcgtatagttcttgaccattggaggaatgttcaatctcaaattttggggccattaaattattagccactgatacaaataatgtaaagattaaagcgaatgttgatagagctatttttgaagcttaacaaaagtatggtttcaaatgtgtagctcgtgatcctaataaatgattgctcgaggctatttcagctagcaggtatggtatggtttcatcctaaaatagttgaagtaataggttttttaggaggtgctgagttggataaaacataaatgttaggctaatgtggtcaatcgaatcaaatgcaatagttgtggttcacccaattaacaattcaatccaaatgccttcttcagtttgacttgttggtgagtggttgtcttctttaaataatgttttgatatcttttgttaaataatctacacataggatcactgagtgttgcttgaggattttgtttcatgtcatattgtatttttaatgagctgaatcctgtggatttaagaacattgtaatgcctgattgtgttcctaatgaatggttcaaatttaccattaaaaaaaaataaaaaaattagtagagtattttgataaaaaaaattccaaatttaacttttcagactaatttaagtgggcttattgcttctcgctggattttaactgtagaagcccacatacatttactgggccagactaattctcaatcggactttcttcccatttgaaccggcggcgacggtatagggcacgttaccgtgtggagcttctgagccagaccaaatctcctgaattctaacgcagcctgtactactacatacaccggtgagcctttctagctcatttgccttacgcattattcgcttttcttttactgggtttgattagggttttccatttcaatttgggggaaacattataaacattcaagcaactggtaattaattctctagctcagttgcttttagtttaatttcttgtagtttgatttgggttcattctatttaggacaaaaatcattcccaaactggttctggtataaattttcattaaaaactaaaaaaaccgtggttgagtgttttaattgaaaatcttgtgttgtgaaagttaactcttttaattttgaatcttggtttgttttgttggcgctattattagatgggtacaggagacgaggttgttgaaattgatagcttggagaggggtctgttatcgggtactgataaaaatggagctgaagacgatgatgtgttgtattctgcttcattcctagagatggaagataattttgttagataccaaacagctcaatgggttctatactcgttgcttttgattctggcatggggaattggcttgttcatgctgctttatttacctgttcgtaggtatatactacggaaggatatccgatcgaaaaaactctaccttactccaaactccattgtctataaagtgagtttgctaattggatatgtacactaatttcttttaaccaatcttgataggataagtgtacaaatgtttttaagtgattgtactgcatttaagtactttcttttaacaagaaaatgaatgcatgttttaaagtgatcattactccgtaccttaaatagattgtagcttatattttgtacgaacttttgtcaatgtttgattaaatcatgctcattttgttacattttaataatgccatcttgatgcagttcaggttgctaggccagtgccatttccattttttggggcattaaagaaagagaagtatattttgttaccatcagttgctgacatagtaattgagcaaggtaaaaatgttggtgtgttttcttttactacctacacttgttatggtaatgttgttatcttctgctgttatttcaatgagtatttgattgaagaattaaattatgatgggtacggaaaaactttgtatgttgacagtcacatttgaacacctaatttgattgttttatcttaaatgccgttgaataggaattcagtctaacttggttcctcatgaaacaaatcatatgagaatgtaatatcaaattcaaaagttttctcgaagtgaaatctaatttatactgttgctaagcaatttgaaagtttgtcaaataatttacccaaattttaaaaagtataatggaaatgttccaaactataatctttttactctttgtagttattaaataaagatgtggtgttccaggcaggcaggggaggaatctcatgtcctttttccttgtgttaattcatcagcattcgttctgtcatgcttgctaacctttaacgatctccgatctctataacaggatatcttcagtctctgtatggtgtttactcacttagaatagagaatgttgggttaagaaggccaccgagcgatgatgttaaaatccagggaattgcaaatccaaatgctttcagaaaggtactcatagtatcaatttgtatagtcttgtggctcaattttgacaaacatgactttatcttttttcatcttcctttcaggctgttttgatgcggctttcgaatatgaggaatgaagttttctctagacaagtttccacaattgatgatgtcccaaatttgagggtaagggatgcattagatacttgttatgcccacctttttttccttcttttttctgtaccatgttatggcgacattgtagtttgagaaatataagaagaaaaaaaatcatagagtaaagaacaagtatattatgtaaacaaaaagaaaatgttacttcatagataaaaaatgaaattatttggttgaagttggagttgacattttagagacagaacaaatagaatatgagccttgtctacaatttctatttgtgcaaccgagaggcgagatctgggcacatgtcgttgtttcatcagaaacctagtgtggatgttcaaactgtttcttcttctaccttttttttctcaatggtgttcacttcttttttctttaaattcttcctttgctcagttgcaggcgtccccatcgaaatctctcaggcaagattcattttctcatccaggagatctaattctactgcagaagctagaggaggttggaacttctgtcaaggtagagagccaacttttggattatttaattataatctttgccccacttttctgacattggacatgtttttcttcattactgcagagagttcaaactttaattgaggagcaacgccctgagacatcagagcacagggattaaagtgagtttaaaaaatgtacacattttctttatgacaaaatttgtttgcactctctcgttttggtctactttcatgagctcctttatcatagtttaaaagcactacaacaaacatcatcaaatgtggcttaaaaaatatcagtattacatattaggaattcatgaaattagtgacatttgttagatccctaaaaaagtcttaatgacataattatctgaaatgtcactatatattatctattaatatatgatttatagtgacattttaaaaacgtgagtatggcttattactaatttaatgtgatttggtattaacatttgattttaatatttgtatccaaccaaatgataatagttactattataataagtaatagtttttattatttaaatatgaattttatttttgtaaatgataaatatatatataattatactttatatctcattctaaaccatctgtactttatactaagtctaaataaggaactgtttgatacaatataggactacagtacttaaattatttgatacaataattgaccaaaatttgaatgggtatatttatttgtcttcattgcagtttcatctttcgttgattccactattcctccacatcttcatagtggagtgaagaatattcttatatgtatagattatagtgtatgaaatgactaaatatgtatacacgtattctat

SEQ ID NO: 42976 - DNA, 2199 bp, Cannabis sativa
tttatcaatttttttaatactaaataattcaaacctaaacctagaaggatttctataaataaatagtgatggactcaaaactaggttaggagtgcacaggtccgacaaagctaggagggtgcaacggtgaagctcaggtccaacatcggctctgtacattataaaaaaaaatacaaacctagtagtaaaaagctcaaatctgaagagaagccaaaatccaaccacaaatgcttacccattcgacttcttagtgtgaaacccgtgaaccctgtcctcatattctgaaaaccaccattgaccgagccacccttaaaccaccatcccagagtgaagaattgtgtccctggaggcggagaaaattctattgccatggagagagagagagtacaatattgtgcgtctgggaatggaaaagaaggagagaggttttataaataggtatatatattatggtataagacaatgggctgagctttttttgtgtgttttatatctatatgttgctatactatagccaacgattttaaacaatcagctatactatgggatagagaattggcggggaatgctctccacgtccctattctcgttaaagattttaataataactatgttacacaaggggtggtagatgtcttccattcaaaaaaattcattgtctatcttaattaaggatatgtttaaccaatctacaagtctcaatattatagttgcagctaacatgaaaaagaaattatgtctcaagaaaattagacaataaaattttaacatcagaaaaaataacgcccatttcgttcagctattctataagactctctaatgctaggaccaaagataatgaatatgagaataccctttgataggtaattcaacaccctgagtctatcttaatctcaccaaaagagccaccgcttgtgcatcgattacttggaacaaacatgtaaacattaccccacactagaattccttcctccaaaaccatactaactcaaggttgttagtttgttgaagagtttctaattaccaaaaaagttctctttggttagatattctttactatgtgcatatatctttttgtttacaaaataaaaaaagaaattattataaatctaaaacatctttaagaagtttatttaaaagtaggttgagataagaaaaacaaggatatgcataatgcatgcatcatgcatatatatgtgtatatagaactacccattcataaatttgccaacgtttgttttcttttcatttatgagtacattcacttttaaagaataatttaccaatatcaaagacacaaaaagacccatcaaataaataataatcttaacaaattacgacaaataagaagtataatcaatcacacatgtggaagtaacacaataatttagtacttagtgcatattttggttttgctataatctctaagtatgcatggattgatggaaacaccatgtgctattttttcattaattaattttcattgatcacataattcaactcattgataaaatgcaataatgtaaacacttttttttttttctttttcattcacaattatagaaaacaaagtcattttcattaaatgatccatgctgatgagaaatttccacttttgtagtaattccaaatattatttcactgttaattatacatgaaattccaatatccatgacccactgataaagtgataaggcaccacagtggcgtgcaatgatctctctaatgtactcttttattttattttttattctattattattacttttatgggtacaataatgactgaagattgatgagttgagagaagtaggattaatgtatgacttttttttccctaaaaaaaaaaaagaaattttaataattttttgttttcttggtttgttggagctgggtctcatactctcatattcatttattctttcacaacattataccttaatttaattaatagaccatacctatatagaatctagagtgtgtttggttggggtaatcgaatgaaatggaaaaaaaaaaattgccaactatttttttactttttactcattaatggaaccactttttttttactattttaatgcaaaatgtctattctattttaaaataaatggaaaaactatcttaatgcaagatgaaaaaaaaattaataatttttttatttatttttatatgcatatttaagttaagggtaaatac

SEQ ID NO: 42977 - DNA, 2132 bp, Cannabis sativa
cagttaattattacttcatattaaaaagaaaaaaaaaaattaagtttgttcaaatttaaacaaaaactaagaaaaaggccaattttgatgtgttgtttgaactaaaataggcctcaattaatggcagactatttttgtaataagttaaccaatgtcaaagctttgaacttttttctttaacttctaagatcagaaacaataaactattaatagataagaaaagaaaagtaaataaatgtagctaaaaaaacacatcatttacaacacattattctaaggcataaaattctcaaagcttcaatcttttttgcaccatttctaccctaaatggtctaacattttcattctctttctctctttttgtaggttttttttcatgaacctacaatttgtgatattttaccatattgatttagatttgatttttctaatttttcatatatcttgatgagaaattagaaaaatcaaaatcaaaatcaaaactttttctttccattcagcttatgaggcctaaaatcttgagttttaaagagttgttgattaatgaagttatgtatttcctctcttgagttttttttcactgggtttttctcgaggggtttcaccaaggtatcgctctagccttttttaaggaaaaaaaatgcaagatctttctcataaacacatttgtagcctcaacccaatgcacaaatcgacgcctcaaagcgctacaacctttgtctaccaagcgaaattggcaaaaattctttgcaatgtgtgtttgacatggtgtaaaagagtcacaaatcatgaccttaccataaaaatagacaagccttcaaaagaaaaccattacacatgcaagattgatttgacaaacacacaatgttggggtaagaaaggcctaaaatcctttgacatagtagaaggaacacgcgtagatatcttttgggattttcgccaggcaaaattctctacctcttcctcttcctcctcctcacccgagccatgctcggattactatgttgccttggtacatgataatgaggcggtattgttgctaggcgatttgaagaatgatgcatacaagagaactaggtcaaggccttgtttggatgaagctaccttgctacacaagaaagagaatgtttgtggtaaaagattgttttgcactaaagctatgttgaaatatggagacaaaataagaggagaacatgacattgttattgagaactctctttcagggcctggtgatcctgagatgtggatcagtgtcgaagggacggttgtgattcgggttatgaacttgaattggagatttagagggaatgagactataatggtgaatagtgtgccattggagatcttttgggatgttcatgattggttgtttagtagccctaaaactggccatggaattggtttgttcattttcaaacttggtacattggaacaagaagccaattccaatgtcattactgattttgattcaagatacttttgttgcaatggaagtaaacatgatcatgttgactcacctaaaagtacctctgagttttgtcattttctatatgcttggaaagttgagtaagaatatttcttgtcaagattaatgtatcatttaattaaaattcagttcccaattattatttattgtagtaaatgtaatacatatggtactttagtaatgtaattcagtatatttttttactaattaaaaataatttttgatcttttctggttagaggaaaagattaactatcttttgacacaagtatctctttagcaatgattttgctaccgtgaaaatactttatttagtataggaataaagaatttgtccaaaattggatttctttgcaaattttatgggctattactcacgagttttttagtcgtatcttcgtcattattgtttctaaaaattgctctaattcaaaatattggacaaaatttttgtaaaaatagtacacttgtgatttttcatagcaaatgagatcagaattgtagcctactattccaagggatacaagaccatcctctagaattcaatctaagttgcaaatgagacaaatacaaaatatagtatacattagtattttcaaatcccaaataaaatgaacattttattggtctccaaacacagtcttctg

SEQ ID NO: 42978 - DNA, 1317 bp, Cannabis sativa
taatcagcaaaggactcactacaatttcttatccgatggctggatcgatttccacgatataaggggagagaaatatatctaaccggagaaagctacgccggtcattatgtgcctcaattagctagagaaatcatgttgtacaacaaacagtccaagcacccaattaatctaagaggaataatggtatattaattttattttattttttagaattttttgtaaatataaaaaactaaaagaaaaaaataaaaaataaaaaatgaatatttgggggaaattaaattgcaggtgggaaatgcagtgacagacaactactatgataacgtagggacagtaacgtattggtggagccatgcgatgatatctgataaaacctacaaacagttaataaacacgtgtgactttcgccgacaaaaagagtcagacgagtgtgaaactctatacagttacgccatggataaggagtttggtaacattgaccagtacaacatttatgctcctccatgtaacaactccgatggtagcaccatcaccaccaccaccactcgccaatccactatgcgtttgcctcatcgaccccatcaccattcatccgtacgtaagctttagtatacttaattatattaatatatgtacaccttttttatatgtatgtaaatgtagtatattgattgagtattatatatgtgtaaaataaatatataagattaagttccggaggcagttgtctgggtatgatccttgtacggagaagtatgctgagatttactacaataggcctgatgtgcagagggcacttcatgctaactttacaaaaattccttataaatggactgcttgcaggttagtacgtattatatatatatacatcaaatttggaattattattgtatctcatttgtgttttccctgatcatttaattaacactatttttttcatgcgtggaaacctagataaaataatgaattttctaattttattattttttataaagggtgcacgtgtggtgcatcttaagtcccatataaaattagatgtaaatattttctctttttcaaggataaattaattctaattgtagtgtcggtactgtttattttttaaaaataaaaataaaataacagtgatttttctttttctttttctttatttttttctttagaagtctcttgtaacattctgaagtctcaattttggcttatttttactagggaccttttattaaatttaataacatgattgtatttttttttagaaaatacaagatcgatcgttttatattgtcatgtcgcttttcatagtttgttgctaatact

SEQ ID NO: 42979 - DNA, 7216 bp, Cannabis sativa
tttttcttttttttttttggggggggggggggtacgtcaaatatttgttttattgattttgttattgtaaggaaactataattttatttgtttaattagttttttctaatgataggaacaagtcaactgaacctttttgagcatgcatgaacgtggattctacgaactatagcgtttattgatcatcttttggcccttaatcaaagggttactataaggcagagactttgtccaagtattgcatttagttattttctctcaatttcctacttttaaggttctatcatcttttctttcgccaagctttgcacacaggtttttctcttcaaccaagcacttctccttcatttttttttcttctcaattcataagatttttaaggtagtgtttcaatcctatattagatattttctcattaatacattaataatctttttctgggttgttgtttttaatccttcacaatttaaattctgtctgctaatatttatatgaacgtttcctctgttcaaaattgatctctattttgtatataattttcctctgctaatattgacttttcgaacaataatgaatatccaatcatgatgggatatataaagtctttttgtggtgatctgttctgccttagtttattattatatctattggaataatttatctttttaacatgtttgctacagatattttaatgaccggctattcattctaattttcccggagtttttctttataattaaacaaaagcttcatattaattaaaccaacccaataatcttaagattttaatttcaagaataatctttggtatttacaggcatggattttgtagattcaaagaggaagaacaatttttctgtgaggatctttttggctgctttcctagttagtctttcaattttctggttcaagtcaccaacttatagctctcccaacttggtatgtttctcattttatatgcaaatctaagacttgtcatcatataattaatatgtgaattctaagaaattccattttaaatgaatttatctctatttctgtcacataatttgcataagtaaaaggttttgttatatttctagttctctcgcccagaaggtggagtaacacatgttctggtaactggtggagctggctatataggttctcatgcttcacttaggctcttaaaggactcataccgtgttaccatagtggtatgccatcccataaactcatcacaaatgttttaaactttgttcaatcttattgtgttttaactttgctcatcacattttgcaggataatttatctagaggaaacttgggtgctgttaaggttcttaaagagttatttccagagccaggaaggcttcagtttatttatgctgacttgggggacaaacaagctgtatcctaactaaatcatgctctaaatgaagtcatataaatatatattcagttatatacaaattcaaaatcatgttcttccttcactggttttgttaggttaataaaattttcagtgaaaatgcatttgatgcagtgatgcactttgcagctgttgcatatgttggagaaagtacacttcagcctcttaggtaattttattttatttcaacttctaaattgtggtttggttattatgtataggactgcaaattcaacttaaatcttatatgcatttttctatacatttcagatattatcacaatatcacatcaaacacccttctggttttggaggccatggcagctcacaaggtcaagactttgatctactctagtacatgtgcaacatatggagaacctgaaaagatgccgattacagaagaaaccgaacaagtgagagattcaatatcttggtttctcttattgaatatggttccctatcttgaaactgcacttcatacttaaccttataaatgtcaataggacataactttggatttgctataaaagaaaacacttggcttttttgttttgtctcttgagttttattgcagtaagagttatgctcaccaaaacaacatactaatgtcaaccctctacactactactgaattatgtttggtttcctagaaagacaagaaagtaaaaacagagaatctcatgcaccagaaatcatatttatatttatgacctggttttcggtagaagtccagaaatcatatcctttacatcgtctcgtatgccttttgcaggtgccaattaatccatatggaaaagccaagaaaatggctgaagatatcatattggacttctccaaaaactcagatatggctatcatgatcttaaggttggtgatgatgctaagatttattctttttctaaaattatttagtttgctaaaatttgaagctgattctcttcagcacactctgtacagcaaacatagtattctagataacttttcttttgcttagatagaatggacactaacaaatgatttgctacatcaacaggtatttcaatgtgattgggtcagacccagagggaagacttggagaagctcctaggcctgaactacgtgaacaaggtcgaatatctggtgcatgctttgatgcagctagaggaattattccaggactgaaggtactttacccagcttttcatgctctcttatccacttttagatcaggttttatcatccaatcactctagtaaattttgttgatttcaggtgaaaggaacagactataaaaccactgatggtacctgcgtaagggactacatagacgtcaccgatctggttgatgctcatgtgaaagctcttaccaatgcaaaacctgggaaagttggcatctataatgttggaactggaaaaggttggcattctgattctctctttagtttgaacaatgcatgtcctgcttgtttctccttcattgttaatattctttgaattacaggtagatcagtaagggagtttgtggaggcatgtaagaaggcaacaggggtggacataaaggtcgagtaccttgaccgaaggccaggggactatgctgaagtttacagcgatccttccaagatagcacaagagttgaattggactgccaagtatacaaaccttcaagagagcttagggattgcctggaaatggcaaagctcacacctaaatggttatggccctcaaaccctttgaagtttgatatgtttctcactcatgatagcaagtcaggctggagtagaatccccaatatgccattggagaggattatgaatattcattggtgggagtccttcccctttttgttgataaggagcttagaaaagtaggtcatgatactatgctgcagctcccactccaaaaaataaagagaaaaacagaagaaaacacaaatccttgaccctagattatatttatagaaacatttgatacttagactacacgtgtatacaaattcctgtttcctaaattaagatttatgttactatttctgaaaagttctcaaaatcagtgtcatattcatgattccttatcaatctcccaggatatagcgtaagtgtttttttttttcttttttttttcgaaaaaaaactggtagaaataagaatagagaagcatcaaaccaatacagtattttaaaagagcataagccattcttgaacttacaaaaatgcttacgaaaatgagcaatttgtcaagtttatatagtcatttacttatattgtttaattattacaatattttgaacaaacttgacagcaggattaggatgcgttgccctttatattttcttattctggctgttttggagaagtttctagaaggaaatttgtcttaaggcatatagttccaggttgataacaaaaaaaagcttagctttggaaacagcctaatctaccaacatcaaagaatgcataaagcggcctcaacaactctcctcgtacatttgcaacaaagacaatatacattcctcaagtatgaagtagaaaagctgtaaaacataatttagtaatttgaaaaacattgtcaaactataagacatcaagtagaaaatatttcatatcagacacacgatttctacttctcatttcagcagtcaaactttttaatatgttgcgtacaatggctgttctaggttgagcagcatcatcagaaagaaaagaatgtacctggtttccgacttcaatccagctgtatcctggttgcttctccgttcttctctcttccatcaacattcttattctttgaacttctttccatctgccggcctcagcatgaatgtttgacaagagcacataatttgaagctctatgaggctcttgttctaaaagcttctcagcagcatacttaccaatttctagattccgatgtattcttgcagctccaagcaatgccccccatataccaggagttgtcttgactttcatctccaacaccattttgaaagcttcttctaacctaccagctcggccaagcaagtcaaccatgcaagcatagtgttcaggcaacggttctatcttgtatatttcagtcatactcctaaacaattccagaccttgagtaataagcccagcatgactgcatgctgacaacacaccaatgaaggtgacctgatccggagccatcccttctatcagcagtttttcgaaaatcccaactgcctctttaccatatccatttaaagcataaccggcaatcaaagaattccaagaaacaatgtcaatgtttcccgtttctttaaacatcagttcagcattgaaaacctttccacatttcgcgtacatggtgatgagtgcattgcagacaaacaaatcagttccataaccacttttcacgatcaaatggtgaagttgctccccaatttgcaaagcggcaagattggcacatgcacttagtccgcatgacagagttgactgatcgggtcttcttccttcctttctcatcatcaaaaaacactttaaagcatcgacgtataacccattttgcaataacccagagatcagagaattccaagatataatgttcttttttcccattacattaaagatctcaaatgctttatccatcatacctgcttgagcataaccagtgatcatggtattccaagagactaaatccttatttctcatttgattaaacaaatattgagcttctgtcattctaccacattgagcatacccagcaatcatggtgttccaacaaacaacatctcgcgtgccaatatgattgaagatttcacttgcttcatccattcttttactttgtacatatccagaaatcattgcagtttgagctgcaatattcttgtaaggcatctggtgaagtagttgtcttgcttcatcaagctttccaacacgaacatacccatttatcattgtggtccatgatatagaatccctctctggcatctctgagaacagtttaacggccttatcaatttggtggtcttgaacatacgctgcaagcattgcattccaagaaactacatttctacttggcatctgttcaaagagattctgtgcttctgcaatcctgccattacgggcgaacccataaagcattgtaacacatgtaacaacgttcggttctggcatcttcttaaagaagttccaagcagaatccagatcgccaacctcaacaaacccatccactatcaaattccacgaaaccacatccctctcacccatttcctcaaaaaactgcaccccaagatgcatatctccattcttggtataccctgccaacatagagttccaagaaactaaatcctttactggcatttcgtcaaacaatcttttagcctcatcatacaaccttttcttagaataacctgctatcatggcattccaacaaactgtatctcgcttatcaggaagtaaactaaacagttgtttagccttttgaagctcgccgttacgtgtatagcaagtgatcattaaagtccaagagaaaagatcccttttaggcattttaacaaacatgtcgtaggcttcctctgccttatcattatgaaggtagccagcaatcatggcattccaagaaactaaatttctacgaggcattttatcaaacaggtggcgtgcatccctaattctaccattcttggcataggcagagatcatagaattgtaggttacagtattcttttgggtcatctgtgagaaaagtttaatggcttcttcaatccgaccagattttcccaactgggtaatcttaagattatgattaaaaacaagggtgcccattgcaaggtagcctgattttccaatttcctccaactaaagaataagataaaatatcaatcaatccaaaaaagttcacaggctaaagttaccaccattaaacaccacaggttaacttaagctatcaagcaccaaaacgacatcgtctacgtccgttcagttgtccaaatcgacttcattaccacctgcgcttcactcacagtcacagacaggcgcatgttctgctgtgtgcctgagattattcagtcgcttaaatctgagaagaatctgggccgtaggatcattctgggtctattgatggctgtcgtatcgctatttgtcaaattctctttcctgagtagccacgtggatgttgatttcacagaccttcaaggatgactcggccatggctgctctacaggccttaaccgagtcctaaactgccatgcctaaacgtgttcttgagagattttctgttagtaaattaattaaatttcattcccattttaggtaatcatcgtcgccggcaaccatgggcgattcagtggcaatgatttattatgaagttggtcaccataagaatctctgtaatgatttattaagttttcttgatttcattatttttattgtttttgctgttttgtaatgttttaataactgtaccacagtttttttcttttctagcacattcgccacatacagataatttaatgttttgttgcaaatgcattcccccactgtgtccgatattatcaaagtatatggttgattgtacaaaggacggccatatcggatcccgtggtagcgacttcagtcggaggtctgtaagtgatggcgcaaatcgctagtttgtcactctgatgccgaaggtttttgcgggatggccatttatagtatcttaaatgtttgagtcatttttggagggaaatttcaatttctatgcttacattagggaataattttttccttaaacttaaaatagaaaatattggtaaaatgggataacattttcttaagggaaatttgaattcctatacttacataacctaaaaatttgtcccctaaatg

SEQ ID NO: 42980 - DNA, 3819 bp, Cannabis sativa
taaaaataatttaatttgatttttagtctttctgattatactcttgtaattgtactataaaatattaattggagttgaagatgataataatttgaggttaacaaggtgaaaaaattgaaaaaactcatttaaaatgaaaatgtaattggaatattatatatattttttgttttatgtatattgcaatgacgaaaatacccaaaacccgctaattaatttctcgagcgatctcgagaagcttcccaaacccctacaattcccagacaacatactaaaagcctaaaaccctaaaccccaatccattcattgtcttaactcaactccaaactactcacctttcccttcattcatctcactctactccctcaccatgcacaggctttccaaccgatccctctcctctgtattgcgccatggcggttcacgttatcgtaacgctgctgctccaatttcttctacctcttcactctatgaaacggtacatttcaccattgttatactttcgtttgcgtactcactcaattgcctcctcttttcattttctgctgctgcatttggttgtttggttcatgtatttcaatcgattacgaatttcattttgttggtgctgtctctgttttcattttagtattatctagataatccgaggtagaaatgctgaatttttactgcttccagctaattgcttgtctgtgctagagaagtatattcatttttttggtaaaccattttgccgttgattgatcttataccacggtatttattgtgttatggtgatttcgtatgtccaacttcagttatttgttgtatataaattcggtttggattatttttattagatgtattacatttatacatatatgtgcgtgtgttctgatatatttcaatgtgtttggctatgcgtaggtcgcagaaagagattccaaacaaagatggtactcggtattaaccaccgggaatcgtactgccatcaattctccaactcagataaacttaaaaaatgacttctttttgagaagccgatatgagtcgactgcagcagcctctgattcatcagccacaccaccagctgagaagtatgaatatcaggcagaggtatgtatttaaatgctgtttgataccactttgcaagtttcaacttcatcaaaattttaaaacatttgccccttttacgcaggtcagtcgccttatggacctcattgtgaacagcttatatagtaacaaagaggtgtttcttagggagcttatcaggtatttgtgtgtttcctcatgctaccgagtgtgccttcttttgttgtcttgattctcattcagtaacttcagttagaactagaggactgctatagtccatgttggcaggctcaaggggcagttgccctctgctccggacctggtctggcatgtttttttgggtggactatgttgggcatgcgcatcaggctgtgttattgtgcttaatagcatgatggatagggcctggtgagggcttgttgacctgccactgctacacgtggaatttctcatgccttgtacccctggttgacctagcaaaaagacacatatgcacatgataattttttaatgatgaatggtatagaattcagaaaatgtgtttataaaatagatatcgttgcatttttgctgaacttggttttggtgtactttttttttattatttatttatttttaaaagtctatcttgaatcatatgtcagctccaattctcaaattcttcgatcttgaatcatagaatggtttccctatctatatgatttcattgttctgccaagagcatggttgaatgagataaaatggttgggatggttttaataattttctttactttcggttttattatatttacagtgttggttctggagcaagagtatttttttgggtgtttgttatattcatagacatcttttttaatattcaaattggacagtgttagtttacgtgaagtatctgaccttcttaatgtatgaatctttatatagtaatgcaagtgatgctctggacaagctgcgttttcttagtgtaacagagcctcagttattgaaggatgcagcagatcttgatattcgcatccaaactgataaagacaatgggattataacaatcacgtaagcctaatcagcttctgttaccagattgctcaattttttatttttttgtggaaagaagcctttcaattctttctttttcttgcagtgattctggtattggtatgactcgacaagatcttattgactgtcttggaacaattgcacaaagtggaactgcaaagttcttgaaagcgttgaaggtctaatacttgaactagtgtagttggacttttgtttaagttgctgcttgtgctgataatagtataatattttacaggatagcaaggatgctggcggtgacaataatttgattggccaatttggtgttggtttctattcagcattcctggttgccgatcgagtaagttctttagtgggagttgcaaacacttgggctattatgtttttttttgtaattcttgcctcatttgtaaaattttttattgtctttgcaaccttcttgcttgtaggttgttgtctctacaaagagcccaaaatctgataaacagtatgtatgggaaggagaggctaatgctagtgcatatacaattcgagaggaaacagaccctgagaatctaattcctagaggaacacgcctaactttgtacctaaaggtcagcagaaaaaaattgctgcctaacagctcttttggtttgatccttcaaactgagttgtgtgcttccaatctattttcagcgtgatgacaaaggttttgcacatccagaacggattcagaagcttgtaaagaactattcgcagtttgtttctttcccaatttacacttggcaggaaaaggggtatactaaggaggtaaagctatcctgtacacatgatgtgttgctctttagatacacccatcttgcaaatgttatatgtgtttctctccaaaaagtaaaatgtttcgtgtatattgggcttccaggttgaggttgatgaggatccaactgaagcaaaaaaggatgaacaagatgaaaagaccgaggtactcatttctgcttcttacactttttttttttcagttgacaaacttttagttgttataaaattcagcttaccatttttcgctgtggacttggttcattattatattgcaacagaagaagaagaaaactaagactgttgttgaaaagtactgggactgggacctcactaatgagacccaaccactatgggtaagcattagcttttatttatgtgtgttcggcatgcccagtctggtgcacactgcgtggtgtggctgcagcgatgcacacctgtggcgtgtgatggttgccacttgtggtgggaggaatactgattcatcatttgtttaactgtgcagctccgcagccctaaggatgttaccacagaggattacaacgagttctacaagaaaacttttaatgagtatctagatcctcttgcttcatcacactttacaacggaggtacagatgatatatgattattttttaacaggagtcactgaatatcaaaaacttattacacgaaatcctatatatttaactaagcctaatatagatatgctaccctccattaaagcgtaacattattttcctacactagaacacaatattacgccatgcatttcttattttgtcttataaggtaccattgaattagatcttttatctttcatggtttcttttcacatttgaaataggaaacaagatttgaaatgtcttaccaagcaacctcaaatctgtttttttttt

SEQ ID NO: 42981 - DNA, 4306 bp, Cannabis sativa
caggaaagaactggaggaaagataatctatagtaaagggggagtaatatttcttttcagaggcagaaactacaactacagaactcggccgaagtttcctctcatgttatggaaacctattacacctgtatatcctaggctcattccgcggattcctgaaggtctgacatcagaagaggcatttgaaatgcgcaagaagggacagaatctgataccaatatgcaagctaggtatcttttttgttcgattttcatagatgatttcaactttggattaatggactttaaagtatgagtaaatgaaaaagaaaggaaacttacaactgcaatgacctttgagacagggaaaaatggtgtgtattgtgacctggtacaacatgtcagagaagcgtttgaagagtgtgaactagtacggattaattgccaaggaatgaatggtagtgattaccgaaagataggtgctaagctaaaggtctgcaaatttaatttgtttgattattcacatatttcttatatgaataacagaatacaaatgtgataaataaataaaagtgcttctcttaatttgaatgtaggatcttgtcccttgtgtgctgttatcatttgctaacgagcacatacttatttggagaggacgtaattggacattctccctctcaaaaccagaaacggattctgaggatgccaaggaatctggtattaatagcgaaggttccgttgcttcaactatggaaaacaaattagtaaccacgatgacaggctcaattagtgattcaagttctgatttgctcagtacaaacacaatgcaaagaggatttgaagttatgggtacagagggaaatgaggatttatcatctgtacaacatgttgaattatcctcttcaactggtgaagtttcaaatgaagtaacgacatttgaaactgaaaatagatctgatattaaaagccctgtagatgatgtttcaggagctacgagggaaatgtactacaatgcaagtgtatcagatagtcctggcaggactgatgtggagcctcctattaatactgatgcatctagaactgaaaccatattggatatagccccagatgatcaattgtcgatgacaaggtcaggatctgatattttaccgcccgatgttggtagtattgaaacgaaattggactctgctgcaacagtttccttagctaatgagaagcagcaagttacttcagaagccttgctagatgctagccagccatcaaagatttatgcgccttgtacagagggagtattagcactcttgcaacaagctgttgagggtgggatggcgattgttttagatgatccacagttagatgctgacattgtctatcaaaagacagttgccttttctcagtctgctccccctggccctgtctttaagcttcagccaaagaaagtgcggatcaaaacggctgaaaaagaagataacaagaagcaaaatgtcgaggacgtggaaccaaagaagacattaacagtaggtgtaaaggaaagaaacacgaaaaaggaaatattgacagtggctgcaaaggaaagaaacacaaaaaggggttcaaaaattcttaggaaaaatgattttgatgaacctttacaaaatgttgtacctttgggaagcttaagagttgatgaactagccaaactattagcatgatgtatatcatttctgaaatgtattatatcaataattacattcattcattaccttaagctataaagttctgcatttacttttatgcagctcctatatttgtcaattgttttggctttaatgaaattttccgtttcaaatgaatagagtgaaacaacagcaatagtcataaccctcttttttcttgcggcttgatgataaatgacagtgttcatgtacaactttgcatcaattgttttaactaatgtagttttctgttttggcttcatttgtaactgaatgttgttccgaaacctctactaggcaggcatcaatggtaagcttctttcataaatatttgtacaacttacaaacaaaataagtataggcaacaaatttggaaatatttattaaaatgctaaactcgtgttcttagtttacttcccatcaacttttccaggcatcacattatgtccaacttcgtccccatcgtttacatatcttttccaaaaccagtggttttggaacaaaagataaatctcttcaataggaacttgctttgtttcaggcaagaggaaatagatgaagctgctcataatgaatatcaaaccagcaaatagcagaaagatcccatattgaagatggcaaagagatacaaggaaacactgtgctataagagctgtgaagaaaaggttgacacacaccaccacactttgtccagctgatcttgtttccaaggggaagagctcactcggaactagccaccccagagggccccaagaccttccgtaacacagaacgaattgaaagatcagaataacaaggaaaattccaattcccttgggaagaatctctccttgtccgaatttcagagctagagttatggccacagcaatctgtaaatgaaaaaggttggtaagtgctatgacataacattatggtttgctaaatgtaaaattggacttgtaaattttgaagttgatttaccaagcagcatatcatttcacaaccagcttccaagaagaaagctcttctgccaaccttgtcaacgaatcccatcgaaatgaatgtggcaacaacaagggctacactggtgatcacagaggaatacagagatgcacctgaaccaaaacccaagctctgaaatataacaggagcgtagaagagtatggaattcatgccagtgagctgttggaaggcaggaattcccagagccccaagaaccaactgaggacggtttttcctttgaaggagattcctgaaagggtgctttatagctcttgctgcattgctggcatcgatcaaatcagcaaactcggcatcaacttttgtagttcctctaactttctcaagaacttttcttccttcatctaatctgccttgttctacaagactgtttggtgtctcaggaaggaagagacccccaatgaacataagagtagctggaactgtagccaaaccaagtgataatctccagccccacggatggatcttttcagttccatagtttattaagtttgctactaggattcctaagcaggttgtcagctgaaatagttggttaactgctccacgaattttcgcaggagccatttctgataggtacaagggaactgcctgcacaatcggaacaagaaagcattactttttagtgaatggacaagtttcttattataagtgtctttcgatcattgttttgttagtaatgtagacttacttgattgccaaatccaatgccgattccaaggaagattcttcctaggatcaacatggcaatgttaaccgcagatgcatttaggatcgctcctatgaagaagctgattgatccaacgatgatgctagctcgcctgcctttgtttctagtaacataagaggcagcaaaagtagaaacaagcccagcaaagtacaaggaggaagtaaacagagtcagaatctgattatcatatttacaataatctgtttctttcaaatgcagttgcttccttctatacacttttgggaaaaactctttcaagaaatcgtccatggaagtcactccacctaaatttaccataaaaaagtatcattgttagtttgttgcagtagtgtaaaactaaaggaaaagtgtaagttttgttactttaatcctgagaattagtaagcaaacagtattatgggactagttttagtttgaatcttctcgtttgttttcatggataaatgaaatcattaaaagacgtcattattgttaggtgaggcagcaagcagcacatgattgacttttttagcatttggaaaaatacttgatattatggacaaaaatgagctattaaattattagctatctccaacaaatttcaaaaccaggacagtaaagtctaaaagagaaaggtttaagtgaagagttcaaaccaatcttgttaatcatttcatcaaacaaggcccatttgtactctactcacaagttacatttactattctcatggaaattaaatgtcatataatcatttctgggttttcaaataatatacatcatgaaaaaggataatgaattttgtaatgaacagctagcatttcaaagatgaaaaaaaagcagtatactttgatctcatgaagtttatttcatcaaaaacccagatcaaggaacaggctaaagttttaagatttacagagaaaatcaaca

SEQ ID NO: 42982 - DNA, 2345 bp, Cannabis sativa
agcacataatgtcaaggagaatgataaagcaaaaggcatgtattccacactctttgttttaatcacaattctctgtaaaaaaaaaacagagaagtttgttattagaaatgataaattaattaatattgaattgaaatttcacataattaattaattagtaaattggtgataaattaccataatactaagaggagcagcaaaaacacaaacagaaaacactgcacaaatccacccaacagctgtgacacgatgagaacggtttgggattatgagggaagtagatactaagatcaatccataagctccaatgttgaacagaatcacaagcttaaatgtataaatctgaattttatataaatatatatgtaaagaagaagaagaagaaaaattaattagatgtctatatatgtagttttcttcatacattaattagaagaagaaaattaattaattaatgtattaagtaccctgattgctcttgaggcatatatgaggtagacaatgagataaatggtctctatggctgtaccaacagaattgatagtaatgatcatgaagccattggtcttgagaaaaccatagtatagggtcagcatagcactaaataatgctactgaatatggtatagattgaaacccctcggtggacttcttgctccaaattctgtagaacgttggcctatataataatatatataattagttgagtttaatcaagtatgatttgttacttaattatatatatatattataatgagagagtacttacagtggggctagatagacaacgaaggacactgcgttacctgttgaataaagaatgaaaatgaaaataataataataattagtggaattgttaaatgaataattaatacaagaattaaataattagggaagggaagtataccaagaatgccaaaaataacagccatgtgggaagcgttcatggctgtcattcttggcttcaaagcaatttaattgagagaaagagaagagttgttatttgtgatgagatgaaattattataagagagaagagtatatatatatatatatatgagttgaaaagggtatggagttttagatgagttgattcgggacgttttggccttaaaattgaacaaactgcgtgtatatgattaggatttattacatgagttcagccaaatgagctgggaaaggtccctttgcagctgcttacctttgcttgtatacatttcatggttctctactacttcccatgcatgaaatatccatgtatgtatatatgtatgtatctatctgcatatatcatgtattctatctacatatatacatggctcggctcggctcggctcggctactctacctacctacatatacagcttatagctgatccaaccgcctttattattaccttaaaaaccatatattgtattatattagggtaaatagccacataagtacgtacctaaagttttgagtttgtgagtggcataaatttaattatttttttagtgacataagtacccaatgtttgtaaaactgtaattttgctctattttcgttagtacaggctctgttttaaatttattaaaagaagatttggaagaaaccgatgctacatatttccatctagactaaataatttagaatctgagttttatatgtgccttgtttaagacaatagcagattctgcactgatgaagctgaaagaaaattacagttttataaacattaggtacttataccgtaaaaaaaaataattgagtttatgccgcttacaaattcaaaattttgattacttatgtcactatttatcttatatattaattaatattagtaaatcttttaagttttccttatttggagtacagtacatatcatgtttaatgagattttgagtttattataattaaattaattaagcagcttgaaatgtaaatgtgagagtggcttgaagccatttggtgacgtgaagcaaatgattaattaatttaataaacaatattatattaaaaagagggtgtgagtcgtggaggccaagactttggtttacgtttaccaaagggagaggtgggagtggcacgtgacatatgatatgtcgtatatacctcatcactactatagccgttacgttcaaacggtttctattttcttcttcttcttcttttctttctttttaattacactattgttttttgtaccatcattattcaagaaccaggccaattttggtcaattcctatacatattatgcatttatatatgatatgtgtatatatttagtagctgataattcctgattattacaaaaagaaattaagaaaacagcaaccattaaaagaaatcttaattttacacat

SEQ ID NO: 42983 - DNA, 2708 bp, Cannabis sativa
tttttttttttttttttttttttttttttttctggccatgtttattgaccttccttgagattagcttaggtgtggtttggtcggatttgtattttactattgcaattagtctagttttgcacgttttctttttgtatatgcatgtgacatagttttgagtgttgtagtcttgttcgcgtgacatgattttattttgtttcgttgttgattcatatttgttctttgatggcttgccatcaaatcgttgttagtagttacgaataacaagttctttgcgactgaatcaattttttttttttgaaacccgactgaattagttgctagtagtgcagttacgtatcttaaacaatagttgactactcaagttacgagattaaatgaacgtgctgcaacggtttctaccgttgtgtcttcttagcattggattaaacataatgtaggtattcttactgttaattgtgatgctataatttttttaatttgatttaattttagtttttttatcaaacgatttaaaaattaaacggctaattatttgactcgtttttctaattctaatctcagtcgtgtctccaacgtacccaattaaattgtaggctattattttagttgattaccattaatcaataaaattccattatttattaaaaaacctaaaaatgattttaaaaaaagtatatttgaaaaagaaaaatggttcattgtgatgtaaatgtaatgtagacacgttaagaattagtttgttgatagaacatggcattgggcattggcaatggcatgcatgccctagtccctacaccatttcctctataaaaaatatctttttctttagtcactctcaagtttcaacacaataactaaaccatgaccaaaactaaaactcaccaccaccccctattttaatctatgtctctctctctctctttcttcaccactttttttcttattattattatttttattatttcattttactattctataaaataatattccaaagtaacatatcacacatacacacacacccttcttcttcttcttcttcttcccatactttatatatatatctttatttctctctctcaaatcatcacaatccaaaaatcacattaattacactttcccatttcaaagtttcaatctttatagcaaaagagagcatagcagagcagccatggactggttttcatggctgtccaaaacagggcttgaaccaacactagtctaccagtacggactagcctttgctcaaaacgagcttgaagaagaagacatagtctacttcaaccatgaatttcttcaaagcatgggaatctccatagccaaacacaggcttgagatcttaaagctctcaaggaaagaaatcaacaagcttaataatggaacaagacccatgactaccagacttcttgtggccattaatagaactaagagatgtttggctaagtgtataaagatgttaacaacaactcacaaagaagattcatcctcatcttcagctcttatggttcttccaaggcctacttatggaacaagattcagaggagctatgcttaagaggaataagaaattcatttctgccaaacaggggagattgcttcaactcacaaatgggtctccatctccaatggttaggtatgggagtatgactagaattgaaagcttttcaagcccagttgtgtatgatctcaaaaaagagcagaaaattcatgaacaagaagaagaagaagaagaagaagatcaagatggttattggtctactggtgttgaagagatcaggtgggatactatgtttcaggatttgaaacccacatgaatttttttctttcattgttttgattttgatgataaacataaaagaattattgttaatttaatggtgtgagatgggtttttgtgttcttccaccataggtaaatggattttgtgttcttctttctttgagtattttaatttttatttggttaaatttgtctctgatttttttttttttgagtattttaatttaatatttttaacattttgttcttgggcctattattctcttttgtatgattctgttatttatgtttgagtaaactgaaatcaccattaattgtggaagaaatgattatgtcggttcaaaaaaaataaataaaaggagaagaaacatggctatgaattgcactccacttgaaattgaattcaatgcttttggctttatcttcctatttttttttttctttgggtggtgaagaaaagaagctacttactttacttaacatgaggtttctttgtattataccagtcaaaaatatattaaataaaagaagaaaaagtttagtccatgtgtctgtcgattttcttgactttgacaaattcacagccttttgaagctttgattttgagttggaaagctagccataaaccacatatcataatagagattaataaggattatataatgagttctgtattaacatggtgtaataacataaactatagatacctaaaagcaagtctctaaccaagttctagggtgttgcctaaataccaaatttgttatttttaagaaaatcttatacaatattgtatttttgaaaaaaaaattaaaagcttctttgtaagtagaaaaaaatagcattttttaaaattaggagtcttattaagtggagatcctaaacataggcctaactcgtttgtgccttggaataattaaggtgaacaaa

SEQ ID NO: 42984 - DNA, 3523 bp, Cannabis sativa
gatttcttgtttgactcagcttctataagctcttttttagcttttaagaattagaaagtctcttcgaaaaaagctagggtttttagtttttccaaaacgatttttgagatcggtttttaatgatatccaaacggtttgaaaataaccttttgattttcatataatagttatccaaacagaaaaaataagttcttcgtcttcataacacaggacagaagccttagagtaacgcacaacctagccgtcttcggtggatgtggcctagttctttccataatcactgggctattcggaatcaatgttgatggaatccccggtgcacaaaacacaccatatgcattcgggctattcgcagccatccttttcggtgtgggaatcatcctaatcataatcgggttgatttatcttggactaaaacaaccgatcaccgaagcacaagttcgagttaggaagatggaactacaagagttggttaagatgtttcagcatgaggcagaaactcatgcacaggttcgtaacaaagtttctcggaataacttgcccccaacggccggtgatttctttccgagtaattcagattatgttctcatccaatgagttcacttgtctgaaacaatttttttcttttcttttttgctaaatatttatgtagttggaattggaaagacatgatccacatgaagagactatggaagaaggggatagtacttctcatgataccccaaaagtgattagacatgataatccagtttagttgaagcaacaataataagaagatatgtatattataagaatgtctatcgtaatctctgtgtttttcggcatttgtatcgtaatattctaattttttgtacattgcagtttttaagaaattttgaataatttacacaaggttcaaatattataggaaaattttacaatgcactcctttaaaatggatatattgatgcacccctatttgttttagcatccgaaataattttttagtcagattttttctcatggtcatgtacgttatagttatttaagacatcatgcaaaattttaagaaatttagaaaagtttaacacgcagaaaactatgtttaaacagtgtattgcacgagtgactattttattttatacgcgtgtaaaatagactgtttgatcttaaatacctataacgtatatgaatatagactaaaaaattcttacatcccttttaagagagtgcattgtagaatcacctaatattatatatattccacatgtttgaactttaattttctttctaaattatttatgaatttataaaataaaatgagtgtgttccttctttatacttacaatatacataaagaatactctcatttaccccccatattatactatttgaattgaaatatcaaacttaaagttgaaaaatcttttggtatttacttgagttggtgtttcattattatgatttcagtacatgtaatccaaagaaagtagaagaaaagatgaaagaatattatggtttggaaattataaaagaaagaatgtaaagattagttaccattttttgcttcattacaaaatgtcagtattgacaattataaataataccattattttctttttctttctctgtatgattcttcttttagggggtaaactttactcaaacaaacagaaaattgatgttctaaaagctcaaagagatcataaaattttacaaaattttccaaaataatttttatcaatatttaagagactattgatcacagccaaattagcttcttattggcttaagtttggaattatattataccccttttctttttactatatatatgtatctaaatcaagtttacatgaagaagaagaagatgaaaaagttgggaagagaagataatatttgaccaaaaggaaactaatgccgacaagaaaagaaggaactctaatattgggaagtagaaagtctcatatgcaaatacattttgatttgggtgaaaacttgttatataggtcaacaattataagacttgcacatcaagtcactccgatcacacaaaattactcgttcccttttcgattctcttgttaaaatctgagacgctcttcatttaagaagagatctcgctagatgttcgcgagcagttgctagagcttgacttattgtctgcaaaaccgaaaatgtattaagaatggtgaaactgggattggttttgtttgtatcatttctgaggagagaatgttcgtacctgctcggacaatggtgcccctgcatccatactgtgacttgccaccttttgtgctataacgttagagtcagtctcgaggatgattctgcacaaagacgagaatacataacatgtaaacgacaaaaaggacggtgttaatgcttcatgcaacagaggaagattgcatacccgccatcaacaatttcatcgaggcataatagaatgagatccaagttctcgagagcctccttcttgtctacattgcctctggaaaaagattgaaaccaatacaaaatggtaaagcattgaaaacatcagggtgaaatatttgaaaatgaacttaaagaaacgaggcatatgcagagattatgaaaacgaaaaagtacaaacctaagaagaagaccaactgcatcaaagaagccctgaagaactgtggccaagatgagttcgttttcttcttctcctcccgtaacaaagaaatgaaggtcttgaacaaacttgtagacaataatatgattctcaagcatagcgatctccgctgtagattaagtataactataagtacatgataacaagaacgaaataaagaaaatgtcgacttgatgagacagattaatatcttatagacttatatgatatctaaactaaaaagcacaaaaagttgttgctcgtgcaatgcttataatcccatttcaaaatccttcaaggaaataaccctattaatatgcaagattcaagaaaaaccgacaggcacgcaaagcttgctaacaactaacaactaggaattttatatttgcattctacttacaactaagagaccacatatttacaggcatacagatcatctaattctaggggatatccaaggaaacaaaagaaaaattacatggcacatggctcacctataaggacttggaaagaaacgccttgacagaaaatcaatagaaagaaaggctaccttctgtccgggcatttgttttctgggtcttggtaaacactgctttctcgaaagcttcctttgtgctattcgtgggccagtcttctgaataatacttgacagcaacacgctttccttcggaatcaaggagaaggatgtttttcacagacgggcatgcctcctgccaaaagaaacaggaaaacgaaaaattaaaaatctaaaaacaaccgaaatcacaaaaccattactcgggtaacagcaaccgactctcaaacttctaatgagaaaataattgcagcaatcacttcatagttgggcaaaaaggttttacaacttcaaacacaacatatacacttcaataaagcacatttcgaaacatagta

SEQ ID NO: 42985 - DNA, 5833 bp, Cannabis sativa
tctaagttgctggcctaactccataattcttctctttctctcctccctatcttcggcggtttcttttgaatgatcaaagagttgggatttccagaacccagttccagattttgataatatttcatcttctgggatttggggtcggtgggtcggtcgtcatgaggagaggcaaatcggaaaaacttgatacgttcctgtccctaagcagacaaagagcgattcagatactaatcggtgtcggttttctatatttattcatggtcagcgttgaaatccccattgttttcaaaactgggttcagtgttgtgtctcaggaccccttgcttcgaacgaatcataggctcaacagtgaggtgaatatggaccaaacagaagcaccgactcgtcctgttgaacgtgtttccataagaaattcgtttcagcccagttcgagtcgagtccccaccaagcataggattctttcgagcttagttttcgatcggaaagcgtttgaagccgggagcaaagacagggcttcggagctttacgagtcggccaaggttgcttgggaagtggggaagcagtattgggaagaactcgaatcgggaaaggtcgcgatcgtctctgacaaggccgtgaatcggtccgagtcgtgcccgccttctgtgtctttatcccggtcggagttttcggctactaagcaagtcatggttatcccatgtggactgactcttggttcccacataactctggtgggcaagcccagagctgcccatgaggaagaggagccgaagatatcactgttgaaagatgggtttgattcggttatggtgtctcagttcaagatggagttgcaggggttaaatgctgtggagggtgaagacccaccaagggttttacattttaatccaaggttgagaggagactggagtggtaagcctgttattgagcagaacacatgctataggatgcaatggggtactgctcataggtgtgaaggatggaaatcaaaggcggatgaagaaactggtaagtgatcttgattgggctatagttacatatatcgtttaatctgaaaatttgaatgcttttgttttttgttcggttccatggttattagagagttaggttgcaatgtttatttggcttgtcttggttttggtggtggttgaaaaaaatgagttactttttgctgtcttttctctaacggctacggattgagaaatttagttggaaagctatatctggttggtgaataatcacaatctttattgatttgagtggtaaagtttctggtatattgaagttgtggtgtgtctgatgcttttattctctttttaagactggggagattgctccataagatgttagtgcctgttatttttttttctagaatttcttttttaattaacgttgaattaaagtggggattagttgctgcagagaaatggaattgttattttgttcataaaaaatctcatctgaacaaaatcttaacgctcatattatttttgagttactttgtttgaaggcttgaaaatattggacatgcgaatttcttttggatactatgtgattattaactcactttctctgttattatttgagtttattcatgtttcctatgctgcccagattgtgtaattctataaattatctgtagttgatggtcaggtaaagtgtgaaaagtggatacgtaatgatgacaatcatcttgaagagaacaaggcaacatggtggttatccaggttaattggccgaacaaaaaaggtgtctgtggactggccgttcccatttgcagaggataagctatttgttttaactcttagcgcaggtttggagggttatcatattaatgttgatggaaggcatgttacctccttcccttaccgcccggtgagtaatgtttatagaacctgtcgatctcttctgtcagtgaatttgaatgttgtctaaaaggttctgataatattacagggatttactcttgaagatgccactggattgtccgtgagtggggacattgatattcattctgtatttgctgctgctttgcccttgtcacatcctagttttgctccacagcagcatcttgagatggcaagaaagtggtgtgctccacctcttcctgagggagaggttgaactcttcattggcatcctttctgcgggtaaccattttgctgagcgaatggcaataaggaagtcttggatgcagcataggcttatcaaatcttcaaatgtggtagctcgtttttttgtagctttggtaagaaactccacacatgcacttttgttgttagtgtttgatgtatcaaacttaggtctaatctatcacattataccattgacagcatggaagaaaggaagtgaatgctgagttaaagaaagaggcggagttttttggtgatattgttattgtgccttacatggataactatgaccttgttgtgttgaaaactgtggccatctgtgaatatggggtgagtgagcatgaacagtcacatattttctattatctaatctttttggaagcctaatcatatcgaatgatgttctttctgttccaggttcgatcagtgtctgctaagtacattatgaaatgtgatgatgatacatttgtaagagttgattctgtgatcaatgaagcaaaaaaagtacctgagggcaggagtttgtatataggaaacataaattattatcacaagcctctgcgatacggaaagtggtctgtgacatttgaggtacggaataacttattggatctgatacactcatttgttgttgaagttataaaccttatttaatgagtcaattttaattcttttatttggtaataataaagtagttaagatttccctctgcttcatgcacagacacaaatgaacgtgcattatagcaccattaaacatgatgctcttgcttccttcaattagaccttacaaataaaagaatcactattgattttgagtagactggcggcttccagaatcagagaaagcacattcataaatggcttcaagtcctattagagttcacaatatgggtcttccattttgtattagattaagttttagagtttacatcttgcaatatcttctcacaatatctttttattggtgttcaggagtggcccgaagaagtttatcctccatatgcaaatggacctggttatatcatgtcatccgacattgcacgctctatcgtgtccgagtttagaagacataaattaagggttctctctctctctctctgttttgtcttgataatgtcagtgtcatggcgcagtatatcgttgttgaatcatgctaaagtattctgttaaaacttgcttgcagttgttcaagatggaagatgtaagtatgggaatgtgggtggagaaattcaatatttcaaagccagtacaatatgttcacagctataagttctgccaatttggatgtgtggaagattatttcacagcacattaccaatcaccaaggcagatgatgtgcatgtgggacaaattgcaaagacaggtgagacctcaatgctgcaacatgagatgataatggggggtaggtgggtgggtgggtggtggtgtaggccatattgagaatcttcttttctcagaccaaaacagagaggcacaagttttgcagtcatagcatatctatatattttgtatattctatagagagctttaaagatcacatctcatccttctggtgtacctgtacaaagttttccttcctatcaaattcattcattatttcttgctctttgtatctttttgtcacttttttttttgtcttcttttaacattagggccctctctcatctctcttttcccaattatgtttctttcttcataaaagtatacgaaaagcaagaaatgtaatctgtcccattacattacagccagccactacagccgagaatgagaatcatttagattcgaagaatatattgtttctttctctgtgattcttattataattattattctatttagggataataattaaaatagttcatttcgacacatttaattctctatataaactaatttcgtatcaagattctatacgttatgaattttctgtaaatcattaactgtaggatatattttggcttatttattcttattttatcctagttatattttcattgaaatcccttggaccagcaattgaccttgttaagtgcatttaattggaaaaagaaagtaaaggaggccattatattcttttcagtaataaagctctccattcagcaaaaagagaaaaaagtaataaagctctgcagggccatctttttcaaatgttacttttctccaacggttacttgtcaaaatcaaacaagtcgtgaattaacgttaagttaatgttttatcgtgtaaactgggtagaaaagaattagtcaagttttgactcttccttgttcaaaccgtttatttatttatttatttttcaaaggcggctttcattggataacaaaatagcagagtggattttaccccataacttccattaatgaaggaccagttatttcttttctatcaaaataaaaataaaaataaaaataaaaactagttatgttttgagcccaggatttctccacgtagtccttaccaacaaaattaaaagatcaaactgaagacaatggcagctcttgctctggagtttggacaccgctcaaactgacctagcagataattttccccacgacggtcttaatcatggatttgaaaagccataaaaaaaagttggaaaaaaaaaatgctaatgaaaattcagaaagagattgaaaaagcatgttgattgtagcacatctcgagtttgaaaggagtaaagagtgttgaattggtcagaggctagaaaccacatcaggactagaggagttatggcatataataacatttctacatctccaaatgtggtcaatagaaacaaataaggaacaatcctaaatgtgcgaggacaaaacagtgagcaaaattacaaaaaaggaagacatattcacaccaagacataaaagggaaggttactttgctgacagcgaaaatcttgtccgataatgcgttgccatttgccaaaaaataattttaggtcttttcatgcagcttagattttcaagtctcttctacagccataggctttttttatgttaacagggacgtgtgcaagcgcttgaattataaagagtggatttgtatagatataagttgtgaatccaaatccaagagtttgaatatataagcaccagttggaccaccttttttttttctgctaataattgtcaagacttcatactggaaaactcattttcaatttggcaattttctaccaatcattctcttgatgaagtcagaaacaaaattgaaacaatatagggaatgatggagtcgaactcgaacttgtaccaactttcttcttgcacgctcttgagtaaattaataaggtcttttaattcacacaatcaatttccaaaaccaccaccgagatattcgctgttagtgaatatatatacatagctttgtctctatttatatgcatgtcatgtatttatttaatgctaatttaatagaaaactataaaataaccaacacactaattcaattaatgtagttagtgttggttaactttctgttagttttaacagtttgttataagtgttagaggttgttattatcaagttagttgtaactaatacattgtattcttgatctatataaatatgatagggtgattctacaatgcatccctttaaaagagatgtattgataaccccttaacttattttggcatcaaattttttttcatattcatgtatgttatagctatttaagatatcttacaaaattttgagaaatt

SEQ ID NO: 42986 - DNA, 2455 bp, Cannabis sativa
agtgtacaaatgtgcactcatcaccttcaatggttttgcaacgatgacttccctatctattttattgaaacagattgcaaagcaattactgatgctttgagtaacactaatgagtgttgccgtgtgtttggagatcttattttccagcagaggacacttctttcactccttccaaatgtaaaattttgtcacattagtcggtcaggaaatacaactacccatgatctggctaagaaggcactttggctagaagaagaaacctgctggatgtgacgaggcctgctctatttcttcagtgttttcgttcttgtagagttgcctttctaccctaaaaaaataataaataatggtgttgttattatgtgtttaaatattttatcgacaattatggctggtggtagttgttgccttatcgacatgcattagcgattgccaaatggtgagtaatttttaacgcatatttttagctttagatttagaggaaacctcgacttaacatatattttttaatttattacaaatattaatattaaattactttttaccatatatacaatttttttaattattatttattttatatttaatatcatattattttattatttaaattattgccgaatattttatactaaattatttttatttattaattatttatataattttttaatttaaatctaaagtcatataaattacatttcaaaaatcgtatttattaccattttatagaatcatattaattgtattgattatttttaatctcatttataattttatttactattaattatgttgtcttataacattttattaattcatttgattaataatatatttttgggactttttgatttttacactttaaaacagtttttattatatatatttttacggaatttcacataaaaatctctatagcaactaacgaagcaacttaaatcgcaaccaaaatctgtatagcaacccacataaatactaccggagaaattcaagccataaattgaaaaaaaaaaaaaagctaaaaaataatatgtagggtaatttttctatatttttacataaatattttttttattaaatgtatcataatcattcatatattattatatatttgtatcattaaaagtaattatatatattgttattcttcggttgcgttttgttaaaattaaattttgttagttataaaaaaagtttgatgttgtgataatgttaaaaatttgttgcttatcccaaaaattctaatgaagatttagagatcctgttgatgagatacgtttttctattcctctttataaaattaatttttacttattaatttatagtgtatattttagtttgttggactcttattttcactataatatttttgtagggactcttacaattattcaagcaaattttatagatgcgagtctagagtagctacttttgcttggtttatagtttcactttaagattgattgtaatttggcattgaatttgactttctgtatgttttacaccgatgtacgattattgtatgattttacaagtttatttaccaatttttctaaagtatcctattctataacatattatggattagttgtgcataaaaagcttgatttgatgtatttttttctattatcttcaaattctaattattatttgaatgataagttcattatttaaaaaatagtatactttcttaattttgattttgattcttaaagtagaaaacttttaaatataccttctacaacttgttattataataaggttattaaaactgttatgtcaaaagattcattatcattggaaatgctctcttgcgagaagagcctgcctgaagggatgcctaacacgcctgaaatcaccatggatgacttgctctcaagaactcataacctttcggttctagatgaagacgaatgggaagtgaatgaagaaggaagggaagcggttgaaaagctctgtgcgattggccgtctaatatcaaatcgacctatgagtcgttctctcatgaggacaattctcggtcgagtttggggaatctcagaaaagaatcggggagttgagattaaattcactactaaggaatctatgttcttagtattctctttcaaatcaactcaagatctgaacagaatcttaaccaagaatcattggtttctcaacaatggcactttaatcttggagagaatgaatcaattgccgactgattgggagagtgtgttaaccagatttccgattagtggacgtattcttcatcttcctactcgatccattacgcaaagaaacatggagcgtctggctaatttggcaggggatttaattgaggttcaaaaggcagacattcctagaattgtggctaagggattctttactttcaaggtctggtgtgatatcaataaacctctttgtccgggattcctttttcctagtgatggtagaaagatatggcttccct

SEQ ID NO: 42987 - DNA, 7539 bp, Cannabis sativa
  modified_base (4953)..(4959): a, c, t, g, unknown or other
  modified_base (5107)..(5110): a, c, t, g, unknown or other
  modified_base (7505)..(7510): a, c, t, g, unknown or other
ccttaaccattgcccagcaacatttgtaacagaaataattttatttttcaccgtcatcatgtagtccttttgatatttttacaggtcactaacaaattctgctggttcttcaaataagcatgttctgaaaccctctgcagctctgggttcggcaagtcaagaatatgatgttagcatcgctgaagtgatagtattatcagatgaagagcgtcgtaatgaagctgaaatacctggaatttgttctcacgaggaagctggaagttgctcttataagagcgaagttaagcctttaattcttttcgaggatgtggatatcacttttcttgaagatcgaggcttcatcgctgcagtgcaacagattgctgatactgccaaaggacccataatattgactagcaatagtaagaaaatttcatttatcaattgtttttctcttgaaggtttgggcgagtagtttctttgaattaattatcattggtgtaaaattctaggtcacaaacctctactgccagataatttagacagattagagatctgttttacaccaccatcaccacagatgctgctttcccatgcatatagggtatgcgtttgcagctccttctctctgttcaacttgtcccttataagctggtacttgaatatatttttcaaattcaacctactactgcattgcaggtttgtgctgctgagagagccaacatccaaactcatgtcatagagcaagtaattgattcttgtcagggagatatacgtaaaatgattatgcatcttcagttctggtgccagggtaaaagctctaagaaaggttagtagcattgcgtgtactttggttgttatttgattaatatgtttaatttttttgagaatatttttatagatttaatggagagatatgcaacttatattaaactataatcaatgacctgtgcaaatccactttctaatattctgcaattaatgcttgtagaacacatagattgaacattattgaagttattgcgaaaaagttcatctcaagtcattaccatgtatatatactttatgaagaaaatatatacacgcatatataaatttttctattagtattcatcccctttaaatttgactgatgtctcgttttcttaatattctattaaagttttaatgttaaatgttaaagaggcttatgctaatttttttaccaagtcaagagactactcataattttaaagtttcgggactatagcaaaacgtttggaataatttagtgaccagctatgtagaactaatctttcgattgacaacataaattttataattttggtgacttcacctaaacctttattttgttcttgggtttttggatatggggagctgagtaaaagggtttggtttgaagtatttgaaccacgtccagaccgtaattagttgcttgtttggtacatagcaatttccaagagcttctactgaatatatctgttgtgcataagctctgccatctgtttactaccactctactgaagagctgtttttaatatttatgtttatttgtctctacaggtaacaaaattcaaagggcatatggatcacttctatttaaccttgaggctggccatcagatacttcctaaattaataccatgggacttaagatctgaattatcagagttagttgagaaagagatcgctaagtcgttatccagggaagaaaattctaaattaatggatataatcgaggacaagcaggaaataccattccgttttgcgaacaataatattgaaacagaaactatagaggcaaagaaggaagcaatgttgaacctcaattgctctgtttacgactatgatgagtttagagttcagcttgatactcatgaggtttctgataatttagacaccccattttcatgcatgcggaagaatgttcggaaaaagcatgacgtggtgtcttctgattctgaagatgaattagtggataatggatgtcccatgtatttaaatgaagagactccaaatgaaccactatttagaaggagcccattgtttaaggagcaaccttgttcggttgcagcagatatagatgaagggctttctcaccatttagactctgctggctgcatccccttaaatgatgaatgcaagtcaattgatgtgtcatgcgtgccagaatcatcatttgttccagaaactgaaattaacgattgcagggagcaagatgttacggtttcctgtggttttgttggggatacattggatgaagtctcaatgaggaacaggttacctgttgaagatgaacatgtttatgtaacgaaaccagaaacaaagagaaattcagataccttgttaagtaatcatgatgtaattgccaaacttttccaacaagaggaggtggaagattctcaaaatgagcatgtagaggctgttgcaatagggtatcagaacagtcagattttggatgagtgtagtcgaatggattgtagcagaactttaaaatgtatagagaagcctaaacccttggtggtgcctgatatagtacaacattcatggaaccaacttcgtaggcgccgtgcagatctatcccagtacgtgggttccgaagagcatgctatcccagttgtccagctcattcataaaatgactaatctaatctcagatgcagatgttttgcttcctgaccgtcaaccactaacaagggtgtgtcatttaactttaaagctgaaaattgaaaggacagttttctattcaaattatgcagtttatttcataatggaattttataccactccaggattctttggaaccatcggtgatcacatctgaggagtcagatgcatacagtttttttaacagatgccggtttgcttctgcaactgcacagcatggattttgcttgttagcaaaagacattgctgctgttggatcaaggatgggttctgtctgctctgtcgatctcacctcaatgttgggctgtccaactggttcgctggtttttcctaagttggctgaatcaggaactacatggactggaagaaattcagagttgaaccggtagcattctgtacttctttcttttagcacattcattatctactaacctgtagacttgcacaatcttttccaagtcttccagctcacattcacgcgtactctatccaatttgtaatgagcattaatagaaaattaatttaaaaacatgtgtgaacctactaaagtatttgcttggttaattgtttttaatagtatttgaaaataattttagtatatttttttctttatttctcaaaaaagaaactaaccaattaaaattttaaaacaagtcattacttagtttggagcctgctgtttgacatttttaatatacataaaacccatctcttttattttcttttttatcttaaaagaacagaaatcctccttaagttatcaagaatattttacatgttttataatctgacataactgttaacactggatgtccgcaatgcagcgaaaacaaatcacaccttgctgatgtagttgaatccattgttccttcaaaatctctcatgacactgaaaggtgcagcgtgttacgaatatctttcttcactgcgttgcatttcaaaatcagaagcttctcgtttatcaaaggacactgggatccaaaggaaacgcaggtgtttacttgtgatgtcacattgtttttttttctttcggtttctgtagtcctaatgaatattcttacactacaaccctgcacaatagttgatgtaattgcttgacgtgttaaaacaggaggtgggttgatcggcactacttaagtactggtacacttatgttgagtcctgaggaaatattggctcttggtgaaataaacatgcctaaagaaaattcttcatgatgctcggatgttaagaactttgacgtcaaagcaaggaaaacttacaatgctgctctgtaactctgcctcatttattggctctgcacaacggccagagaaatttaatgtggtatgttcgggctgatctttaagttaaattaattataaacttagtaattatgatttggtctgtgtcaatggcaggctaagccaacgtttccttaggttaaacaataagagggatgaatgtgataagcaagttgagctatggttagatcccatttctccccggttgtaaagtgattttaagttttagcaaagtgattctttgtagcagtactactaattattaactgtataacagaggtggttctttctggcattcttgagtgaagcttgtagacttggcacaggggcgtgcacgaccgaaaaagaagaaagtgaaaacccttaaataactggcttttttttttatctcataaaattgtaataagaaagatattattaaaaagaaaagaaaacttgaccttgaactaagagaaaaaagtaaagacataacacatgccttgccttggaagttaaggttgttgctttcgcctcttttatatgttcttgttttcagcctgagatgacaaagtcttatgtaatgtttttttttttactaacttaagccattatattcacgaattatttttttattggtatatttgaattaatttttattaaataataaaaatttaatgacttagaccaatcaagaattgccacgtggcaatttatttaactcagtacttaccgaagttttaaaattagaatttagatattattactgctaaaaattaaacttagtatttatttgcaactgagagttaaacttaaggatttatattgcaaattattcattattttattattattattagttttaagtttttagaccttttgttttagtttttaaaattatcataaatttagagttacaggttttttaaaaaaaaaataaaaaacaaaacttatagatcccaaaggacataaaagtcaaaaaacaaaaccatagtttttatttgcaaaatgtaataacattaagagcttggtaatatttttattttttaannnnnnnatcacaaaaataaaaataaaatttgtgtttttaaattttatttttaaaaaaacaaaaatgtgttctataatcacttttgtttttaattttaagaaaaatagaaaataaaaacgtattctataactttcatttttatttttattttttnnnnttatttaagtcgggtctaggttcgggtctgggctggggtcgttgttcgagtccaggattgagaacgggacccaagtttaggtcacaatgtcgaagttggggttggagtctacaatattaattaaaaaaaattgtttaaatttttttttgtaagtgattcttttttatttttaaaatttgattcattaaaaaattaaaaaaattaaaaagaaaaaataatttataaaatatgtttttaaaaaatatttttatttttttattaaaaaataaaaaattaattaagaaaatagtactaaatgcacccaatacttttacaaatgaaatgtagtatcccaaaacctaaaatatagataaatatgagttcagcaaatgagctgaaatggggatgtatgtatgtatgtatttcacgatttatttggtcgtacttcccctaaaatcccctagttttctataaatgaagtagattggggtggtacaatagctataaatatatgaattacaaacaagtacaaaataataggtgaggttaggttaggttaggttaggttagagaagtgtttcatgtactatggttaacttaacttgtggttatactatctggtagtttaaaacaaaacatcataccaaatcaaggtaaacaaatggacacaacactctccaacacatcttcattccaactaaattaaatatactccatctccaatctaaaaacacaggagaaataagataaacagcctagctatagtatgttttggaatttgtgtaccactttcaatagttagtgttttttttttaattttctttctctttttcattttaaacctaggaaactagtccaaagaatgaataaatacaataaactactaaccaaaaggtaaaggtacatttacatagaaaaaagtaggaggagataataaatattatttttgttttgagaaaagtgagacctaaattagtaaattaaacttacattagattacgtaattgtcttgttatggcgatttaatcacgaaagacaaggactttgcctcctctattctgctgctgctgaatactactaattcgtctctattctctctctctctctcgctcactacaattcttcttcacataacaacttcaaaaatcaatgaaatgactccaaaactatttttcagtttggtccactttcacttgccctaattcaaatgctcaagttccaatgaccaaatggttttaaactatagtttttatattgggtatcagtagtgtctagaatcttttaaacgtgtcgccttatgattggttaacaatatttcataaaaattattatattaaactatatgagacctgatacttaattgtatcaataacaatattgatatgtaagagggtattagtactagtctttagcatttctcttttataaactagggcaaaaaatatttactaatttatttgtacatattgatatttctcataatagtaaaagatgaagctcggaccatatgaacacatcctttcaatcaataaatgatactttaatatcatttagccatatttgaatatgatcaaaacaaaggaaagcaaaattttgagcttttgacattacattatatattatatatattaattgttgagtatggaccactctattattatcaagaaaacgaaaacaaataaaagatttggtactactatagcctcttgcttgtctattagtactgtggaagtcaattcttggcacatagcacagcatgttgttaaagtaatgatggtcagggcagtgattgtgaactgagctgattataactccttatttattaatagttatatatattagaaaaatttataataaattaaagttgttgattattttttaagttgggtctagggccgagtacaaggcccaggttggggtcggagtggatcgtggtcccgattctggtccaggtctgaatatgggtcgacgtcagggttcgggttgtgttgggtaaattttataggcttcattaatttattgcatagattaatctatctccataaatctcaaaactttatctaagttaaataaattgaatgctttgtgaatttactacttaggtaaaatagttaattattgaacgcttcaccttaactacatgtaataaaaagattgggataattgactgcttcaactttatctgcggaattaatagtttgattagaaattgaaattacattcattaataggaattaggaatgattactgagggtgacaaataacctttaactagtttctcttcgtagtctcacttttaattcgtttttatttttatttatgctattttactctaaacctcgaaatccccattttttaatttttgttactaatttttgagtaattaaataaacatagtcctcgtgggatcgacccnnnnnnacaattatactaaaataattggagatatt

SEQ ID NO: 42988 - DNA, 1175 bp, Cannabis sativa
ctaacttagcgcatcgcaacctagccgccgtggctgaacggctcggtgcgaaacgactcatggcttacagtatgggtgagacacgtgtcatcgttacttgcaatcctgacgtggctaaagagattttaaacagctcggttttcgccgaccgacccgttaaggaatcggcttacggtttaatgtttaatcgggctatcgggtttgccccgtatggagtttattggaggacactgcgacgaatctcggccgtacatctgttcagcccgaaacaaatctcggccgctgagaaacagaggtacggaatcgcttctcaaatggttgatgccatttataataagagtttaagaaacgacgagggagtttgtgtcgttcgtgatatatttaaacgggcctcgcttcataacatgatgggctcggtttttgggcgcgaatatgatttgggctcggcccagaatgaggagagtgaggagcttggtgggcttgtggatgaaggctatgagcttttgggtaagcttaattggtctgaccatctttcttgggttagttcgtttgactttcagagaattcgggtcaggtgttttgaattggttccgaaagtgaaccggtttgtgacccgaattattgatgagcatagagccaataataaatctaatagaagtacttgtgactttgttgatgttcttctctctcttaatggtcaagataaattgtcagactctgacatgattgctgttctttgggtaagcaataatatttctcttattgtctttatagtattttttcttaattatatatgaaaattgacataataaattaaatactaaataataattagtttgatatttttaatgagtactttctaaccagtaatataagtaatatagtgccacgtggctcgaaaatttaatcatgatgtaaagtttttcattacaattttttagttaatttctatacgtgttcattatacttataatattatttttgtaaatttaaaaaaaatttgaataattacgtgttgaaaacacgtttaaaattttttaaacgtacgtgctaaattaaaatatcagatattttattttcagcgttataaactatacaaaaatttataaaaatgatactgtaactaattttaatcatatatttttattttgattgactaattttaattatttatt

SEQ ID NO: 42989 - DNA, 2949 bp, Cannabis sativa
atattctgttaaaccaagaatgttaaactaagaaatgccgttagataggcacttttattatataaagatatatattggcaaattatatagcattacactattgcaaatagtcaacaaaattattaattgtgcattgccttctattttaaattataatgtatacatcagtcccaaaaatgatgttttactatatatatacagacacattcaagctgagagtgaagccaggaaagacatacctactccggttgattaacgctgcacttaatgatgaactatttttcagcatagcaaatcacagtttcaccattgttgaagttgacgcttcctacaccaaaccctaccaaaccaccacactcctcatcaccccaggccaaaccaccaacatcctcctcaccaccaaaccctactatcccaacgctaccttcctcatcgctgctagcccctacttcactggctccggaaccctcgacaacaccaccacagccgccatactccaatatcaccgcccacccaacagcacaacaagtactcaaaacctcaccacttacaaaccatctctccctcctttcaatgccaccaaattcgtcaacgtaacccaattcgtcgccaacttcaccagcagcctacgtagcttgaactctgctaagttcccggcaaatgtccctaaaactgtggagaagaagtttttgttcaccgttggactcgggaccagcccttgtcctaagaacaccacgtgtcaaggtcccaatggacagaagtttgccgcgtcaatcaacaatgtgtctttcgcgctaccctcgatggcacttctgcaatcctactttaacaaaaagtcagtcggagtttacacgagtgattttccagcaaaccctgttcagccatttaattacactgggacgccgccgaacaacacgatggtgagtaatgggacccggttggtggtgttggggttcaatgcgagcgttgaggtggtgatgcaagacacgagcattgtgagcgcagagagccaccctcttcatcttcatgggtttaacttttttgtggtgggtcaagggtttgggaactttgacccgaacaaggatccagctaagtttaatctagttgacccggttgagaggaacactgctggtgttccttccggtggttggctcgctatacggttctttgcagacaatccaggtatatataccataaatttttaatcaaaataaatgctgcttggttttctaaacaagttttttcttttagtatagcgtaatgatttttacaatcatatattatcttaatagcttaaaggcagggccggccatgaaacaaagtgggccatagggagcaaaaaaaaatttgggatttttttaagaatatactaaattaagtaactttttacaaaaatgacgtttttcttaaaatgaaaacaaaataacgtgtgacacgtacaaagagggtgtgttttaaaaaattgggccgaaaaaactaggattacaagcccaatatacaaatcgttaaaaatagaaaattaccataaaaacgtcaactacatatacggaaacttaacataacaaaagtaacgtcatttttgaaaataattgccaaaatcaggtggcccatgaaaatttctcaaaaaattttgggcccttatattagaaaaaatatggtatttttcaaaattggtaaaaaaaaatgtataattttaaaagagaaaaaaaaaaatttgggccctgggctgggtgggccctaggcacacaggcctaggccatgcccagggccgggcctgcttaaaggtctgagttcgaacccatcacctctccctttttcccattcctccctcaccactaagcttgcttgttttctaaacaagtttactgttttaaaaataattatattggttttagaattaccttatatattattttgttttaattttttttaaggttacggtttgagtttttaaagtcatttctttagtaatttttatgtgggttgctatacgatttttgattgcgatttagaggttggtccgctagttgcaataaatgttttatgtgaaattcaaaaataaaaataaactgttataaaatgtaaaaataataaagtaccttattcttgtttgtatagaaatgtttaattttcaaaaaaataaaaaataaataatacttagtagatgagggtttatccctttaattaattattttccttttaaaaaatcaaactaatattaaccagaatttattgaattaaaagataaagagtgaaaacctatataacgtccatcaatatgaaatcaatgatgatattttttttttttatatttatgtatgtacatatgtgtagcacttgtatatatagttttgaattttggattattgctgtatgggtgtgcaggagtgtggtttatgcattgtcatttagatatacacacgagctgggggctaagaatggcatggattgtgttggacggacccaaccctaatcaaaagttaccaccgccgccttctgatcttccaaaatgttgactttaactttgaccaaataatggtccggaccattttcatcttgagttttcttttttcgtttttatttatttattatttgtgtacacatgttgattggttggttgagaaaataattcaaaattatcatcaaatattctatatgctttgtaaattcacgcatcatattcattcaatttgatcttgttcggtcattctaaataaaaaataaatttaagtagtcagtgtggtacaaaatgaagtaaatgaatgctacacattaaattatacgctaagggataccttaaggtataaaatattacaagatgagacatactactatcagggccggtcctgaaaatttatgggcccaagacgaattaaattttggggccctcaaaaatatatcaaaaaaagagtgtcatgggatttgaataggcatggcaaaaagatccat

SEQ ID NO: 42990 - DNA, 5538 bp, Cannabis sativa
tggagtaatttatcacacttcttaatcaatcaaatggcttgtgtgggtgttagaaaccgtaataggataggatttgataaagttaagtatagtactgtctttataagtacacatattaaattattgagcattgctattaagaattagtggtgtctagtacttctagatatatcgcgtagcgatacttcctaaaaattattacattaaagtatacgggactcgatacttaattggatcaattagcgataatgacacatagggaagatactaagcatcattagtgccttttaattaacatttttctaaattattagactggatcaattattatcaaatttaacaatattttagtggtttgtgtattaatatattgaattatttttatatataaaaaatttatttattgatttataataaggtgattaaattattataggagacgcaatatagaatcagttttctgagtggggaattaacaactttaagaggattgttgcaattgggagtggcacctcatttctcatcacactttttttattaattaattaattattttcatatatatttattaaaggaattttttttttcgaatgaatattaatcataagttttattaaacttcaaactcagctaccaaacatgataataatttagttaagacatttctcatactgaaattacatttaggatataaactagaagctcttgcaaaagaatgagctaccactactaaaaaattgggttttagtgacacacattgagtaactttaaaagtgtatagtgacacttcaacgcgcgtcactaatgagagtgactggaaaaacagtttttaatgacacttcactcgtgtcactgaaaccttttacatccattttcagcacgtcactataggcgtagtgtcagattttgcccgactgaagaaagtaacagccacacacatgaagtgtcactatatcttatttttttttattaatatttttggagatataatgacacaaaaaaactgccactatattaaatatttttcttttttattaatattgttaatttttatttatttatttatttattttgttttgatactacgtttgttgaacgtttaacaaaataaaataaaatattttctaactccgcaagtaaattcttatattctttaacaatcaaaccaagcaaagaaagcatttcaaatggactcgtaaagcttgcacaacaactaaacaatatgtctcaagtgtaaattgattccacacccttgattcttgatccaacttagagcttctctaacaccaatagcctcaactatttatggccgaacatcccctagattttcgtgtaagacctttcaagagaaagccatggccatcccttgcaactataccaataccaaaatcttgatcaccaccaaatatagatgcatccacatttaccttaacactatttacctgaggcatacaccaactcccaataccatcaccagcaataaagtcggtctgagatgactccaaagtggagttttgagctgatttccactggtcaaggaagctacctgcgaaggaaaaaataaaggtggtagttaacattttgttcttctacaccttatcatttctagcaccccgaatcgcctaacacatcgtggcaataaggcttttttctccatgctcgagttctgaaaatgaaagaacacaccagtctagaaatgacatattagttgcaataagggttacaacacccactttctctcccaacaagcagtagctcgactgtaagaaacttagggtgtgaagtattgttttatcatgaaggccacacactggacacaagctattaaccgccactatttttgttagaagcatagtcaaagtaggaaggaagtttgtacctccatgccatataagatttttaacctcgggtggtatttttagcctcaaaagcttattctagaagtctgaagcatcaactgtattccagctaccattgattttttgaattaagttataggcactcttcacagtgtagacacccgaagtgtcttgagaccaataccaatgatcatctcttgaagcaaggtgtataggaatagaaaggataaaattttgatccttgctatgaaacagatcagtaagaacctttaatcccactccaaccttcaattgatcatcaaattagacacattatttgcattaataagagttggatgcacaaatgtgacaaaagggtcttcatcatttggtaaccaaggctcctccaagacatcaatattcaaaccattccccacatgccaccgaactccttttttcactagagcttgagcttcctaaatactacgccaaacaaatcttgaattgttacccaactgagtcgagagttaagtgccattcggatagtatcgtgctttaaaattttcgagaccaaggaattttgctgaacaagcaacctccagccttgcttccccaaaagtgataaattatgatcctgaagctttctaaatcccaaaactctagcacttatatgtttgttcaacttctcccaagacaaccaatatcaagtcaatttaagaaagtcttctatcttttacagtgtttatacagacaattcattgaagcttcaaatatgcaactttctttagatgctaatagtacttaccttggccttccaagtataatgggaaggaataaaaatacttttctaggatatctgaaggaaaatgtgaggaaaagggtctaaaattgggattcaaagtttctctctaagtgtggtaaggagagtcttataaagactatagcccaagagttaccaagctatgtcatgagtgtatttattctttatttagaaataagtagagagatggaacaacatatgtcaaagttttggtgaaaggcatctaactccaagaatattggtactcataatattgtacaggggaaggtataatttgaggaatgaattgagaacgacttaatttttatgagaaataattcttgaaggcaaattttgtatagttatttcaattatgaattgagtgattaaaataaatttaactttgtagtttgatttgataaaattatattagttaaatataatattattattatgagagaaatatattattttagtataaaataatatttagttaatccaggttaaataagagattgataaaaattaatcaattattatttattgacaaataaataataaatcttgttaaagacaaaattgaggaatcaatttatggctttaaaatatggctcatacatgtagagtgatatataaaagctcgtgggatttgttttagttattttattatttaataagattaatcaaaataaataataattatcttttttaattatttaatcaaatattttattagatacgatatttataattaaaaaaggttattaaaataaaaaaatataactaaaaaatatagttatttaattatagatattatcatatttgaattttgaatttcaaataaaaaataataaatatttattttattaaattaatttattggcccatatatattttatgtatataatatatacataatatatacgatacaatagattagagataagaaaaattgtacgatacaattttcgtaaaccctaagcttggtcctctctctctctctctctcccctattgttcacgccactttctctctctaaagattgatgagttttctctcatttcagttcacaatgtgtcatgagttgagtacacactgtgatagaaaattcgttcatcaatttaatcctataagtccactcttatccaaagtgttgaggattgatctggaagaccctaatgtgaagcgttcattaaattcataacatctggattggatgatcgataatatatacgaaaaaatttgaggatacactaataggcatcaaaatataaaaaatttatacttatagtttagatttaatttatgtaatcatgtagggatcttggggcttatggtttagattagatttattagcaacattttttataaaatctacttctgctttctactctgatttagaccataaaaaccaacaaatgatactatagcaatctctataattacataaagtaaatattgtaatagatatttgtgcatttatatatatatatatatatgttaatattatgaatggatggatgtgtgcatgaatatgaattgttaattatatggtaaaattagattatgaattttacatatttttaaagaaattatgtacaccattatatttaatatggtataagaatttttaattgtaatgtaaatttttgtcatataaaatgtaaattctataatacctccattgatgagtgagcttgagtttaaggagtagaccccgatctcatcgagatgatgaaatcaatcctcaaatgagagcccctagactcaatagttagttgcggctacgagctgtgagtctcgatctcaaaacagatggaacaaaggaatagaaaggctcacgtgtgcatgaagccatgcatgcatggcatgcacatgcacgagcagttgtacggacgacgacgtgaaggaaggagaggagccatttgggtttgtgagtttcactacaagaaatgtcactcttaccagcacagttcgctactgcgctggtaaaacttttaccagcgtatttcgcaaactgcgctggtgaaaaggtcatagttttaccagcgcatatttatagtggctaaaatctaactttaaccagtgcatttacgtgctggaaaagttatttttactagcactttttattttgtgctggcaaaaactctaataccaacgttgatttgccaaccccttttgccaatacatcagaagtaaattctattttaccaacgcaataccaaatttttgccagcagaaaaatgtgctggcaaaagtgatatttcttgtagtattttgatggccactaagagacttcggtctcgtggctgctgaaccgtctacgacatcaaaaacaagatggtgaatcggaccctatggtctcgtgaacaactaatggtgagagaaccaccaaggccttgcggcctgatggtccttttatagtccgaccacgggtggtcctcacttccatttgaaagcatagaatgggagctcaagtccctattttttctatgtgcctggatagacaggttgctgtgacctggatgccacgagcccgattcaaatggagctcgacttcgattagacttcatgtcatgaccgtcctccttctctcgtgcatcaccacacggctacggtggctcttgagccgccgacatgtggtttgactacccatagccgatgttgaaactgacagcaccaccaccttcaaccaccattgtggtggccgaccggcccgaccctatattgattgaaaaatctattttaataaaatttattttttaattaattagattaaccattatgtgaaaattaattttgagatattttgatatttcccatgaaatagtgcacaattaattttaaattggttaaaatagtgtatttttgaaaaattgactattattttataatattata

SEQ ID NO: 42991 - DNA, 4058 bp, Cannabis sativa
atcagttcctgaagagaatcacaatttaacaaacagaagttaaagctttatgaaggagctaaaaatggtttggttttctaatagattgtctcatattgatctgattcaccaaattatacaatacaagaaagaaaaagaaaccttccctgagagatagagaggaaccttccaattaaaaaagggaaactgaaaagatcaattagaaaggaaatttacagataatgaaaccaaagttagtacacaaacccttgataattcttctttcaaatttgcctagaatttttaaaattattgctttgtactttcctaacaatagtagcagggtctcaaaaaggaagcttttatacattagctatcacaaaaatgaagtggtcactaatcttataaacactttcaaatgtaattttttatcaagcaaatcaaaaatttggttctattcacctttcatacaatatgaagttattcttcaacaaagaacaaaaggctcaagagaaaacatacaaataaatgtacatttggcaagtcaaatacccattttgaatgtatggttgcatcacttagtcttcttactaccttgcgttgtcttagtaagagttttgaccaaacctttggatattttccaaaaccaaaacagattcatgattcctaacacaggaggcactgagagcaagctgtagaagcccagtggaaaaactgtcttcacctaaaattatacgagtttaaagacttatcagaaagatgcacaatttatagccagaaacccaaatactttcaaattacaagtgtttccagtgaaaatagagggaataaattggtcattggaatctatactcaagaattgtctttgattaaattgaatactgaagtttgtgtttatcaagactcagtaacaacatggtacggactcacctcttcaaaatggagaaacatgtgggtgaaaaagtatataaataaaataacccttgcaacctgcaggcatcaaaagaagttacatgaaagtttaagataaatacttgctgaaataacaaaagctagagaatttagaaaaacagaatcctatttagtgttcctatccttgtcgttaaacttttcacaagactaaccccaccatttcttgtactggaattatagaatagagacatcaatcttcaaaataataagtgtaagtatatatatgtgtgtgtgtgtgttgatgtgaatgcatctttttatacctatacatatagtatgtcggtaagcacgcacttgaaaacacatttatgctaaagataaaaaagaaaaccacgagagaatccacaactagttctcgtcagtctgatcgagggagaaaaattagccaaatgcataattccacatttcaatgaaatagcccaaggcagatacctcagctcattcgtgctttgtatactttttgtgcaaaagttcacaaaactattcaacttccaatttatttgagtttattcccaccacaataataaggtcatatggttggtgaataaaacccaacgacaatattaattaatatccaatggatagtttatccagttgccagcactaacatggatacatcatgcaacagtatgacaattgaatgagaacaagcgatgaataaattttgggtatctggaacgtaccaaccaccccacgaacaaagcaatgccattgcaaatgtaaagactggagttcttctgaccagcaatgtccaagtacctgtatcagtgttcaaaatgatcaagggttgaaaaccatgaacatgaaaaatgaaaacttcttggttccaatcttaccatcttaagttcacaaaaggagtggtgctttcggaaaagagaaccattagtatgtaaatctgtgcttgaccacttaaaagggcgagaatgattgaaaacatggatagcccatggtgtataacctagtaaaatcaaacaagaaaaagagaaaagtggcagttcatgttaaattttcaattgcatatgaaattcagattgtcaggtcaaaagagattcacaaaatacatttatttttaaagttgagcaaataaaatgtggagccaaggaattatacccagagccaacaaacagctaaaaaaattccttagcaatatgattttccaatgttcataataggctttttttttaacaagtttatataatatgttaatatcaaggtgccaagcaatcatttttttttcttttcatttaagcacttacatactcgaaaccacctaaagctggatagagccagaaaatcatagccaagtctgtaagaaaataaccgatagagacctgcacgaagaacaaaagcaaatgttgaatcataaccaataccataaaagtaagatataacacagaactcactcacagtaagaaatctcttcagaaacagtaagaacattaagtttaaatatcatcccataaacttaaatatcaagctgaaatctaccacttaaataggaaatagaaggaaaaatgtcatgatgcactgataaactaccaaaccattgacaaagcatgaagcaaaactgatgcaaagtaaaagatcaaaacgagtgagatttctaatatgcataaaatccaataattgcatagctgttggctgttgaaacaaacacaccaagatttgagattatcacaatcatttgatggtgacagataaattttataactaggatggagaatcctgcaaacaccttgtgatacttctaatgtatccacttacccccaaaactgtatttgataaagtagagtttctatcaataattagtccatcaacggaatcctcacgaaacaaatctgataacaccaggaggtagaatgatgcaaatgctacaacaatagcatgaacagtggagaaccccctgtacaagtaaggcatcaacaattacacagatactaaacgaaatcgaaaattttgaaaaacattacgtagaattcagcgtgtacaatgcaaaaaaagattctcacctgttgttccattcaagtttttgtgctccacttaaatttctatatgacttgaaacaaagagagcttatagcaccagttaaccaataaaccttcaaacaaaaacaaaatgcatcacttgaaaaatctttgttgttagctgtaatccccataattagttcaatcataaaaaatgcagatagaaaaaaatcaaaaatagtaacaaaatcagaacacttaaaataaatcctcagtaattcattctctcttttcggtcctgtttttacaacatcattgagcaaactttttccctctctccaggtttactatcctaatttatacaaacacacaaaaacattcacgtagaggaacacttacaatggcgcatagaacaatgcccgataacaccgaagcaaggtattgcaattctctgctggaagtttcatatccagcaacggatgcaattccgaacggtaacgaaaatccaaccatcccgcaactcttgtaaatttcagaaccaaaattcaccagattcccgcgaagatattcaatcgcttgtcttcaaattctcgaatcttatcccataaaaaaacgtatgagaaatttaaacacacaaaatttacatcaattcttgtgtatatatacatgcatatacatatacatatacatacctgagggtgaggtagtagcagaggaggcagaacccagtaaaacgaagatcaaagaataagaagcagacttcgatatttttatttttattttatttttcaagaagaagaagaagaataattcagggccagtatttatagtaaatagtaatggtacgattgagctggaccaggaagattgtggaaaaaaggaaacaaagtaagaaaggaaaaaaagaaaaaaaaaatatgaaaatgaaagttgggaacatggatagaagagggttacttttgtaatttaaccaaatatatttggaaattttatttagttctatttccacccccaataaacttataaatacactccattattaaaaaaatataaatttaaataattctttaaaacgtatttttaatatttttttaaatttttttcttcacgttattttacgttaatttcaatacttattttgat

SEQ ID NO: 42992 - DNA, 4131 bp, Cannabis sativa
cccaaataaaagtctaacatgtttatgtactaaactatgctctccaaactttaatatttatgtccctcaaactttgacatgtactaaaatatggcccatcaactttcatccatgttagatttttttactttttttactaaaatttttactaaaattggaaaaaggtctttaaattcaacaatctcaatagttcatggagcattattaacgaccttaaaagtgttgatttggtatagtcaaagttcaggggacaaaaatcataattcacctttttataataaagttacaaaatctcatatctcatgttattttcactttattttattatcgtgtttgactctttttatgatttacatgtaccatttcacattctcttattagattcttatacatagtcatacctcatactaatttatctaaattcctcattctataataacactttgaatactatgtttctattcatgtaggaaacgcaccagcaaaaaaaaaaaagctctttagtccttatcaattttcttcctaaccaaaacattcattttttattcttcaatccaaaggctgagttgggatctttttgaagaaaaaaaaagagaagacttttcaaagttttagtcaaatcaaaaaaaaaaaaaagaaaaagaaaaaagaaaaaagaagatatacatacagctacactccaatcattgttcttgttctttaacgttttatatatagtaatgtagtgagtgtcgtttaatcaagtgttgtttgtcagtttgtttgtgtcgtttcgtctattttcgtggttggcggtctgtattttgcaattatgctcaagttagggtgtaaagataccaacatacaactaaagtccaacttaggccaactgccttcttcccacgactcaaatcaaattcaatttttgggtacacaaagaggttagtagtagtagtagtagtacaagtagagtactagtggtagaagtaggtccagttagtagtagtactactccacattatattcaatgaatctaacaatattttttataggtaataaatactcaaagttttaaatttgtatcataaactcaatatttatttcatatttgttattttcttaaacaaatacatataaaatttgtcattgataaaaatatattgtatcaattattataaaatattcttttaaaaaatttaaaataaaatttgtactaataaaattaaaaaaaaaatacaattttattaatatttattgcttgtacttactcaaaataaacattaaattaaatccacgtttaaacttaaaattttagagacgatttacaatattttaaattattattttgtatgtttgaaaaaagttgtcaaaggttttgtcctaatcccaaagctgtctaaaagtttttggtctttcacatgttattattagacaaaggacaaagaggttaaaagtatcttgaagacagtgcttgtcttcttcttcttcttctccttctgctactttttctcttttctccttgtgccttttcacaaagggaacaaggtcagaaagcccagaagtttgctttgcctgataatgcattgattttctgatgatgggttttgcttcttttagtgatgtgtggacactgatgaaggaagggatttaatattggttttttttttttggttgtggggtttaagtattttattctgagttgactgagttcaaagtatgaagcagaagggtgtcaaggattccaaggataagggaaatggtaatggttttgatgagtgtggaaaaatggtggtggttgctgttaaagcatctaaggagatttcaaaggctggtctagtttgggctttgactcatgttgtgcagcctggtgattgccttaagctgctggttgttactccttcttatagctcaagtaatcttctcatcttatccttttctacctctctttcatttcagtgatccaaatatcgaccctacttacattaatgtaagacaagtaatgcaaattctcattaagttgggttgtttttctccattttgattaatctatcttttttctttattgtttctatggcttcataaaagcaatatctcctgcatttttagagtaaatatacaataattgaattcctttttagtacattgaattcttcacttgaaacaatcatgagctaaagaatttgttcatggggctcttccatagctagctgtagtaagttctaatggccattactgggagagtatagtcctaacagcccttttaagaggttgcagcctaacattcttgtcttggaatttagtttaaggcttgatttattgtcgagttaaatgaatatatacagaaagttaaggattccaggactccaggactctgttgtttcacacatttggcagcaaggatggtcttttattttattttttgtataaatttggcttcagtgggttattttctgaatcaaagaaccaacataagttaattattgttttacacaagttattttttttttctttgtttctctcctaaatgacatttgattgagatgttgtatgattttaggtaagaggatatgggatatatcaagattcataggtgattgcaccaatagtcacaaatctttctcaggaaacactacagaggaaaagaatgacatagtagattcatgctctaagatggtgattcaactccatgatgtttatgattcagaaaaggtaagatcataaactagtttttattgtttagttcttatgttgatcacatctaatatattatcattgtcacaataaacatttgggtcctatttttcaggtaaagattaggataaaaattgtctcgagttcgttatctggtgcagttgcagttgaagccaagagaattcactcaacttgggttattttggataagtactatacaaacctactcttcttttggattatttcattactatttgcactgcttttgatatcattgtttgtacaattctgatcagacaattgaaatgtgagaagaaattctgcttggaagagcttcagtgtaacattgtagtgatgaagcgatctggagcagagattcttcgtctgagctttgccaattctccaaaaatggaacctgatacgagctgctctttatcacccgaattagaagcttctccagatcacttgaacaacaaacttgaaatgtctagagggccggctgtaactcctgctactagtccagaagaagagtcacctctaactagaactgatgttggcacaacatcaatatcaagctcttcagatccagaggcttctccatttctgccttatggaatccgcgggatccttaagaaggagtttccatttattcgtgaaaagaataaaaaccggactgaatttgattctgagacaaacaatgaaaagcaatgttctgatttcacaacttcatattaccagccatggttgacaaatttcatcagtgctagtggtgaattgtcgaaacctttgatagaaggttcagaaagattttatgacaagtctttgatgtccacttatggagcattgctggagaatttgtctaaattggaaaaagagcctgatatagggatgcttaattacaagcttgatttgaacttgagcagaagtgtgagagaagcaatttcgttgtgtagaagcgcgcctcctggtcctcctcctttgtgctctatatgtcagcacaagggacctgtgtttggaaaccctcctagatggttcacttataacgaactagaacttgccacgggtggattttcacaagcgaatttcttggctgaaggtggatttggttctgtatatagaggtgttttaccagatgggcaggtagttgcagttaaacaacataaattagctagctctcaaggtgacatagagttttgctctgaagtcgaggtcttaagttgtgcacaacatcgcaatgtcgtgatgcttattgggctttgtgtggaaaatggaagaaggatgctagtttatgagtatatttgcaatggatctttggattctcatctttatggtaatttttctcttattactctgccatgaacttatatgacagtgtcatatgaaatagttacttgtccataagaagcatctcttcataattttattatcatgctcaaaagccttggcatgccaacttttttg

SEQ ID NO: 42993 - DNA, 1709 bp, Cannabis sativa
ccatgacggtggccaattacctgtgtcatcacctttagccaataatacacttggggtcagcatccctttggattatctatctaataacacccctgtaggcatacagggagccaggcaaatttcacttcaaatatcatcatcatctacaccaggtgtttgtcctggtcagagttttgagaagtccaaccaaatcctacttttcggtcaacgcattgacattgaacagagaaactgtgatagccctcctagcttctcacaagttactgatgggagcggtacagagagatctccttctactacctcaacacctgcccttcattctactgaaaatgaaggtttatccagctttcttactattgggaattctggtcagagtttggagaagtccaacattgttggagccaatcaattcctactatttgggcaatgcatagacataggtacagagagatctccttctactgaaaatagcctgaattcaggtcactgtaagatactaatagactctaaagattcagggttgagtaatgacatttcgggtctaggctcttatgaggatctcttcaagaatttgagtgacttgattcaaatagaaagatctcaaattcagaactgtgttgtttactatgatgaatctggagttgctaaacgacctgaagatgttccatttaggtaatcctttatattggttactaattggatatgtgtatatatatcaccagcttaatgtcattcatttgtttctctttttttgcagtgactttatgagaacagccaaaaccataaatatttctacaggtccttctgaaagcagagagagattgaattgaggtaacagttcttgtaactatggcaatgattgtgaccagatttgaattgagaatagagacattgatgatgttcttgtattgaaagtctgatttactttcaatttttatgtatgtctgaaaacttatagtctatgtttcaagtttatttgtggatatttctatcttatgaaaattaaattagagacacaatcagattgttcttcttttttttttttgttggtttaagcatatatgtttgctgtgttgatatttatattttggaatcaaatcaatagttagttagtaataaaatccaacacttgatgaaacttttcatgacattaaataaaagatgttatttgtattgaagtccctaaccaaaagggatagtccatttggctttcgaaaacaaattttgattactacaaagattagtttctttagggcgtgtttggaaacatttgtctaattactcattcgtataattaaaactttattttaaaatacaaattgtgtttgaatataggatggtaattgtttataaatttctaatgtctacaaaataattagtaattataaaaaaaaaaaaaaaaaaatagtagttgatatttaaaatagaaattttttagtaattatagagtataattacacttaactagtagtagtgattactctattttaaattacaaggtgtgtatgtatataagatacatatgaattcttaatgttttgtttggcaaaatagttgacacttacataataaaataattcttttaaaatggaatattttaagtaattacaatactcaatcgacgtaaggggctatacaagttggaaagtgtaattgaaaccctcaattacctccaattacattattacactctaattactcgtgtttgg

SEQ ID NO: 42994 - DNA, 1815 bp, Cannabis sativa
  modified_base (1765)..(1781): a, c, t, g, unknown or other
acaggacgcttatttagagtacttattctaccaacattaattttttcttttcattttatttatttagacatagatttttataaataatatagtgatgagaatatttggtttcaaatgaatttaattgatctatattttattttacataacttggcaaatcaattctcttttgttctgactctcgtgaaatcacgggttttgtttttttgttttgtaataaattaagagaataacagtttaggtctcagtagagtgatagagacaaataaattgttttctttttctttcaaaaaaataaataaataaataaattgttttgagcttaagaattttgtttcatgtatgattttaatctttcttgattattaattataataaagttaatttttaaggtatttttttttttcatatatggtttgtttgtttcttaattaactataataaagtgtagacatattaaagagagaataatcataatattcttcttttctaaaaaatcatttatcaactttattaacagaaaattattcaagattacattaaaaaatttaaataataataatacgatcagcaacaaaataaaatgcttttgttagaaaataaaaataaacaaatacaacaaatataacacaccaaataagacaacatagagagtggactttggatcgattacacaactgtaaagctatcagtttcaacaaccactcctaccaagaattttttttttatccagctcaaagcttctcgtacgcccaaagcgtctgcaatttcgggagccacctaacctgaacgaaaacaagaaatcgcctccaccattgcaccatcagcatttctagcaacacaaacgaagctataagttgcagcactagaaataattgtttttcaagccattctcactggtttagtccactgtgtgtggccatcaacaacagtcaagaacactatcttgagcttgagaccattgatcaagtgtacactgagccaagatggagaccccaacaacactcttttaaggccaaaccagttcattcctagtcttctaaattcccttacaagtcattgcaagtaacttcctcttctccccatctaacaaatgcaatagattatcaaccaaaggaataatcaaccaaataatgataaatggttggtctacctgtcttgcacaatggaaaaatagaattaacactaacatgccttgatctcaattgagtctttaagggaacatatttttcaaactttgttctgaaaatcagaactatcaatttccatctctacctctttactctcttgcatatgtctatacgtactcttaactagaaaatggcatgacttctctcaaacccaaaaccacacaatcactactttgacttgaggataaggtatttattgagtttttcgaaaatcgattataaaataaatagagtttaagaaataaacaaaattaaaaaaaaagaaaaaacttaaaatttttacgtagttggagtgttaatgagtcttagtttatcagtcaatattataagtttgaaaggctttgatgtattatacaaggataatgttcttacctgagcttaagaaccttaattttagtcttagtgtctaaataataatttttagtttttgaagcttgtgatggagctgaattttgggtttagccgcaggaaaatacaatcaaggtaactgttgatgctgttatttttcgtgatcgagctgcatttagttatcattagtaggggtgttcacaaattatccgatccaatccaatccnnnnnnnnnnnnnnnnnccaatccgcaaaatgcggatatccgcacttatgc

SEQ ID NO: 42995 - DNA, 2551 bp, Cannabis sativa
ttggtattctgaatgctaaatttcaatgaagttgatattgaatttttcaaaaaaaaaaaaaacctttaataggaaattaggaaaaggctaagtgcgacccaagaggctatgttgttcccttaacatcaaataagtaactgataaaagttcgagattgttcaaagagtctataccccttcataataaggttacattagaaaagagactgtgaaagcccaaacagaaaaaggctccttcaaacaaaagatctcaaggcgcaagtgctaaaagagacaattgtaggaccatacagaaggtatgatgctcgcaaacttagtctacaagaacacttaaaaagagtttttataggcagggaggaagtgttaaccccaaaaattagcaaagctaaccttcgagatcagtcaacagttaacccggtgttaactatgaattggcattgacgattctcaaagacttgtccaagcatttcgaagatcggactcagggtcgcccacaagcaaatttttgggaaagttgagaaagcataaaggatgagacatcactctataaaaaaatttaaaggtccatcatgcatatttgattgtttgaagtatttgatggaggtaggtgggcatgagtagagttagtaaggccaacttactaagtgtcaatcattggagaattttcataatgatttgctttaaattagatcttgtcataaacataaaatttatagaactctttctaatcattccaatgaatttcaaatcgtctaattccggcatatatcaagaaagttatagctaaaaaactaagaccattaaaatgtgagagtggggtgtgcgagccggtgtgcttatgtgtgagccagtgtgcctgtgtacgagtcggtgtgcctttgtgcaagatgggaagcatttgtacaagtcagggagcatttgtgcgagcagtggagtcttcgtgcaagttgttgagcattcatgctagccttgaggcatgcgagacgtccactcgaaccacgatacgagacgtccatgcaagaccatcatgccagctgtaccatgcgagccatgtgctgtgtttgaaggactcacatgcgagctatgtgtggtgtgtgcaaggctcatgaagattttcatgcgagaaagctatggtaaaaatactaagaccatgaaatgtgacagtggggtgtgcgagccagtgtgcctttgtatgagctagtgtgcctacgtacaagttgatgtgcctgtgtgcgagctggtgtgcctgttgcgcaagccaatatgccttcgtgtaagctgatgagcatttgtgtgacccgtgaagcatttgtgcaagtgatggagcattcgtgcaagccgtgatgcatgcaagacgtccatgagagtcgtggtgcaagacatccgtgtaagatccccatgtgagccatggcatgaaaggtgtgaggggcttgcatgcaaaccatgtgtggtgtgtgaagggcttacatgttagttgtgtggtctgtgcgaggctcacatgtgaggcatgtcgtgggagacccatgagatagtgtgaaaaatttgaagtgaagggagaatttggatatgtgttgaagaggacactgttaatgaaggaatgaaaggagatggcttgcacgtagagaggtatgagaccaagtacagccacttcctcaacgtggcttggtggtgagatggtacaagtagtggagatgcgttgtctgcaacctttaacatcccaacaataggtactccgcaaccacaaatcctacaacttgggaccacctgataatgctacaaggctcaagatcacctcctacacgttcaacttgcatccacataaggccaacttgtccctcgagcaccacaagtgtatctaaggctattagatacacataaattaatatttgattacgtccttaagattaccagtaagttgtattgtggagtaccttaattgtgattttcactacagaagtcagatttatttattgttttgagaatatatcttgtatggtgtattatagagttttatattaggcctagagttcagaattatatttttaggctattaagaaaattttgcaattagctacagtatttatggctaaaaactataagagttttggtcgaagctagcatatcaacattatgcatttagccataaaaaggcgtgataagtggtcattaagcacacgacactcaattgggtgatcacaatatccttgattaaaggcatgccacaacacaaattcaaggatcataaagtaaatatgggattcagttaccccttattttgttttttttagttggacaactaaacttattcaatgaaactctaattttgatattttctcatatttacatgcaccttaattttatctgagaaaattatcgtaagaggactagaataaacataaggtttatgctttatttgcttaagtacattgctacataaagaacattgttatgtaatgaatatatcgtaatacatggaagataatacttgccatataatgaggacatatcgtcatgattaggggtgttcattggatcacatccaatgtttttag

SEQ ID NO: 42996 - DNA, 3510 bp, Cannabis sativa
aataatgtggatggctggaagcatgatctataattatggaatcatgacttttctaacgaatcgaatgccagttccctttatgtgttaaatctagtactagaatgttgcgcgcaaattcagatggaatcttgaattatacttatactagtaaattaatggaactaaaggataaggaagtaattagaagggtgaaatataaaatttgaccaaaactaattatgaactaacaaatggagggctaatcactggagttggttatatcaatggacactgcagtaaaactcaataaatatagttctataattactaagaattcaatactatatttttagttgagtaatcatggaattaataaacaaagattatttggttgataagactcaataaataatctttattggagcttataattataggccgatggtccccaaatcgccatcttgaaacactgtcaaggataaagagtagtataatatctttcggacaaatctattttgaattggaaaaatagtaattatttatttttgtaataaataaataaataataaattaattaaataggaaaaagaccaaatttgtgaagacaaaatttttcaagataagatttattgagacaaaagttgttaggacaaaaaattccaactttgtcttaaacaagacaaggtaggcacctacgattaattaattatttaattgattcaattagatagatatttaaatttgaaaagtggttacagatatttcgaagttattgaaatattctctcaagtagttgagagattctctcataaatattagtaaacgaattcagttatagatatttatttatttatttaaataattaaatatgatttaattaaagagttttgtttaatataaatagaagcctaatttgagaaatcaaacttacactttaagaaagctatttttaaaatagacagagaaaaagaaaacatttttctctctcaattgttcttactcatgtgttgagaactcaagaacaacattatacattttatcctaatagtccacactattccttgtgtgcagtagaatgatttggaaggcactggtgtgagtccaattgcatcatcttcatcacctagattaagggatacaacatacgagaagtttcaaggatacactgatagtcttcaagaggtatatattctaaacttaacttgtattttattgtttcgatttaatgtacacacatttagagatccgaaaataatcagataatacaaaaccctttcgctgcatacctgattcattaccataaaactaatattacctccccaagtctcgcggggggttaggcattccaaaaactatgaagatcaatcaagcctttctagtaaaatgggggtggcaactcattgagaaagatcaatccttatgttataaagtggtaactgccaaataccttaagagtacctcttttattcattgcaattacaagaattctaattcgtggtactggaagaatgcggataaggaaaaggactgaggaagggtgcttgctatgaggttgctgatgggagagatataaatatctggaaaaatccatgggtggctcatggtatagttttttaaccaactccgaatggggttcttactccaagctctatgactatggcatacttactattggacaatgggggatgggatctttggaagcttaatagtttgtatgattaggacatagttggagttattttcaaagaatgaaagccttcaaggaaagggatggatcactggatttggatgaaggaactgcatggtaaatttttaactaaagctgcttacctgttgcaagatcttgagagaaccaacacttgtcatgctgttccttttttgtggaacaaaatttagaaaagcaaaacacatgagtgacataaagtgctctggagcattttgtccaatgcaattccaattcgatccacctttagtgattagatgaacattgaagacgcgtcttgcccaatatgtgggagcgagaaagaaactatagagcatttatttctttattgtaacatgacttctcatttgtggagaacttatccttgtagtctcattcctgttcaggaatcgaggactagaatgtggaattaggccaaaatcattttgagcctaaaagtgaggaacgtgaacgctgatgaggtgttcttgtatccgtctattgtagctgacactatatggagagtgagaaatgacaaggtacataataaatctatgtatagcatttattattatattaattctatttctcaatgctatatagattatggtcactctcttttgtctcaattacaaatgtctcttgttgtcgttgagtggagtcctctgcatgtggactaattaaatttaattacaatgtggcagttagagagggggctacgatgctagcggcagtggctcatgaccatcatgtagggaagattttgtgggctagtaccaagaggcttccttttgctaatgctcttagtggggaagccgcttcttgtttgttggctttggaactagcagagaaaaaatgcttacaatttgttattgtggaatgtgattctgatcttgttatcaaagtgtggtcaatgggttaaatttgaagtgggaaattgataactatgtagctcagtgtatgagccttttgaattcatttttagaatgtaatttcatgaaggtttcgagatcctttatttttttagcttatactttggctaagtgaacttttaattaaaatgtgactggttggattgaagctttctcaattccagataatattatttgtaatggccacgagacttaatgtgttttacgtctatataattttccttctttttggaaaaaaaaaaaaacaacattaaaactaaaatgaaccaaatgcctaaaaaatgaagcatggatcaaagaaaactaagcttgcaaaattctcaaagtaaaaatgaagcttagtagttactacatggctattctgtctcatacatctaatgttgtttgttgaattatcataacgcaagtcaagttgctttgccatttatctaacgaagtagctcaatattgtctagttaattatgttttgcattgtacattttatttatgtgttggtagctcattatttaaaaaggttacactatcaattttttttttttttagtactcacaacaaaaagtttttaatctgccccgcatatattatcatttcatattaatcacaaaaaaaaaaaaaaaacttacaatttattctaactacatttattattattaatttttttttcaaaaaataaaaataaatactaaatatgtttttgatggtgaccaatttcatcactatacataatagcttgtgtcaaaaattagttccaaatattttttgtgtgactaaaattgttactaagttttttttgatagtggggtctaggagtgttcatccaatccaattcatattattttgctcatagtgcatctgatgtacactaagtgcggattttatattttggatctaatttaa

SEQ ID NO: 42997 - DNA, 9911 bp, Cannabis sativa
agctccacctgatttccgtttctttgtctttataaagtttacatcacgaggcacacgcaaaccatcagcatccaggccccccgattgatgattgttcatcagggttgactgccaactcaaattcctttccaggtttaacatctttactgacagggagcttcatcttgggagacaacattttcacttcttcagtagtgtatataaaaatctttctaaccatactacagaactcactgcaatagggaaacgaagatttaattttaacatggctagaaaaacaacagatacatccagttggagatgagaagaaaacatgagacaatctttggaaacaaaataaaggttcttcaatcatataaagtttcataagcaagatagaataatatgtggatgttaaacacacacactagtgaacctctaaagcataagtgcacctgtgctcaaccagcaatggaaatttaatgctaatctaatataggataatatttcagctgattaactcaggtggcagaagattagctggaaatatggaccccccaccccaatgtactatcatgcagaagagctatgacttcaaatagttgacttgtgaaccaacacttcagtaaatgggaaaaagaaaaatctaaatgacaacatcatgcgccagtaaaaacatctgtgtatcaagaaaacatggtcaaatgaaacttactgccatggatcatccccaaccatcatcatatcatcttcatcatcagtgtagacaacctgccatttcttagtagatccacaaagttcaccctgaatgtcaaacatctcctccaatttcttcaatagatcctcatatctatcaaatcttgttaaatctacagctcttccaactgcaatcccttgcatgtgcacctatagaaaaatatacttctgtgagacagtacaaacaccaagtagaaacaactggcttacaggcaaaggacccaagtattcagtggataggactgtttaaaacattgatgtcagtacccacagcgtgcataagcacaaggaagggaaaggaaaggaaaaacacgactctagaccaagggtgaaaatattaagaactaccttagtgcagcttctaatttgcctactttgtgactcctgtggtgatctcaaacttgatttttcagcatcataactcacagaaggatgatcagctcgattaacattagatggttcagagtgctccgattcagcatccaaggagggaattggaagagcatccccaaaactcccagccattgccaccacctgcacaggtgaagtgtcttctaaattggagttgtgaactagctgaataccaaacaacctgcagctattcccagagttctgttttctttccccggaatctttgtagatagagaaagagtcagttactgcatccactcgattggaccagtacattgtgttgctggacatggtagcaaggttgttgttcccactaaaaccaagagagcttgattttgaagcagaactaaacttgggtgatgaatagagttcttgtccacgttgttggtcacagtatgagaatgctgagggagagtcccccagagatttccatgtacctaaagaatctttaaatgaataaccaaatatgatggcagaatataaggatggctagataaaaactttgcttaccaagagcagaaagatctgaggatggtgggggtaaaacagaaggccttgcacgcttgttcctttgggtaggttgagtagttgggggaggagttgccacaagtggctccaattcccatggagatactctttcaggtcgcattattgatgatggttcatcccattgaacctgaaaataattacacaaatactttaatctaaaagaagaaggcttgattaaaagtattaatcagccaaaagtaaagccatttaattagtcttttgatgaaactaactaattttacaggaagtcaagtctttgctttcattagagaaacacatttgaaactcattaacaatacaaagaccttaccatttttctccacaataaggcatgcaagggaaataaattaatttataagacacaaaatgctcgtaaactcgtattgaaaaaaattaaaaaaagagctgaatcagtatagtcgaaaatacggactcctaatctctttttaaatagctaatgcttcacacatatagctaggtacacacatatctaaaaaccatagagaaaccaaaagaactacagatatgaataactttgcattacaacaaacccacccatcattgaagatatcacgaaataagaatgaagaaaacttttaggcactctttaaccaaatagcaaccaaaagaatggtcctttcttagatatatcatatattccaacccattttgcttatttttattaagtcctaccatttctctccagccaaatggcccaaggtcttgtttacattcaattttgttctctgttttctgtttcctgtgtcttcgaacagaaagttgaaaattctattaaaagcttgctacacaaccttatttatgtatttaaaaattgttaccatggagaaagatggtcaacaatttccactcatggtccttgccaattggatcatccatataatacacaaaaacaaactctcagaaatttaatatatttaatgagatctcaattccagtaatgattcattagatatcttacagctagaatccctttactagtcagcttctccacaaacaattttattctccaacgagagataaagaagttcctaaaatctttacattttcccaaaattatactagtaaatttaacaaactgttccagcttatgcagaaaatctggtggtaagatcataagaagattcaaattgatgtcaggaattcaattcaaacaaggataaaatggcatacttcaaatgaaagtcaaaagttcaaactattctaatatgttgaacaaagctggggtatcaattaagaaaatattggaaaaggaggcacaccttaagcgaccgccattcagaatgtgcccatccagatgaagtattatctcctacaccaacaattgtaccactgaacctgtaatatagtgaacatatgagcacacaataattcacatccttggaaatctaaagtcagaaaatataccttctctcaggaacttcctccccctcaaacctcatcttaaacctcattccaacagagagtttttgattgtgcgcttcaaggtacttgttgacacttacaagaaactcagatcgacttgtcctggtaatcaaatgaagcaatttcagccaagattacttaaatgagcaatagcaatttcagccaaagattacttaatggagcaataagaaaatgtagatgtaaaaaccaaataggcaattaattttttaatttatcagagaaaatatacgaacaatgaaaatgtaaatttgagaaaaaacaacaggaaagaagcgggggcataatctaactcattgacactaatcatattcatgccattgtcaacatcaatctagacaccctttacattttccctgttttctccattataacttagaagaagatttgaaaatgcctcgacaatattgggaaaaacaaagaaagaaaaaggagatcttactcctcgtctcgtaggtgtgagaagtataagcttacttcgaaagttaaccaaatgtataacacacaaactgcactaaacacaataaaccactaccctttcctcttctttttcttttttttttctatttctatttctataggaaccaatatcagaaaatccagtacagcatgtaacatgtccaacttacaatgaagcctttatccaaataataaacacatgacagaaagtaaatcacatgaatacagaacaaactatccagatgtttgtgcattcaactaagcaaaaaagaaacaagaccttggtttgtaaaagacagaaaagagggttccagttgagatggcatgagatgctgtagctagaactccaagatgcatgctgtgactagaaatcacagaagacggcatattgctcggttgtctcatgagtctcctaactccaacacgcagctctccattttcacctctggagaaaaataaattaaaatatgagctaaactgaaatcttctaacggtataatgaaaacagaatatccacagtttttttcccataacttctgcaagagaacttgccttaaaaaaataaatgcatcaccagctaccaacttcttggaactaacgaagacactccacccagtagtgagcaaatgacgtctaggttgccctgtggtcaatcttttaatatcagaatcccagtaatgtaggaacttgttaacatcacagtaggaaggcagaaaaatgttgaaacaatgcaagctcactgaatccacttagcatgacaacaaaaattagcaaaagtgccatcacgtaaatatatagagcgattaaacttcttgaggaaaaaaaaaaagaagaagaagacagagaacagaaaccattttaagccacatgaaaaatacagttacttctctggagttgctcacttttccacaaccagtttgtgttctagcaattcagttaagaaaaaaaatgcccgtgcaaagcaaattagatctgaacatccagcaataaaaggcaacacaccaggaacaataagcagcatgcaccacagactaagataacttaggacagaattaaatgcaactgaaatgatattccagctaaaaaaaattgatataatatggaccagccaaatgatatttgctaccataagccaaagaagaatagtcaacctcgaaatatatgacgaaaatgccattcatttccatgcagatcagtggcaaccaattcctgccatggtggttgttgagacatatcctggaaagataacaaaataatagcacatgcaattagtaaagaaaatacacacaatagaaactcccagcacaagaaagcgagaacataaagtgtattccaagctaaagaatacgcatgtgttctgtgtgagtgtgtttgaatgaaaaaatgtgcagaattacgtaggccaaaaaatctataatccaacatgaaaataaaattaaaaatttcgaggctaccagtggtggtaaacagtcatctgcatgcctccgaagaacagagaatccaccatgagtgctagtatcagatgcagtaagtgtcttgcaaaatgaatgcaccgtacaccttggaggttcaggaagtggagggtctgggcttgtcaactcagtttgctaattcacaaaaatatacaaaagtttttaacaatatgattaaagagtgtgaaaggacaaacaaaaatatcatgcaatagctttgaaagctgctgaaatcatgttaggcacaaaaatataaccaaaatcagctctcaaactcaaaagaattacaaaaactttaaggaaaagaaagctcacatcctgttctggtaatagagtaatttgcgcataaacttcatctgtttctacttcagcctaccagagtacaaggtaaaagtaaaaattaaataatgatcaccaaccagtgcttgaaagaagagaacattcattatgagacaataaaatgtgaatgacataatttacccgcagttgaacattaacaactttacaaagaattttagacggtagattaaatgaaggcatttgctgctccagaccctgatgcattgatgcttccaactgcattggataatcatacatgagagactcaaaaaagttaaataatacagaaaaaaaaaacaaattctggacttcaaatacatatccatgcgtgtttctgatagatgttaagtacaatttttcatttgagacattaatttagatcttattggatacttgattatcatacatgagagactcaaaaaagttaaataatacagaacgaaaaaacaaattctggacttcaaatacatatacatgcgtgatgcgtgtttctggtagatgttaagtacaatttttcatttgagacattaatttagatcttattggatacttgattatcatactgggtaccttgtgttctcaaaataaggcccttatttacagttaaattgtgatctcttagtatggttcttttgggtaaatggcttcgaaattgtcctttgtaaagagatgtcttatgccactaaaactaaaagcaaaaatttgaacgggaaaaactggttcagcatatgcaaaagtatgagggtaatagttagccccactttaaaaagcctctttcctttctttctactacgggacggtttcctgctttctctttgacttgtcacatttctatttagaaagtagttgtgtttctttccaagaaatattacaataatagtaaataaacaattattttgaaataaatttttgcccctaaatgtaaaacacatttttgctgcaaacaactcctcactttttttttaagtctcctaactggggcgtgcaaggttttacatatccgaacacatgtcactcatcgcccttccacaatatcttctagattatccaaaaatattattctattttgtttgcttggtgatgataaggattctaaagatgaattgtgattttggtgagaaagtggagttcatatttcgtttgtttttctcttatttgggtacacaatgtcccttataattgatcctacttatttatattatcaatgatggtcctcggttccagtaaataataataaacaaataagtgttttgtaacttgtaattagctacaataatggaatgctataaagagataaaattttaataaactactttacaataaagtaaaagttaaccccagaaaatcaaaagattcagaacaaccagaagatcacattttgaaagttcacatgctcagcatgagacaaagggagaaagtagaagcttaaaaatacctgttccatatgaccttgtggaaagtaatatactcgctgcccttcacggggaagggtgacgagtggtcctgcacatgcatgccataattccttgtacaattcatctgaggatactaacattaaaaaattacagagttaaactaagatattcagattaaaacagaaacagcaaaatgcagcacgatgtactttattgaacaattatgaccatttactggatgtaagtccaacaagaaaatataatgaacaaacaaacagctaagtatttacaaaagtactagcagaaaaacagcccaccaaagtactaggcaaagttgacttttccatctcattcactatttacctcagaaaattaaccattagaatttaaataaaataaagattgtccaaagaataaaaatttcattattgagttatagaaaatggatggataaagtttagacattgggtagctaattgattattcaatgagaaagaatttacaggaattggggtgtagatagagattggagccttttattgtaatctgctagtttgatttttatccaaaagcctaaaatacaagatctgctatactgcagaaaattgacttttccaaaatgtaaaaaaaaaaaaaaagcaagcatacatagcatttgcatttaaagcaaacaaaataattgcactattttaacgacaatgaaataacttgtgaaggaaaaactgaaacctggagggcttccattggaggttggattcaaagctgggaacgccatagcaaacgaccacaaagaatgacagaatctttaacaaactctcaaatctgttcaatataaagtaagtagttaaaaaaatgaaaaaacaaatgtttgataaaaagaggctaggaaaccaactagtgccaattaattctccaaccaactaaaccaaaccagtaattacagcccttaatcaatgcaaaactggttacagaatctgagagcaaaagccttctctagctgctgttgtgttgtcagtgcagtctgctttgtgacttaaatgcagcaagaaaaaattaaaataaaaaagggtttgcatttgaagctctcacgccaaaatttgagcagtaaagtttgtacctttttcagtttaattatcaactctttctcttctaaagtaaataaaactccctcattttcaaaagacacgtagtcttgttaaaaagaaaaaaagaaaaccataaacacctataatccatttcgcatttaacatagcaatcgattttatgtacgatccgtatcactctgtttaatacccattaataaaatttcagcgctcccaacaacaattcagtgaaacatgaaacaaagaagcaaattaaaacaaaggttaaaaaaaaaagcaccaaagaaaatgctttcgattcttcgattttcaccggatccttaaaaataaaataaaataaataaaatacccatttccccttcctcaagaaaaagaacatttcatcattcaaaaataaaacatttcatttcctcaccaaacccatcctcactcaagctcaagcaccagatcgcacagattttccaccagtacagcacacaagatacagaccccccaaaaaaaagaaaaacaatacaaaaaccctcaacaaacagaaatacataaaaattaacaaaacaaaaattctgaaaagaaaaacatatacataagtgtatgatttagatttaccaaaaaataaaattgtgagctgtttcgcccgagcagaagtctgataaaagaattattaagtctgataaaaatttggtagatttatgagagtatggggttttgggatccgatgaggaggacgacgatgataaggtcgtgtttgtttgaagccgacaccaccccttctctgcctttattttttcccttaattttttacttttctttttttgttttcatacaaacatacactgtctttctctctctatatatatgtcttatttttatatatttatttataaaaataaaaagtttgcatatttaatttttacagatattttattaataaacaataaattctttttaatatacatagatagagtttagactggcccaaaaaaattattaaattattaattattttatcagatactgaatagggagataagggggcgtaatacgcactcacttaactttcgctctaaatgtagggagagaaagtcagaagaggaacagcgttccattgagtaccctgaaatccctacaagtttctcttttctgtcccattttccacgctcaaagaatccatttttttctcattttaattaatattatttttaaaataattagaattaagtgtatcaattacaattttattatttgttaattgggtttgccctctgtctgactgactgtcccatgtttaagtatttttttaatgataatattaaagtaataaagataagattgtaattattggttgttaggtggaattactgattaaccctgtccttttcttttattgtatcaaaggttgtaccgtatgaacttgggtgacccaaccccacacattctaagcactgtatccctatcctatgacacctatgagctgtgtgactgtgtacatgagattcacaaggaggtatttgactttttatttaaataaataaataaataaaataatctcattaaaacttttagtaaactcaaaacaaaaaaaaacaaaaaagtaaaaaaaaaaaaagtgtcaaatacattaattgttaactcagaaaaataatttttattttattttattatttagttacatttaaaaaaacaaattgaaaaaactagcaatcaaagataaataaagagaaaggttacagaaactaagaacttggaacacagttgttccaaagcacctcttcatcggttcctaacgcctgctgatcaatgttatgagccagagtgttatggcgtcgaggtatgaactggatggtagcgtcaggaaaattagattaattttaattccatttttggcatatttaattgacgaaaatattttattattcattgtatattttcgactggtatgcttcaatatggtttcctattttgtgtat

SEQ ID NO: 42998 - DNA, 5044 bp, Cannabis sativa
ttttagtttcacatttatttgtacgttctctctctctttctcactattggaataaaagaagaaatatgtattcatataattattattgtttttctttattgaacaactataattcttattgtaatgtcttcgtttttctgacaatgctcaaacttggaaaagttgatgtaaataaagcattgctttcctctatcatttaaaatagattaccaaaatactactttatttatgaacttctctatttgtcttttacatcattaaataattttttttttaaatatcttcattaattaaataataataaaatggtaataaagaatacaaaaataatgatatcaagtaaaaaagaagagaaaaacaaataaataaatatatataaaaaaaaaaatgattaaaaagtgtttagctcactctcacttttctttgttaaatgttaaatgtagctataatttttcttagactaagaacttagctattataactaaattatacattatctattggaattcattttttacaattagctaaattgtctttatttttaacaatttaccttttttttttttgagtgctctattagctaaatcattaacaatttgaagaagggagttaactccaccctccagatgatctaaatgtcattttcattttagccaactatgccttctttacatctagtcactaattatgggtgttcaaaaatattttcaaccctcaacccaaataaatcgcccaaactaaaccaataaattgatataaaacataactcgaaataacctaataaaaattcaaatcgccaatatattgggtggattaattaataatatttctaaaccgctcaattaattcaaataaacagagtaaactgatttatatatattttaaaagatgttcatagtgttagcacattacataaattacgtttattagttaacagactttatagttaataatttttgttgtatttggatattaaagttaaaatttaaaatttacaccatatcattattttttttcctatttttagatgaatatttattcaattagtatttgtcttatgttaaagttctttaaattaattcactataaattttgtaaacttgacatataaataatatacttgatttggtttgcataaatactaaaaactaacaataataattatatatataaagtgaaaatcagtttggacaggttaaaccaaccaaaccaattattggtaaattaaactttttctaatattttattgggcagctacaaataaaaattttcaacccaatatttacattgagttggtgaaaatatgctataatctgatcaaaccgactgatatacatccatactaatgacatctttatggtgcttcaagcattttttttatttttattttttttatcttgttttagtcttcttcctttgtttctctcccaaaattattttttttatctcttcctttatggtgaaaccccattgtttgagagagttggtgagttggtcaaaccaggtggccagggggggggggctgttttaagccatatatggccttttgtaatttgcatacatggttaggaaattgttgatcaataaaacctttaggttgatgcatatagacatcttcttgtaactctccattcaagaatgcattattgatgtcgatttgctgaatttgccaaccatttgttacagcaagtgtaaagattatctgaatggtacatgttttgacaactaggctgtaagtttcaaaaaagtctacccctaacacttgttgaaaacctttagccattaatcgagctttgagtctctcaaaagatccatctttgttgtatttcactttgaatatccatttgttgtgaattattttcatgtcagatgtgggggggctaagaatccatgttttcttgttcttgagagcaacatattcagtattcatggccttattccaatgagggttagctaaagcttctttgacactctttggttcattagtatccaattgtgttgcaagatatactttaggtttatatatgctaagtttagacctagtcaccataggatgattattttgagtgatgctatgatgtgaagagctactgtcagtagtagcaggggtgtgctgaggactattattagaggcactttcaggtgagtgagatgagttggtgttggactcattgaatgaagcttgtggagagttttgaatgtgaatatctggggaggaatcactagagaccgagggggtgtgatggaatatttggattgggaaatttgtagtacgggggataggaaaactaacaggactgactatagttggactggtttgttgtgtttgggatttattagggaagagtttattgaaaggaaattcttcttcattaaaggttacacttctagcaacataaatccgtccacttgggtgcatacatctatatccttttgaggacatagtatagccaatgaaaagacattttgcggacttgaataatactttgtgagattcatatggtcatagcaaaggaaaacaagaacagtcaaatattttgagcatgttgtaatcgggtggatgttgaaaaagtgtttcatatggggatttgttttgaagtatctggtttggcagtcggttaattaaatatgcaacagaagagaatgcttcccactaaaaagttagaggcatttcagcttgtgcaagaagggttaagcctatgtcaacaacatgtctgtgttttcgctcaacacggccttgttgttgatgagtgtgagggcatgaatttcttttgagaacaccaagatcttgatagactttatttaagggtttatactctttccctagatctgattgtatgcttttgattttggtgttaaaaaacctttcagcaaaagtattgaactgtttgaaaatgtttgttacttcatatttagttttcatgggaacaaccaggtgaatcttgtgtagtcataaaaaaaaatgacataatatttatagccatcattagagcaataaaaagatggaccccaaacatctttaagaactaattcaaaaggcatcttggttgtattactggtacatttgaagctaaactaatgtagtttgcctatttgacaggcattacaaaaaaaaaaaaaaattattacatgtagagttgggaacaactatagaaagaactttatttaggacagagtgaacaggctgcccgagcctatgatgctaagtagtagaaatggtagacttatcgtggacatgattgcttgtggtagtatgattgttggcactaggttgaggattgagtgaagaggcaggttgagttggagttttggtaggatggacttgaagcttgtacagaccttcacaaaggtcagccgaagaagtacttgcctcattttcttgtccttgatgagacaacaaacaacatcaaattcaagaacgacattattgtatttggtgaactgggaaatacttgaaagatttttggttaaactttgcacatgtagtatatcttgcaacactaagggatgttttgaagaaaaagaattaatgtagccctgacctatggtatgaataggaagagaagagccattacctattatcaccttggcttttcccttgtaatcagtggcattattgaaattgtgagtgtcatttgccatgtgatgagttgcccttgtatccaagaaccaggcttgggactggtttgatgttgagtctgtgtgagtgatgttggcttgtaatgagtcatcattgtttggggagggtgtagaggtgggttgactgccagtaaagttgatatcaaatctatgaaagcacttgatgactgtatgcccagaccttccacataattgacaaatggttctgttgctattgttgccaccatgacctcccctgtagttgcctcttctccctcgatttgaaccatgatattcacggtttgtttgggaacctatgcctccattattgaagttcatattggccagatttgcttgcacattaacaaagactctgcagaaatttgttgtatcctcatttcttgattttgaagcaagaattggacttcttgtagggtaagatcttcagatctggaggtgaggttaaccacaacagattcgcattcagatccaagtcctccaagaatgtataaaatcatatcatcatctttcatgagttatccagcagctgtgagattatcggtatacattttcatcttcaagatatagtcttcgatggtttgagagcctttttttttttggactataataaccctcaaagttgaagaatcctggctctagatctcgtagcatagagttgggtgaatgtagttcagatctcaacagagatacgacagtggatcacgtgtccaagcatgtttttagagattgaattcataaatttgccccgcatgaaaataacacttgcttaattattgtttcttccttatcctctctctatatatcatgtttaatttatgtacgaatataaaaaatagcctcataattattaaggttggttgaattattgggagaaatagataaatattgtataggcccatcatacaattatctctaaataataggttaggtatatatctatcagtatcacttatacataatattaatgatggtgtaaattaagaatttcctaagaggacaaaagaagagtgaaagattttagagcacaaataataatacatatgacatagcattctagggtgttcagtacccgtaatcttattcttgtgggtaaatatcgattcctatatatttgaaatcaaatgaaaatttataaattcatcagtaataataataataataaagaaaaatcgtcaataaataaattagaccaataaggatattcatattttaaaaatattaatatactctaaaatatctactagtatattcttttttttttttttgcatgaaatgaaacctcaacaaagtatcatcattgttgtttggtgtaattttatatatatataaaaaatttgaaaaaatatgcataaaataccttaaaattttttccctaatctaatacattttaaaatttaaaaaatat

SEQ ID NO: 42999 - DNA, 2051 bp, Cannabis sativa
aaacccatggccattatcgtcgcttcaggtgagtccccccttctcctcttctccttccaaaaacccatttcttttattgcttcttctcttcccgcagatcccgagctttcttcccagctcttctccatcctatctcgcccaaattggctgaaacatccttccctcaacaagcttcttccttctatttcaccatctcatgtttgttccctttttaccctcaatcttgatccccgaactgctctgggtttcttcaactggattgctcttaaacccggctacaagcacgatatccagtgtcactcttcgttgctaaacatcttgattcctaatgggttttttcgggttgctgagaacattcggatttccatggttaaagcttgtgcttcggttgaagatgcaagttttgtgttggagttgttgtggcggatgaatcgtgatgctaaccttgagtttaagctcactttgaggtgctactatgtgtggttgatgtcgctggctaaatttctcatgactgattgtttgaaaagtgtttttggaaatttgttgttggagatgttggagagcatggttttgccaaatgtatatgcgttaaatacaatggtaaatgcttattgtaaattggggaatgttgctgaggcaaagttgtactgcgggttggggtcgccgaccacgatcatggatcctcgaggggcccctttccctctgttcgggcagtggctcaactcgacgtctcatttccagtcatgtttctcggggaggttggcagtgggtggctctttgaacactgttaatggctcgcttggtgccacttcggagatgccggcggtggacggaattgctctggcggcaagtgacctgaaattttgtacgggttctggccatcgtgctcctgccttagtattgcaatcgcagacgacagggacaggtcaaagaaagaacgttagagacaaagcttgggttcccaagcctatgttgatggatcagtgtactttgggagtaggtaatcacgttttgggaaacccttcatcgttcccagctgtgagtattgcccaaagcactgtggcaatacctgttatagataatatttcaaatatgagggctacggaggagaacgccagctgtatgggtgtactgtccaaggaggtggttggaaagtcaaaggtggaccctattgtgttggttttgggccgaaatgagaagttgggcccttgggttttttcggacaacaaggttaattttcaatgtgatgaaattggtgggtcgggccttatttatttttctaataatggggttaattgtcttaacaagtcgcctcctctccatttggagaatggacattatgttgatgggccacctagtgggatccacgtgggtagagatgtgggattattggataggcccaataggagtgggccttctgtggtgggtgctactcgttttaactcatctcacctagttcgttcggcccatcaaaatgaaagggaggctttggctagtttccttaagacccaagacatttttatccgtgagattcaagagctcgatggtacgggaaaaaataaaagaaaatcttttggtgtggatattgggatttctcccaactcagaatgcaatgagcgtaccactcctgttaagaaaaggcgcttggatgttgaaccctcccctatgggagtcaccccgttggtgtctatgcgtagagttaaaagggtggtcagggattatcctcggggtacgggaccactggggcgggtggagaataatttgtgcgaacatgcttctaatgagtctactgaggaaccactggagagtgacgaaattgtttcaaggggaggcgctaagattggcggttctccctcttttaaaggagtcgaaccagtctcggtgggtcaatctgtgagactcacggcttggaagatgaaggctcgtctgatggatctctctattccccgtttggtgggtactcaaattgaagatgctagttcagcagttggcgtggcggtgaagtctttgacccctgtggaggaggccggtgtacctcctccacaggagcc

SEQ ID NO: 43000 - DNA, 6092 bp, Cannabis sativa
attcccggtctttaaaataccctactagtgactcaccctaccgcgacgcaccagattattacccaatgtcattcagaggagtagcgtaccaaccgtcaattaacagcgccattggaaaactgctcaatttcgcggttactcttaccaaaaagtttcttctttttccctttcatgtttttctttagaggtttcggagaagaagaagaagaagagtaaaatcatcatgggagatgaaccaatggagcgagataattacttggccctcaaagatttaagacttgaaatcgaaagagaagatgagaacttttctgtctgcttttggatttatctcaccaactccactgcattccctgttacacttcttcaaaaggtttctcattgccctttttctctcggtctcaacttgtcctctttatatccttttatgaatgcccccgtttttgtttctgccaagaattttttttttctttttcctgaagggttttacagcggtttatggtgtctatgtatcttttcttttctttttcaatggtaaatttttggttcctttcatagttagttgaagcttaaaaaaagtctttttttttttttttttatttccttctaaacacacacaccaaaaaataaaaaatttgttgactcattgaatagattactagttgtgagaaagaacttgaagctcctttagttaatcatatacagtctaagtctgttatatattctcctgtgttcatttcaggtgggagaactttcagttgtattttttagtgtaccatctgagttttgctgttttcaatgtcaatctggtttcatcatttcagtttatatgagtggcatttttttcttcattttttcttgtcatgccaagagggaaggtgatttgtactagcacatttatacatattgataattctactacacattgatatcgctttctaagcaaggaccatagtttctttcatttcttctatgatagttttggtcttgcaatttattgggacatctttttttccaattatgcaggttccccaagatggctcaggccattctcctttccttgttataaatgaaaaggaagtgatgctttttccattacttcccttgaacaatgaagctcagaattcttccaaccctgcttcatcatctgaagttccgtgtgcatcagtagagactgagtttcctcttgaaaagtgggttcattttggatgtgaggtatgttctgttgataagttagagacttgtttggttacttcattttttctgagtttcggctagattttacccatcagagaatggcaatatatgacatggagaagatattaacatggtcttataattcagttctttatgaagattgattttacgccttatttatgcataaggttttgtgttgtggcctttgttacttccaatctttattactttgatgatgctggtatgttttcatagggtatatggaaggaattctgataaagaacaaatttttagaactttatatgaacttcatattcaagagctgacctagtgcacttgggtctgatgctggcgcaattgatgttgccttaacatgttgatagtgtagtataggcataggtttctttgctcgcaaatatttcattatctcttttctcggaagatgaactatgtctaatagaagttctttaaagtgacatataagctatttggtcttgttttgaaattattgttggctttgcctttatatatttattttgtgggggataggttctgactgactgcatattgctacacattgatggagagtgtgttggagagaagtctctctcttctatatctgaaaaagattgtgctgtaaattcccctggaaagatcactttggttggtggaggtggagatgaggccaatgaacagggttacatttacaaattagaaattttgcgtacaacttcatccatcaaggatcactttgctaaggtgtgtaaaagtatatgccttgaatgaggattttgttttttcatgttcctctcttattgcaattctcaccgaaaaaatatttacataactttcttataagattttctaatgccaggatccaccggtacaattatctattgataagtcatccgcatctgagattgaagaatgccaaggtggtgtttggagtattattggaggcaaggttagactaaatgtttttatgctttcattatcctgtaatattaatttagggacatttgtagatatcgtgtcatatagtactgtgttttatgtatgtgtgtgtttaaccatttttcaatcactaattagaaagggatgtgtgggtgtgggtgtctgtgtgtgtgtttaatcagttatcaatcactatgggatttcatttctattctctttcatacaagtttgaattttagattttctgatcaaccttgattataaagcctttgcattctaatggttgctttttacagtaaacaagtccactatagaatctttcaagtgtcatgatcttgccttagtattaataagctactaatattaggattatctaatgaagcttgctacttttgtttatcatatcacaggcatcctgtcgccggaacttttctttagatgtggtcttccttgatacctctgaccagcctgtaagcaaggaatttgaggttttcatctgtcctttgaacatgacatgacacctcactttgtttgattttttctatatttgtacatttgacgctcacatctacttgttttttgtatttgataggttgtggcttcacttgtataccttgataatggagcacctgttgagagaacaagtgatggagaagctcctcttttggcaagctttgatggaattgaatttgcttcttatgataaaccaagtaaattattgcatgggcgtgcatcttttaagctcaaaatatctcaggtgctaagattagttttttgtttttctatattttgttccctggaatatcttgtgctacacattgttacaccttatctcataaaacaaaattgtaattagtgaactcgccagaccttggtgacaagagaactagatgaagcctagcaaaatcattttaagtttttccatatagtagttatttctttgttaaaaaagttagtgtttgtcaaaaaatctgggatcgttgttatccgagactttaggatgtaactcaaagcagctgctgcagcccaagttaattggctttatctcggagatagattgtattgtaccctatctattcagatttgcttctgccttcccccctcctctagatttagttaatgatggtcatatattagtgttttctggttcttctcctgtactaatgttttcatgttcacattccataagggacatatttggtttaggactaatgggtgtctacatcaaaagtgatagtatatttgtttaaatgatatttagaaacctgaagaatactgtgtatttgaagtttcttaacatattttttcctttccgtctggccctggtatactttctggtcctgttactttttctcttttgttgtaagtttagctatgtattcttatttggtgacataacgataatatgccctatttagtatatccacacctttatttcttgtagtatgggattgtcgtttgtatggtttgacatttttcagtctttaaatggagcaaacatagatgtactttgtattatttttccttataaatgttacatatatttccagttctgtgcaaattggttaattgcctgattagtttctcccacttccccccgtttcagctttcatccaagtgtcaaaataggcttttctgcattaggtttcacttgcctaatatggaaatctatcctttctttgaggcattttctcctccaatacgtagtatttcacgaaaccgaaatactcgagtgtcctctacaatgtcaaaaaggtcaaactctgtcccccatcaagtatctcagtcacatggagtggatgaagatatgatggatgttgatcaaaattcgtcacatgaaacaaaacctaatccgtcatcaaagcgttcaaagttgggacaagacagaatttccacaacctttagggttgatccaacactggaggcacatgacgatgaatgcaactctcataccaagaccgctaataataaggtatataccatttccttctgatgttagaattttgtttttggtcggtgttgtcttctgagcagatggtttcaggttgaagatactttaatgacaagttcaactgtagaccctgacaactttgatgaagacaactcctcaactgactctgaaagtatagaagctagaaattcagctcccaagagtacttcaagttccagaaatccaataccagatgcgactatctttaagtactgcctggcaggcttagctgagagatcccttctactcaaggagattgcaaactctgcttctaataaagaacttttagattttgcaaatcaagtctccctatattcaggctgttcgcatcacaggtaatctaagaggatcactgtatctcttatacttagatgtatagttctccttttatagaaacattttagcttgagaaatattatctggcctgtgtttcctatgtcctcatatctagctttcaagaatgaaagccattaaacaatgagtactatcaatggacaaatcaagtggtcacaactcttgccttcgccttttgtctgtttgctgccatcatgcaacatctcatcctttttttttttgagaatactttggtaattccttctcttttaatgttacttcaggaaccaaatcatcatggcaaaacgattagttgaggaagggaaaaaggcttggaattcaatctcaccaaacaacaacagggttcaatgggaatgtgtggtttttgtgattgaagaacattttatgaaaattgcttgttgcagttctcggtctctcacacaacaggtctctttctttctctcgaatatatatctagatagtctgctgcacacagtaaagaaaatatgtgttgatattaataacttccaaagatttatatatatattggtatttgattgtaaactttttcagtccttatggcatatatgtttctctaaaatctcatttcatcacttcaggacttcaaccttctgaagagaattgcaggatgcgaagaatatttgacccaagagaactttgaacgaatgtggtgctggttataccctgtggcttatactttatcaagagattggataaacacagcgtggagttctacatcacctagatggatagagggatttattacaaaggaagaagcagaattatcactgcaaggaccgaagggttttcaagagcctgggacatttatactccggtttccaacttcaaggagctggcctcacccagatgctggtagcttagttgtgacatacattggaagcgattatacccttcaccacaagcttctgtctcttgatcatttatataggtttgtaattcattatcttttgtcttgctattgctaaattgcatcaatgagtaaaatatttcaaggtgggtcaatttgcaaaaataactagttgagtagcaagtactccttgaattcatgacccacgagattgatggattggtaaaatcactgttgatggcaatatagatggtactgtgtcttgtatgatgcaagtaccaacagtagaaagtctaaaaaaagggccaagaaatttatgtaaatcttcctctatatttagatgtacagtccatctaagatatagaaatcatggattttctcaatcctggcatatcgcattcggtatgctgactttgtttagggaaaagtgattttaacctttagaagaaattattggtttcttgattacagttctggttttttcatcagaagacaatttggttagaaagtattgaatgctggataatttggatgtccatactcactactttgtcaataggaaaaaatattctttctccaacaatccctttaatgatctgaattaatatgtttacgaaacaataatacacattcatgttagcttcatgtcatctctacaagtagtcgatcgacatggatgacattaattttctatttcttttttagtaactgtgcaagcgaagataaagacgt

SEQ ID NO: 43001 - DNA, 1830 bp, Cannabis sativa
cttcacacaacaaaaatcagggaaaaactcaatagagacatcattatcacgggtcaactttgaaacactaaccaagttttttgtaatggttggaacgtgaagtaaatcattcagcaaaagaggttcagaatcagtattaatagtacccgtaccaacatgttttatttcaagtttgcttccatcccctatcatcatgtgttccttaccattataatcggctttgttgttcactttgttaggttctgaggtgagatgattggtagctccactgtcggcataccaagcgtgatcagtgagagtttgaggagtagcaacaagagctgtcatgtgagtatttttgtcttggctttgagagttatcattctgaggtggttgtcctatgtagttattgttgtacttgtaataacatacagctactgagtgaccaaactttccacaaagctaacaggttggtcgtgagttgttactgttgcatctgcctcttccccgattttgattgtttccacctcttgaggagtttccatgataagggttgccacgaccttggttgttgttcctattgttgttgttgtacccttttcctctaccagagtattgttcctactgttggagttagatggtctctgagccatgttggcagatgggttgttcaaggacttgcttgtaggagagacagctccaagcctttcaagcttactgtcaaagctgagtagagaaccccgcagttcctaccacgacaaatcagatctgtgttcaagtaaaagcacaatagacaaatactccatatctagaccagatagaacatttgcaattaggtgtctctcaagatatggatctccagccaaagctagagaatcagcccacattcttttcattttcaggtagtccgtcataggttgagccctctttcgagttgtttgaagtttcatgcgtagatcgtccatattggctctcgagtaagcaccatatagttcttctagagcagtccaaagagcaaatgcatttgcaccccccaacttcagatgcaatagcttcagacatagatccaaccaacccattaagagttgatcatgaacaatccaaccttcgagagctggatttagttgagtctcagtgattgtttctccatgttcatcgactctttccacagatatgaactcaggaggataaggtttttgaccgttgaggtacccttctaatcggtgacctcgaataatggtgtagatcattgtttcccacaagggaaagttatttctgtcgagtttgataataaatggctgactcagggtgttgctgaagggagtcgccagagtgattggtacagctgccattgaagaactggcatgagccttggagcttccctgtgagattccaccaccaggattttctggtgtagtctgaccggtctgactttgattagtcgacattagcagaggccttgaaaaggctctgataccaagtgaacttttagaaaaataatattaatggaaaactcagctcaaagagactgagatgcagagcatttcattatatagagaaaggccaatacaggggaggtacacaatacctataatagcattacacgtgtaagggaatatacaaaatatcaatccataacagaaacttgttaggatgcaatgattggaataaaaaggacacatacaacattgggattccctcattcactgtcctctgtatttgacagctcagtacttgagtcaattcctttgacattctctaccaagactcttagcagaaaagcagttacaacaaaatccgaaaaaagactacatcaggaaaaattccgctcaactagaatttggatgaagt

SEQ ID NO: 43002 - DNA, 5920 bp, Cannabis sativa
cgataatccagtgatgataaccaatttagcgaaaaaaattctcaatcatatcaatagcttatggacaacccgtcgataatcaatcgatattcaagtgagaatcaataaaaaaatgaaattataatttctctgcaataattcaactatcaaggatatttcgataatagctaaacttaatgattatcatatttatcgacaactcttcgataatcaatcgatattcacgcgagaatcaattaaaaaacaaaattactatttttttcaatcttttgtcgatagagaatcgttcgacaatatatcgataacatgtcgacaactgttaactttcatgaccatcaccaaaagttaaatcttatctataacttatcaagaatctttcgataaataatcgagaacatacatcatttttattttcataccaccaccacactaaatcagaaaacatcataactaccatataaaatcgaccacatattaagaaaaaattcatcaaaatgaagtgtatttcaacacaaataatatataatcgctctaaattaaccaaaaaaaaaaaaaactaacaacaaacttttttttttttgaacaatacctttgtgtggatggagaaagatcggcgtggacgagtccttcgtacaaggaaaagaatcggcgaagaatggagaaagattttcgaaggagaacgacggagaatcttggacggacgggagtggtccttcattcttcgttctttgcgcaggagggcggagtggggtcggacgtgggcggaggaggctacaaggtaggggcggcagttgtggaacggctagctgtagagagattataatttttttagattcttataggttttgaaaataaagaaataataaaagtatttagggtaaagtgagaagttaataggatggtattgtataaaatatttaaaagagtattttttgaaattgattttttttttaagtatattaaatgaaattagtaaactaaaatattataaggtatagtgtgagattattatgataatttttagagttttttaatattagaatatttttttagtaagaggtcaaaaaaaatattattttttaatgtgtcatgatggagttaattaacaattttaaaaatggctgtgttgctttcaaaaaaaaaaaaacattggtgtgttggatatgctctaagccgccaatgttatcaatgccaagtctaacacaaaccaccttagttctcccagtcccacccaaggccaaccccaccaccaccaccacacttctcacggctctctcttcctccaccaccatcgctcacctcaaacaagtccacgcccaaatcctccgctccaaactcgaccgttccaactcactccttctcaagctcgtactggcctcctgcgttatctcccccagcctcgactatgctctctccgtcttcactcatgtctccaatcccgatgcccttttgtctaacaagttcttgcgtgagttttctacccgtgctggtgcctccgcggagaagacccttttggtgtatgagaagatgcggaaggatggagtaggagtggaccgtttcagctttccggctatcttgaaggcagcgtcgaaagcttcggctttggctgagggaatggagattcatggactcgctttgaagttgggattctgtacggacccgtttgttgatacggggttggttcgaatgtatgcgtcttgcgggggagtaatggaggctcgcttggtgttcgataaaatgtctaggcgagatattgtcgcttggagcattatgattgatgggtaatgtatgattattgtgatagttattttgaatatttattatcttagtaaagtgggcatgcttacatatttgtattgaattgaaaggatatatctgtagatagatgatgaaaattgttgtgtggctacttgcaagcgttgtgctcgagtttccggaaacaaactaactataatgtagaaaaggaaaagtaccgaatttgtttgaaaatgataaacttcagttgtcagaaaaatcattgacttgtacatcttttgaacaggtactgccagagtggtctttttgacaaagtttttgttctctatgaagagatgaagtactctgatatcaagccagatcgtatgatactttcgaccattctttccgcatgtggccgagctggaaatttaacctatgggaaagccatccatgacttcatcattgacaataatattgctgttgattctcgtttacaaagctctcttgttgccatgtatgcaagttgtggctccatggatttggccaaaaaaatgtttggcatgatgtcatccaaaaacttagttgtttcaactgccatgatttctggatattcaaaacttgggcagcttcaagatgctcgattgacatttgaccaaatggctgagaaagacgtggtcgcttggagtgccatgatttctgcttatgccgagagtgattggcctcaagaggcgcttaggctgttcaatgaaatgcaacagttgggagtaagtcctgactacgtaacaatgttgagtgtcatttcagcttgtgctcatcttggggcattggataaggcaaattggatccatatttatgtcaataggaatggctttggaggcactttatctgttaataatgctcttattgatatgtatgccaaatgtgggagcttgggaagagcaagggaggtatttgagaagatgccaagaaaaaatgtgatatcttggaccagtatgattaatgcctgtgcaatgcatggtgatgccgtcaatgctctaagtttcttcaataaaatgaaagagagaaatgttcaacccaatggtgtcacatttgtgggtttgctttatgcttgcagccatgcagggttggttgatgagggtaaaaagcttttcgcttcaatgattgatgaatacaacattgctcctaaacatgagcattatggttgcatggttgatctttttggccgtgccaatctcttgagagaagctcttgaggttgtagagactatgcccatggctcccaacgttgtcatttgggggtctttgatggcagcttgtcggaactatggagagagccagttaggagaatttgctgcgaaacgccttcttgagatggaacctgaccatgatggggcccttgttgtcttatcaaacatttatgccaaagaaagaagatgggatgatgttgggaaggtgagaaatctaatggaaaacagtggcatatttaaggagagggggtttagtagaatcgaattaaacgacgaagtccatgagttttttatggcagataaaagacacaaacaaacagatgagatctatgagaacttaagcagggtagttaatgagttgaaactggttggttatgctccaaatacatgtagtgttttggttgatctagaagaggaagaaaagaaagaagtggttctctggcacagtgagaagttggctctttctcttgggttgttgataagcaaaagtaaagtttcatgcattcgcatagttaaaaatctcagaatttgtgaggactgccacactttcatgaagctgtcctcaaaggtgtatgagagagagattctcgtaagagatagaactagatttcatcatttcaaagacggtctctgctcttgtaaagacttttggtaactgtataaattggttgaactagcatttataccataatttaattgttctcttctcaaccacatctagaaaaggaagtacaaagatttcctcattacattgcattaggtggtcaacatatacagtttggtgtactaattaattatctatatcattgagcaacaagcatagaagtttcacaccaaaacagaacaaaaaatggagaaaaatgcaaattcagcttctcacaagaaatgagaaaattggacataatccattaggttgggtattgggcagcgaaattatggttttggtaactcttgaaagcagagaagagccatacatcttgcttcatcttgccaagtattcttgacgccctgtatttcaatattgctagtgctgctgaaaccaatcttggattttcaagtgtcgcgctacgctgatattccagaatccatgtattcggatcgaattgaactgcagaggatccccattttcggtgaccccatgaagaattcgtctttctaataacatacccaacctttccatccgaccactgttcaaaccaacacagaacaaacataactcataaagcaagaaaagaagccactttttaattgccaaatcaagactatatatcctaattaagaacgttaagattacctctgtgactctgccagatataatggtgaacgatctagaagagattccagttgcgagtaagcccgccgtctgcagaggccacccccatattcttatctcctctgaggtagatttgtacaatttgcagccagagttaagtagcaaaccatccttaaaatccatcaaaaaaggtacgatattttgagcacaatttcccactaaagaaagaaaaaaagcacaagaaaactttgttactaaaacaagcacctggttgatttcccatctggaattagcatagctgcagttggaaattttatcgacatcaacaataccctgcaacgatttctgcaagaacctcagtttcccattcaaatctctcacagccgaagatttctctccaaaattcctcaccatatccggagtaaacgcaggcttcaacacctcagaaactatcccagaaaacccaaattccgctacgaaaatcaagctaaatagcccaaacaatctcaagaaatcgccacggcagccccatttccgctcctctctcttcggcttcttctcttttagattagtcctggaagatgatctaagatgccgagactccggagttcgggtagtgtttgaagtgggcgtggacaaactggaagcgctgaaagaaatgggagtaactgcaaccttgtggttgggcctagaaacggtggagagcttggagagagagctcatggggacgaggtcgagagtggcattgatacttgccaagcacatttcgcagttacaattcgcatcttttcggcaatccgggaagtagtaggaggagctgtctcggcattgatctgataggtgttcttcgatggaggcggtggtcgtagtcgatttccccgaagttgctgatgatagaactgcgacgtttttcatggttgcttattgagcattaggcgttgagaattttcggggtgtggtttattttatattttagtatgtggataatgaagttttcaaatttgaaatgaatacaacggtcatatttagaacgcttagaagtcagaccgttagttgcgatttgcgaatgagaatattaaagagtgttttctttgcagtttgcacccaaagaatattttaatcatttttattttatataaaatataaatttaaaattttgttatgtttactaaaccgtttttgttaaattattactgaaatccacataaaaaactatattgtaattaacgaaccaacttaaatcgtaattaaaatccacataaaaactactaaagcaatctaaactgtaatttttttttttttttaaaaaaaaattaaaaaaatagtgtatgagataatttcgcaataaaatttaaattaattttgttttgttctcatattctttaaaatatatgtatacatataaaataaaaataaaataaattttaattattaagacaaaaagaatatatgaaattttattacaatatataaacataaaaatacatatatttttaaaaggaaaatataaaattaaaattgaaataattattgacattaacaaaaaataatgtaaaaataaaatttaaaaatataatatgagtaatttttaaaaattaatttaaaatttatcaggttgaagtgcttatagttttgtgagttgtaaataaaattctccatttaaa

SEQ ID NO: 43003 - DNA, 5452 bp, Cannabis sativa
  modified_base (3305)..(3310): a, c, t, g, unknown or other
  modified_base (5070)..(5087): a, c, t, g, unknown or other
aatcatgctccttgaactttcatccatgttagaattttttcactaaaattagacaaaagtcttttaacaatctcaataattcggggagaatttttagcggctaaaaaaatttaagagacacgatttagtacatgtcaaaattttggaaaaaaaattactaattagcctttaaaaaaagcttttctttttgaattccaattgtgcaaaaggcaaaaagcaacgcatagtcctgattcagctcaatgagtaacacacctgacatatacgtatatagtcaatctacctaaactaaaacttgcccaaatccgatccgtgtgcacaagggattgggctcatatactatttttaggctatgttggtagatggatagaaagagtaagaaagatgagaaagagattagtaatcatttcaagttatttggtgagagggataaatctagttgtgaaagaattgataagtatttatttattaataaaattattatgctatcgttatagtaataattttcttttgatgttatatttaatatatatttgataaccaagggttattagtttagttagttggctttagtgtgtagttagttagttaggtgatgtttggttggagataatgaaatgaaatggaatggaaaggaaacaattttcattccattcctttatttgattgcattttaaagtattagaatgatattctaatgctttttccaccattttggtaaaatgactattccatttttttttttaaaaaaaaaaagaaaaaaccattctaatgtaacaagaaaaaaatttaatgattttttatcaattttttttttatgtattttaaattttaatccattccattcttattcttatattttcattcttcccaatcaaacgcaaccttagttcagttcttttagtaacttattttgttgcttaacagttctcttgccttataattaaacattttctaaggccataaataaagtcttaagcctctaattgaggtaagttttgccaagtttttcctgttgttctcttttctattctcctttttttcatctttttcatcgtattagagctattggcctttgtcaatggcttcttatggcaacaactcgtcttcagctagtgtttctgatcctattgctcttccgcaagctatggtagctcaatattggaatcctttctcttactctctagcttcttctctcacgatcaagcttgatcatactaatttcttagcttagaaatctcaagtgcttccaacagttattggtcatgatcttgatgagatcttgctcactaatttgtctccacctcgatctctagtcaatggtgctccgaatctagttttccaataatggcgcaagaaagatcaacttcttctttcttagctttgatcctccatgatagaaggtcttcctggaacgatggctagctacaccaactcgaatgttatttcaaaagccttggaacataaattttctagtcaatcaaaggctcagttgttgcaactcaagagtcaactgtcaaacatgcacaaaggtaatcaatcgatctctaacgatgttgataagatcaaagttctcttttattctcttattgttgttggtcatctaatttctaatttcgttttgattcttcatcttttgaatggtcttggacccgagtttgattcagttgtatctggtatcatatctcgaagtgataatttgtctcttgaggaggtccaagccttgttgatgtcttatgaaactagactcgaacaacacacaaccatgatggatctttctactaagatggcaaccaatctcacttttggattaagaaatggtggatttaggccttacaacaatgctggcagaggaaaagcgaccgaatcttcatcgcaagattccctactcgaggcaataatccatcttaatccattgatctttcaatcctaacagacctttgtgtcaagtttgtatgcgatatggtcacactgctcctacttgtccctttagattcgataagaattgagtaacccctaaatccgttgttggaaatcctcaacctcaagctaatcttactgaacagtttcttgactatgagtctactacttttatagctcataatgtgcttgactttggtgatgatcaaggttggtatgttgataccggtgttactcatcacatctcttacagtaaggctcctcttgacaacatagttccttactatagtcaagaaacagtggttgttggtgatggtaagaagcttgtcatttatcatattggtaaaacttttattccttctaaaagttcctttcctctacatttaaaatttgtcttacaagttccttctatcactaaaaacatctcattagtgtttccaagcttactgatgacaatcatgtctttcttgaattttacaaaacttattgttttgttaaggacaaacaaacaggagcaattttggtcaaagggaaacttcaatatggtctccatcttcttcgtgatgatggctcaagtttgtcaaacacttatattcaatttcatttggctgagtctaattgttctttaatgtcacaacattgtaatttttgttcctgtaataaacattataatcaatgatcttgtaattccaccaatatgaacaaaacgctgctgtcttctcatatttctaatctcaatgttgttgcttataactatactctctctaatgacattaagttgtggcactgcaaatttggtcaccctgcacatgctatactctttaaaatcttaactcaatctaagattcatcattctcttaaaaacttacatttctgcaatgcttgtcaaaaagagaaaagtcacaggcttccattttccttgtctaatacttgaggtaatcaacctctataactcattcatactgatgtatgggggcaccacacattacttcaaaagaaaattacaaatactacattgtttttgttgatgatttcagtagtttttcttggatctttccaatgacagtcaagtctcaggtctttgaactttttattcaattcaaaagcttggttgaataacaattcaatttgcccataaagagttcaagctgattgtgggggtgagtataaagtttttgacaagtttctgaaagatcgaggcatatggtttcaacactcttgtcctcacactcatgaacaaaatgggagagttgaaaggaaatataggcatatcactgaaacaggtttaacccttcttgctcagtttggccttgatatgaactattggtggcatgcttttcaatgtgcaacttattcttgatggaacttattttaccaggatctannnnnnctaacatgtatgttgattataattctatagtctaacatcctaaatatgaatttcctaaaacagtgaaataaatacataagaaattaagaaatccttacattgatggtagcggagtaataatgactcattctattcagatctctagcccttgattcctatctgtagtaaagccttatcaatatctgacttggatcatctctccttcagtttggttagacacaatcttcttcactatgctaggtattactttgacatgagtaggcatactctcagtcaccatggacttcgaattatttagtagataagaagaataattttgaaattggaagaagaaaaagaagctctctctttattttctagttgtctgacaaaagaaactgaagtcttaagaaaataagagctatacttttctatttataggaattcattaggtttagagttagagctaaatgagctgattagaaagatccaatgacttaaaattcatgtaaagatcacttaattttaatatgaaaattagcagataattagggtttaatttggaattagacttttaattatgatttatgaatttatggagatgtatttgaattctaggtgtgttatttatgttatatataaaatttcatgttttttatattttatgctcggtaatagtggaacgcgatgtttgaccgatttagtcaaattttcttatggtttagtattttagtaatagtgagccaatttagatagacattagtaatgtcaaaaatatgggcagttttagatttgaccaaaatttcctttggtgggaaggttgcttcttgctgagacaaggggcaaaatagtcgttttgtcctttagtggaattataatgtgttttataatctgaaggtttttttttattaaagttagataaacacttaattatttcatttattctaagctagaaaaataagacaagtagaaccttctctttcttcaactctctcttcctctcgatctctttggaactagcaaggaaattgaatttttcagctccatttttgattttctagcaagatcttagttaatccaatccaaggaaaaactttctagctctcttttctttgtttcttgagttttacattggagttctatgtttaattttctagttaaggttctgtagatttttgagatgtttggttttgtattcagaggatattttgagttatttgagctggttttgatctgttttgagtgttattgttgtgtttgagaaaattttgaactttaaagctcacactttgctctctcatggtgattcttgcttatggggtttttgttagttattttgcttggtttatgctctttgaggcttgaatgggtactctggaaggtttggattgatttggggtcgaattaagttgtttagaagatttttggggattcttgtaataaactggtccaccgattcagtagggcctgtaggagccgaaattctggttcgtccccaggcagaccccatgaaactggtattctggttgggaaccggtctaccagttggcgcattttagagcaccctagtttttcccattttgacgatgtttggggtattgccatgttatccatcgatatggaaacttttaattttgattttaagtccccaaaaagtgatttagtgtgtcactcactagttttacaaatattatgacttaggggcctgtaaatcgtcgagtagcagttcttctcaggttgattggcacacctgaattcagaaacgaggtaagattagtatnnnnnnnnnnnnnnnnnnttacatgtttagcgtgcatatttattaagcatgttagattacattgatagctgtatcaatatacgtagagttgtattggatagcaatagatatatatttggctcaaatactgattgacgctatcacatcgatacgactagagtatgattagagtatcgagtatatgctgatattatggtcaatagtactgtcgcatgaacgttctagactcgataccgcctagggtgcggggataggattacagttgggtgtatgggcgcttaattgtattcagaatgcttgggccgatttaaaggctctcttgtattcagaatgatattaattcaatgaagttgctatttcatttcaaaaaaaaaaaaaatctc

SEQ ID NO: 43004 - DNA, 8720 bp, Cannabis sativa
cccgctaactctcgtgcgggtttcgagtcgtgtcatcgtgtctggcccgttttgccggccctaatatgcagtcacttcttatgtgtattatttctcgaagtgacaaggacagaacaagaccgatgtatagtcttaatcaatatactgcatgcatcatgatttaatagttgttattatatttgaatgtttctcatcccaaattatgtgtagtatacatatcttatagatatgatattatgcataatttatttgaatgcctattgcatgatggagattactatagtatttgttgattatatttgtccaagtgggagagatattagaatcttctatagactaatctaatcacaaacataattccatattcacaactatgttaggtgttttcataaagagaaaatatacgatgagtctatcgcaacatatcgttttattctaaatagcctcatgaatgttgtgattgaataaggattaacatctaaggctattttaggagttctaatattatgaggaattataggacattacatttgacaattttggacttgaatcatataagaaaagatgatcatctcaaaggttttattgagaataccaagttttatacgtttgtctcttccagttattatttttgataagtaaataatgcaatgtatattggagttttaaggtcacattagtcaagggttaaaagattatttggagaataattagaattatgttttcccactgacacctattctaccccaattttgagatggtcgaataagggttggtcttattagaggccgatgagaatattatacatgactgttaaaaacagtcaagaaattccaattttttagtactaatctttgcattagaagttttagtagaggtcgggactccaaaattagaaatctagctcagtacgagcttgtggaactcaaaggccaagctaaaaagttaaaaattaaagtttaaagagtttggagaaaataaaatttaaataccgaaagaatgaagaaaatatttttacatagggaaaggtcaaacgtcctgttctgaggaatgtaaaagaatctacttgataaatgctagaatattatctgaaacaagtacatataaagagttcatctaatttacttgagaataaaaaatatacaacctccaactccagaggattttataaaagtaatttcttctagataattatatctaaaaggacccctcttatgaaaaccaagcccattataggaattccaaggttgagcatcaggatcctccatcccctaaacatcttcattgaacatgttcctagacatgtatgacggatacaaaagttcattcttatttttcgaggcttcaaagcgcaatatttagctccaagtcttagtgtaagtctaaactactgatagaagaaagaaaatagagagcagtttaggttaacaaattgaaaatgagtagattaatagaaatatatatgcatgacattcccaccatctataagaagattgatggaatgggcaaaaagttgaacaagttacaacaggagcaaacacagagcctaatccataaaaaataaaggtccatttagatagtcttcagaggagaagtagtaggaactaaaaagggttaatgtgagtttagtagcttaaaagcttggtaatctaaaatataggtataagaagcagaacttacaagaatgcataaaaagaaacctaaaaatatagcaagaagacagaagagactatatgcatgactaagtacccttaagagtctaaagctcatccatgcaagcaacgttatgaagatcaagctcgagataatcaaggtaacctcatcagaagaatatgaggtcatgtcaagctcaatcactagttcactcgcaacaaaagtattaatttggtgcactgtgactgaagaagattggagctcagacccagaaatttcacaacctcttaacattgtggagatgggttcgttgtcatcaaaatcagaagaatgggatagttcttcacaatgattagacacctcatttagatctttatcatcttgaactagttcaacccgtaaattatacttactagccaaagggtctccacattttctcaatttgctcaagtgtgtaagaggataagaaaatgaagtatcatccattgaagataagtaattggtgggatcataatctttaaacctgatctccaatgactcacaaaacatgcaaaagcagcagttctctcctctaaggaaccataatcagaggttgtcttagccaaagcactagctgagagtagagacgatctcatcagtatgagtaagaattcttttaagtttgtgcctatcttcaagtctcaaatgggtgcaattgaatgcaaaagctaacatttcctatgattaagaaaggcacgagaaataaaatagtataaggagggataaagggaaaagaaacactgcaaaaactcaaataagagagctgaatacagggataaaaattcaccttctccaattcctcaaattttacctttagatcaccttcattattatggagaagatgagcctcatcttgaattataagaagtttgtcagacaagtcacggatggctgctctttttgagttcaccttctcttgagcactagcaacctctgtcaataatgcaaaacttcatccgtcttttacaagtcttcctcaagtactgtagttttagtttgagaatcctcacaagtattgtaagcaacatcgagctcccattagaaaacaacagacagtgaagcttctttttgaggcttatcaagctcaatagtaagtttcacaatcttgtaatcaagttcttcacagtgagctccataatctagagaacaacttgaagtaggataaaataacttcaaagtagcggccaaactatgatcataaaaatccaaaagactgtgtttttcatcttttcaaagatgaaaccatttctcattagcagctttgggttgactctgaatagaaaaactaggctctagagctggagtaatactagaaggctctaatgtaataggtacttgagaggataaagaaagagaaaggataaaaatagaagctgcgatcaactcaatgttagaaatcaaaaccttgaggggagaagaagaactaggggtaatgggattacccataatagttgaagaagaaggaatggacttgggaggaaaaggtgggagattagaaatagagtatgaagttgttgaactcaataaaatagtagaggaccttgaactattaatatcacatgagcaagatgggatatcatagaaaccagaaaaaatggaggaaatgtgaagagcatgaattgccaaaaaaatctgtaatatgggagtaatagaaggactttgattagtttctgtaggtagaaaagcaggagagttcgttattctaccctacatatgctttaatagagtttctactcccaaaatcgccgaatctgtgccaatcccacaattaactatgctaatttggctttccaaatgaaccgccacagaatttaatggcacgacttgaataggaactaggctataaactatttggatcaagtcagtttgatgaggaaagggatgagctaacccaggaggcatcacaagacctgaggaacacaatgagaaactaggggaaactgatcttaaaggagcagatgaatctacctgatagttctcgcattgctggtcaagacaatttgtacccctcacaaaagaaggcctcttcaattttctattcttcgaaggaacttagcttttttagtttcaaaaatgtgtttcctcattgagggatagcgagagtcttttgcttctggaggaattacaaaagaagttggaactaaaggcaaagagattgtagtaatagaagaagaaacatcagtcattgaaggcattgtactcagcatattaataagattaggttgggcagaactgggtggaaagctaactgaaccttcttatttaacaaattagataacatcaccagaaatcaaaacaccttctttagtcaaaagttatgttgaactaataatagcacgaccttaagctttagaaagattttgctcgtgctcatcaatcttttcccaaaggagcacaatttgagcatcaagaatctttgcaaaaacataagggtaattttgaatttcgacacagtttacgtattctctgtagttcaaggacagctttataagggagctctgtcttttattggccatgattttaagagttaagatatctataacagaagtggaacaaagagtgtgtaagcatgcaaaaacttcttcagtcaaaatggcatcagtatggtatgatgaatcttttaggtgttgaaaaattcccagtattgtgagggtgcgcttacgatcttcagaaaactttccaataggccaatgaatcttgttggataagcggttcatgaaagtaaataaatcaaggtcaataaatcttagaagccagttgccaccaattacaaagataaaggcatcccatcctttatttgaggatggtaaacttataactatgtaattagggatttttaaagatatatactaggctacaaatcgagacgtacatgtagttctactaaaacaggtaaggaatttagaattaagaaatttcgtacccttaaaagcacatagagctgatatgcccaaaacagtctaaacaaaattggggagaaactagatcatagaaaccctagtaagaaaaagaatgtaagccaacaaagggggaatgggaaacataggagctccatatgttttcgactgaccaaaattttatcgtttgatatctcgagatcatccagactcttgggtagctcagtctgtattagcatgcaaaaagtgactctgtcatgaactagatacttagagtggatttcattgtaagttgattcctatttaggaagaaattttgggtcgattaagggagaagctttctcagtggttgatttggatttacacttagtacttcttgagcccatgattgcagaataaaaggaaggaagactagaggtaaaaaagtaaacagaggaagaagatgcgatcgtagaaaggagtaaagaaaggagaaaagggccaaagaaaaagaaacattatggaggttcctaaaaatagtaaaattattttggctaaatatctatggtttaaatttaaatttgaaaaattagggtaaattgaaaaggcatggaaaattttccaaaatttgaaatgaatatttcattaaattagttatggctcataatgacacgtgaaaataattttggataaccggttttacaatatctgagctaagacttcatagttgcaagcttaaaaattgtagagccaagggaaaatttaaaaaaatacaaataatcctgagggtgtaaacttaatttcaattttataataatagtataactaataaagtgacgtggcatgaataatataaaacactccgcttcattaaaaagaaaggtagaagagcggatcagagttcgagatagctaggaaagaagaacttactaagttgagcagaaaggaaagcgcacgaggagataagaaggacgaggccacgtgaatcaattagaaaagatgatgggaatagctcgacatccattcccgcatgtaaataggggaccccattatccaaaaaagagaacggattcttaaccacaccacacaagtcgacactctgccaaaatacatctctgaaacattcaccagctcaggaataggaatcaccgttaacttaggagaaatcatgtaaactagcaaaattgcaattttaagactagattgatcctgatgtaaggaattcaaagttaaaataaaaatttattgttgagctaatttttagatcaataaggccaacataatattggcatatcatactagtcaaatttaaaaaataacttaaaagtaagaaatgaagtacaaaaaattcttaagagtaatttacggcaataatacctaatgttaacgcagattttcgttaacgataataagcctatttttattataggatcaacacagaaattagtagaaatctaagaaagaataataaagtaaaaacgacaccaagtttttacgttgttttgcagttaactctgcatagtccacaagtcaatcttattcaaatttttctaatacaaactagggttcttttccctcaagaaatttttcgttcttttttctgtacattctgcccctatttataatgacatagggtggcagttaattacattcagatacgaatctcgtaacaatatttcctcaaaattgtgggctttaattacgccccacgtaaataaatgcggttattatttgaaaatcatacagctgtgatttaaaccatttttaatgggtcaatgctgatgtggatttagatacgctgcaaagtatatctcaccgtcgggacatcttgctaggtgcttgaacactcaatagcaacaataaacatggcagtgagctggaacttttcccatgtctttttgaggttgataatgtaaatcatgtcgcttctgcgattgaagacatgacgctctatctgacaatcgcaatttttggtgacaaggtgaacctcaatagacaacatcatttgaatgtcagcttcttcctaagagagctgatgcgacgtagcagtggaattcattgaaagatgtctggagctaattagtgaaggtaccaggagtatgccttcctatagcgagtagatgtctcgctattcgttacccatgtacttcgagctcttacacttagttatataatgtatattatacgctaagtgttctaactgcctacacgtctcgtcaacacttttctacacattgcgaggttgatggcttgctatgtattatcgatgtcatccttacgattatgtcttctgacgcaaaatattttatcatcaatatgtgaattaatagtttgtacatctttgtctcgcttaagactattcagtcgacgagttatagatatattctattaactctacatttaatgagttattccattaataacttttttagcataattacttttatatttgttgattcgtattctccaaggttgacacatgtcatcctcttaagtaccagccaaattttgggtataacaaattgccccttaaaaagtcatttttcaatgaaaagtgttttttaaatgattactgagggtatttttgtctcaatctattttgaaaaaacacatgccctctaattttggcagttttgtagtttcgaggtatatcatgaccattaaataattatcttttccacttattccgtatttctacccgttggatcatttatttcttaatccaacggagatcaacccaatggtataaaacgaaaaaaggaaccacctttcattatctttgtcatttcaaaattttttttgagcttctctgtaaaaaactagggctaagcattcggcctactgggccgaccaaaccggccaacccaacccggaatgggccaaaacatgctcaaatttaatgggccgaaactctcttggtgtcacttatgggttgataatcgggatggagggtttttaacccattgaacccaacccgggccgtaaagcccaataaactttaaaaaaataatttacatttaaataaatataaggaatcagatcagtttttttttaattgaaaccctaaacctaatgcaatataaacctcatttgtcatttcctctcatttgtccaaaccctaacatagcagccacactatttttttttaaaaaaaaaaccctctcaactcactctcagccgtcccaccaccactgtacaggtcttccacccgcgccaccatcttccagccacaccacgccatccaacgtgcggctgtgttttttgcccttcggctccgagagtactggcgagttcctccattgtaacttttaagaacttctttatattttttctctttgctggaagtaaaagtttataatgacaaaacagtctcatttttttttctgtttctttgaaatttcaggtcacctacaaaagtttgatcgtcgggagtcccttgcttaggtcgcgttgttgttgggagtccatttgctcagtgctctggagcaagtaaggtcgacatctcacttttttttcctcttttaatctgattttattatctttgtgtgactatgtcattgtgatgcttgtgataaaataatatttcctagttgtattatagtgtgcttttttaaaaaaaaatctctgtgaatctattgttgtgatgtttgttagggtgataatgtttgtgataaaaaagtagtgtagtgtaatgtaaatgtatattaatatagtagtttatttgtttgtgataaaagaatagtgtaatgggacattacttgtttttttgctactggttagggtgattataatgtttgacatattttgataatatgtgttaatttttgctattactattagggtgtgattatttttattggagtagttgttactgctattgtgttgtggtaatgtagtttattttttatgtaagaaatgaattatatttttttttttattttgctagtgcttatgtgttattattttgctatgttgcttaattgcttgtttaattttttttgggcagccatgatcgataaatttattgtaccaacttctacccaaataggtgaattgaatgatccaaatcctaccccaattaccaccccaacaaggtaattttattgataaaaagtgaatatagtttgacaaacactctttgttttgttatgt

SEQ ID NO: 43005 - DNA, 7226 bp, Cannabis sativa
gtgcgttgtacaaatttttaaatatatattgaaatagtaaaaggtagcaccataagattataattaagtattggatctcacatatttttaattggttaattaagattaattttacttaactttaatatgtaccaaattgtgtgagtcaaaatttttgaggttgttaaaaaaattgttgaattattgagattattaaatttaataattttcgttcaattttactaacggacacctgacacggataaaaattctggagatacgatttagtatatgggcaatcaccatattaagcatttgttagtaaacttgaatgaaattaggcaaaagtctaatctaataattttaataatttggtaagaacttttaacggcctaaaaagctcaagttgtacgatttggtaaagttaaagttcgaaaaaaaaattataaataactttttcaatttaatacttaaaattaaaaaattgctaattatttataaaataacacctcctcatagtgttaggtaaaattgatgtttaattagtataatttattattttgaggcaataagactttcattagggaagaggtgggagtgtagtgtgggacttaaatataaatataaatattatttattttttttatgttttttctttggaagaagtattgatttatataatatacatgttatagattttgttttggatcatacataatttatttatttaaagctatgatttaaatatgtgtttaagattgcaatgtatgaataaacaaattatgataatttattattaaaaaaatatcattgatccatatttattggttgatctgattcctcaaggaataagatcaatttcccatgatataatgtgtgtatatacactagccatgtttgcagtctttaattttataattaatgtttattaataaatccattagtgttagtttgaatcaaaaattgtaagaaaaaaataacatgatggtacatatacttttaatatatattttgccttttgtaattatgggattaaaaagttcattttttcatgattatttatcctataagatattgaatattgatattatttacttattagtgaaatagtgatataatgtgtttatgatatatttattgtaaatggaataatattattacaatagccaagttctccttatatatatatatatataaatatatttctacaatatttattaataaacatttaaattaattaaaaaaatgtaagaaataatatcatgataaactcattcccttcatgataaattatttcataatatcttaagtaaaaaatattatttattgttttttttatatatttgtgaattagtgataacatttttttaataatggactaataatacaatagcaaagtttggtctatgcaatttaataattcatgtgtttaattttatttaaattaataaattggagaaaaaacaatatgatggtacatgtgctttttttttttttttcatttgtaattatatagtaaaattcattcctttcatgattattatttattccataagatattaaaaatttccctaacaaagttgcaatgtttttcccaaataaaattgagggtaagtaattagtaagagaaaacagcatttgacgttgttcaaacttttcttgttccttattatgtttatttgaaattgtattacttaataatctttttatttcatgctgagtgttctcgatacacaattttaacatacaatatgtaaaatttattgtcgaaaaagatattgatcggttaaaaaaaaccatatcataaatttataacgccaatagagtaattgatatttttattcgtaacttcaaaaagtaaactaacgcctttgaccgatataaaaaagtaacataagaaaaaaaaatataattattctagtgtgtgcagtttgacctacacatggaacaacaattgtatatgggaaaacctaagaatcctaaaacaaatattttaatatagtgatctatagaaatgttcaatttgatgatggagtgaacactaaaatttaaatatatattttgaattatgttcaatcttactttatttgaacttatttttaacataatttgcaagtaaataattttataagttattacctactttatgttcaaaattttttacacattacataattttgttttataaaaaagtatcaaaatgtgaaagtaaggtgatacataagttattatgtgtaatatcttaataaatttgcaaaactttaaagttaatgataaaaaaacgcattaaaattgtaatcataatagcctccggtcgagatccaagccctactgcgacctgtttgtgctccgatcaaaatctagcacttgcttcgatcgagatcaaagccccatcgctatccacctttgcttatatttgaagatccactataaacttcccttaactatactcatatctctattaaaataatacacaatctatgtggaggacaataatcgtcaatcataaattattctccacgactaaccctttaagattccctagaacttgattattagaatctaatgaaaggcatgaatacaaattaaatttaaattcaacttattttagaaattaaaccaatgttttcaatttgaaataaacttaagaatttcaaacatcaaaatctctctaaatatttgtcacaaaatatacccatgggctttataatcaatgtgggagtaaacaaaattgaacatttttttttgttaagaaattaaaatgaagtaaccaattatctttatgataactaaaggtaaccaattagtttacactatttttctcatattttttattaataatacttatttatgagttgatcaacataattagcatcacatttaaattttgtatgtacatttttaattgtattaatatgtttgaacttcatttgagtaataattaataaaaactatataaagttaaaaattgataaaattaattaattatcataaattagtgaaaataagatatcttatattctatatattgaattcaaatggactaatttgtgtcgtattccaacccaaataagttagagtaatttgtagcataaatatttaagtttaacttacagttgtaaataaatatctaagtttaatttttagcaaagaaaattgcattgtaacccactttattttatttgttttaatttttaactttatttccatattctacacttaagtagaaggtaaaaattacgcaacccactcataaaagtaggtagatttgaatgaattaaaatataaaagtatttttttttgctaagaaaaactgcttccattaaactgaaataacgatattggtgagtacatggggactcacctcccaaaagtttagaaagccattacaaacattatttaaaccccattgagcaagcaagtgtgccgccctattagactgtctaggagcccaaagaggggaaacatcaaaagaaaccataagagattttaccagagcaaacaatctagaaatgttccagtgaggagcaatgtttctgagaaatgccatcaccaaaacttggcaatccgaaattatatccattgcagtacaatccagtctgatcatcacctttaatccccagtacacagcccataactccccatgaatggtagactggaattgggttttagaggcgtacatagcaagaatgtgaccattctcatctctgatcaccactcccaccgcaccgattccatctttgtttgcaaaatccacatgtgcccgtatccttcccggtctcggaaccagccaccgaattgccataatcccaggagggtccgtcctgtgagaagcaccacgctgcttactcccacagtgctgcacgaactcacggtctatctttcgcttcatttcatcaagtgtccaaatcgtatgattgtgatacttgtcattcctaaaaaaccacagattatgatacatcacagcaacaaacaataagaattcctccttatcattctcagaaaccaaacccccaaaggaccgagggaataacatccactttaccacctccgcaccagagtgaagagggaaatccgaagattttatcgcccatttactagactgccacagactttgagtaatggggcaatgcagcaagaaatgagcagacgtatcgttaccggtggaatcacacagaatacagttaccaacattgttaccgaaaatataacttagccgtgatccaaaagggagacagtcagttagaatcttccaaaggaacagcttgagtctttcgtgaataggcgacttccaaagagccaggcaggttttatccttcccaaatctaagcgaattgagatcccaatacgcttgcttaagagaaaaattccccgtgggagaggagtgccaaatgagagagtcaaaagggctcaattcattgatgttgcaggaacttaaggaagtggcagcctccggtctgaatagcctctcaattctgtcagcgtcccaaacttcatcatcagatctcaaccagccgagtttctcctcggagacaacaccaggattcagatgttgaggcccaaaaataaccccatcagcacaagtccaagagcagtgccagaattccacaatggaaaaacgtcccatgatccacaagctttgccttctaatgaattctctagtcttccaaatgcctctcaccacatgggaagcacccgaaccaagaccaccactccaaaaagaatggtagtaccaatacttcccaagaatgatgcgacaccataaagactgttggttagacaccagaaaccacgccaatttggcaataaggcagaaattaatgtcgtggaattttcggatgcccaatcccccacagctcttgggcctacaaatcgactcccagcttcgaagagcaagaaaccggccctctctcaccctccccgtccaccaaaaccttctcgcaagagcatcaagagcgtcagtaatggttttaggtaggagaaagatggacatcgaataaatagggatagccgagataacattcttaattaggaccgttctgacagcctgcgatagaagcttagctcgccaaccatccatccgattgcgcacattatcaatgataaactggaagtcttgtctccgattcccagaaacaaataaaggattgcccaggaaagtctcatcaccttgcattatattgaatccgagggcttcagctatagcttccccaacagccgtatcacagtttttggacaaaaagatttttgatttactcacattaatcctttggccagaccaagaacagtatctatccagaacttcaacaagagtgtccacttcttgggagtccgccttagtaaagaaaatggtatcatcagcatacattaagtgggagaccgaagggctattgtttgacccacagtagccagttaattttcccaacctctctttttccagcaccatccgagacaggatttctgaacatagaataaagagatagggcgagaggggatccccttgtctcagaccccgagatggagaaaaagcttttgtgaggcctccattgaccaggacttgaaaagtaacagtggttatacattccattataagaccagagacccaatcactaaagccaaaggccttcagcaccgttttcacgaacccccattcaaggcgatcataggctttggacatatcacattttatcccaataaacgcctggtggccttgcctttttcccatatcatgaacaatttcatgggcaatgattgaattttccgctatccatcgccccttgacaaaagccgattggtagggggagataatcttatccagcactatcctcaacctattggccaggatttttgctatgatcttgtagcatacattacagagactgatcggccggtaatcatcaaatttatacgcctccgtcttcttagggataagaaccaggaaagtccgattgacctctttagtgaaactacccgaagtgaagaattcttggacaaactttactgtctgagctccaactgtctcccaatgggtacgataaaacttggctgggaatccatcagggccaggggacttcagagctggcatatcccaaaccacagcttttatctcctccatcgtgggggtcgccgacatcattacattctccgaagggagaatgctcggattaaccagagaaaagatctcctcaccaatcactgggttggaggacttaaaggattcaataaagtttgagcgaaaataatccaccacttgtgctcgattttccatccagtgaaccccatcctcagaatcagcccaaataaagttcttcttccgcctgatgatcacagaggcatgaaaaaaacgtgaattgcgatccccatctctcaaccagagctctctagatttttgcttccatatcgcctcttgacgggcttcgatctcatcaatttccatcatcacagcactttctaactggagattctcagcagaagggcttttattctgaatctcaatcaacaccttctctaagaattcaagttttttcttgcaatggccgaagcactccacattctcatttttgattaatggataaaaaaaaaaagatattccttaatttatcccccaagttatatttctgtaactctgtaaatacctaaccgttaaatattaagccattaaatccacgtgtcattttttttattggtatatttcaactatttttttttaaaataataaaaatttaatgacttggaccaatcaaaaattgcaactagaaattaaagttaagtatttatatagcaaatttaaatttagggtagaatatttgtacacgaaaaatccaccaaccaagcaaacttgaccgacccgaatctaaaaactagaaatttgataaatccaaaacccagaccgacccgaaaaattcaattatataattaaatttttaatttaccgaaccctaaaattataaatccaaaaagtaaaactagttataaattgaattgtaattgagtatgtgtggagaaatgtgaatataattattattatatgatattattgtataattgtgtaattattttgtgtttattatatataagtataatttttaaaaaaattatctaaattatagcagttattccttacgattgttaactatgtttgtgtctggcttcgtccggttctttcatccggtagaatatcggtgggcgtccaccccatttcctgtgcccggtggtggttctttcttcttctccaacctcatcgttct

SEQ ID NO: 43006 - DNA, 4532 bp, Cannabis sativa
atgatgatgagttacctacaactgaagaaaaccagcatgatgatgagatacctacagatttcagagatggacaggattatcgcgatttgtctgcagagatggaagctccattatttccagggtgtgagaaataaacatctttgaatttcttagttaagttgatgtacttcaaggggaaaattcctaacaatatttttgatgagttattggggctgttacaagatgcatttccagctccaaataatttgccaaagtcacgtaatgaggccaagatgttgctgcgtaaactaggacctgttgttgggattccagagacatggagtacaactaatcacatggacgacgaaggttgggacagcaaggacgccgaggacagctatgtaagtatatttttttgaagctttttactatgtttatttgtaacttgttagtgttgatattgcaaattgtatgatacaggaaaggttgaaaaatgtgcttgagattcaattacagtctcctgcaagttcatcagctgcgagtgcttccatctccatggatgaagaggaaaacaccgcccttggcttgagggcgcaacatgatgatgaacctcctctttatgagcaagttcaaggtatgatggcgagcataagagcaatggaggagtatatggctgcgttagctggagcctcatcgtttccacttccacctccacctgatcaggatcctaaagctccgagccagtagaaagaacgatcttattcgtgtcttttattctcttacaaacatgttatctgaattgtggtctaagcattgacagtatgggacatttctttgacagataaatttgtattgagctgctattagaaagaatgaaagatatactaagaactagtagttgttaatcaaagaaggaaataataattccttatgctaatctgacaaaatggtttcaaaacatagcttgtagtacctcttttgaagacaaaatactctgtttatccaacttgctttgaagaatatcaaatttaactctattaaacttttgggctctaatcaatttattattctggttacttgaacacagactattttttaagggttgtgaaggtaagttgtttctcttctttcctctttcatgtttaaagctactttattattttgtttccatttgctaatcagctttagcatttatgtgctttattaacatgatgttgttgccaattttgtcttaaagaagttaacacggatgtcctaattatgagccaattcatataaatggaagagttttgagttctgctacacaagctcttgatttttctttctgagactacaaatcttttattaaatgttttccatttgaatagccatttgcataaaatagagccccaaaagaagagcatttagtcatcctatgcataaactctcttctattatatatcaaatttttttaaaaactactaatataaggaaacatgctatattaattgcaagtgttaaaacatgctatatatcaaatgttctcgtgttagattcttaaaggaattcaagaactgtcttcacaaccgattgtggctcagttcccagatgtttgaacaaaaataaatgtttgatagtaacaacactgttttgtgtaaaagatcatttgaaccagcataattcttgtttcagtccattgactgaaagtgccactagtggttttagatttataaatctactatgaaaattaatattggttttaacattttgttcattcctcattgtattactatttattagtcttgtaagttgtaatgattgttttatgttaagaaaacatactgcctttactatttcatagtcttgtaagttgtaactactgttttatgatcaagattcttcagaaaagcaagtagtcctttactaattaattcaagtatttttggattttattttttagttaatattaaaatttgagttttctctctctctttctcttttttttttttgcactgacaaatcatgtcaaatacaatatggtattgaatcaaataagtaaaataatataaatctctaatattaaaaataaaataacatggtaataccaccacacatattacatagatcatctttttcgaaccaaagtgaaaatgttcagaagaattgtattaaaaaaagtatgttaacagctcatacttactgaatgaagaggtacgtaccttaactactccctttataagcatgatttttttttgaaacaatttaagactgaaaagaaaaagaaaatctaaatttctttagaacagattattagtgttcatatattagacatgagaaataaagcacagtacaaattggtgtgtgtgtgtgtgttttggactgaacacgcgggaagccttagatgtcctttggtagcttacagccatataaataagcttggagactttgtatgttatgttcatcttctttatagttctttaataagctaagtttaactataaacagagaaaaaaatgtacaagtcaaagctgcaggagctttgccacaagaatcaatggggtttaccaaagtacataaccctagttcgtcaatggcatttctttggagatatgggccaggccacaaccctctctttggagcctctgtttcagtcaatggcatttcttttgactccctcatcgtctccaaatcaaacaaacaagcccataaccatgccgccatgcttgcttttctccacttcacttctcctccttctcctggttctgtttctttccttcttttttttttttttttttttttttgttatatagaatattgtgctcccaattgggttctcttgtaatttcctcgttttgtttctttcatttagagaatttctcaagtaatcattacttatgcttatgaggggttattcatgctttatagttgtttgtatgaaaaagttacttggtcaacttctatacttatttactatattagatgagttgagtacgtaattttaagcatattgattcttaatatactgccatatctatggtagaccctgaccctgctagtgttgcaacacttacagttgaagaaagtggccagaatcttgatattcactcaaatgtttcttggttgaaaagtggtaaggatcttcaacttagtaattttctaaatctttcttatgctaacttgattttaccatactgagaaactattccaaaagataatgagcctttcacattttgttgctcataatgattcttagttctttggccaataatgtagaacaatgtaatgaatcatttaatgcagtatattgcatactttatctggagaagcatgtccctcagaagtatgatatttttattagaatacataatttccttcctagatgcagtaaaaggtgaaactctagtatttctgtcatgtgtacatataaatatggtgggtatgattttctgtcataacacaacaaaaagaatgatatagaataataatgactgtaaatttatgctgaaatttgttgcttgtaacatccttttgttcttcattatggttcagattcttcaacaccaatcaaaaccaacaagacaggaatgaatgttgaagaaacgtctaagagtctcgagatgcagtcagatgctttgggcatcagtgatggtgaggagtctcaaagtacagaattatttagtatatgcacaaaatagtaatgtacagataaatttatgttagattgaaaggcaattaagtactgtctcttgaagttgagttgtttttgctgagaccatcattagtttcttgaatcaaataatagcatgatgtgtatagtttcgtagagattcattacactgtagtttgatattcagagaagctgcattcaaatagctacagttcacttttgaattgatattgcttattctttcaaatggtttgttttgctggctctaatcttctatgttctagtgaatcatcatctttaatccaaatgaatcgatcaagtactacttcatatctttcaggtgaatctactcccaaatcaacttggagctctggtgtggcctatgacttggtgcagagtctcaaacaccaatgcattttggttccacatcaacctcagacttatgttgaagctaaagagaagtttgatacatcagcagaatcagaagaaaccattgtaagcacaatggaagtggacaactcataccctgcaataacatctcatatgataaatttgaatgaagctgagaaagtctctgctgtttcttctcattcagtaacaaacttgatgagcagtgatgtgaagagttacttactttgcaataaggtgagagtgtactcacagttgcccaatcatccattcccagaggacattactgtgctccccattagagaagacaagtgggtggctgtcagcttggagttcccaaatgaaaataattgaaaaattccttcaccccattatcgagacacaaatgtattcccttaaaaaattgatgcccatgtaatgtttttttttatattacaactcttttaagttaaaagacttggtttttatgtaaaaaagaaaaatattggctctttacaaa

SEQ ID NO: 43007 - DNA, 3251 bp, Cannabis sativa
tcttcgggtgcatataaacattagtaagagtaattttttgcttcattacttacaccacgactcataactcgaaatagaaagaagggcgaaatcaaatttgacacatacttacgtgacaagtaatttcaacttattatctttatttaaaatgagtctcgcttatcaaaagtgacttaccagatagatatgtgtaatgtttgtgtgtgatttatgtgtgtacacatcattactcgagttcaaaaggggtatagaaatgttatcgtacaaggaagctgcatcgaagaggtcgtcctgtaacttcttaagctcttccatatcctcggccttcctattccaacgcaagtctgctctcttcaagaagacaaaagaacccaatacttacattttatgttatgaatttttttgtataaatttgaatgataatctaagaaagaaatacttggtacttaccttggagagaacacccaatccagaacatggagcatccaacaaaactttatcatatgtctctgtatttgtttcctgaaaatgaagtttgaggaaatcaataaataaagttcacaattcaaaatctcatacctttacataatgtcatatagcttactggaaaaacgcgaagatcggcgcaaatggttgtcacgacgctatctacttggtgcaactttgctgtctctttaacgattctcaaccggcccttgtttacgtcgattgcagctatcatacctgaaaaatccaatgtgacaattctatcagcaaagacaatttttaaaggatcaacctttctcgaaaaacagattaccttggccacacaatcgtgatgccatgtaaagggtctttcctccgggagcagcacaacagtccatgattttctcacccggttgaggatccacaactgagactatcagacctgcaaacacattgagttatagaactttaggagatacaagaaaagtagttctgaattttccactaaacacaaaaaaaatacaaatttacaagtgaaaactcaattcgcaaagacctgcactctcatcctgaaccgcgcataggccatctttaagcaaacccgcttgtattacaatctgaagaaaagaaaaatcatgtacttaaaagcttattatcactaaaagaaactaaacactatcacttatacctgtaacccggttttcatacgaacaaaatcgtccaaatgcaaagaaagctcgtacgggacctgaaattaaactcaagaaaatgaaactggcataacaatttgacacttgaatgaacacaaaagaagaaagggacatagctaaacaccttcaaagaatttagcttttcttcaaggtcagctctcgaaatacctttccccgcgtttgccctgacattagcacccgaaatggtatcaatatattttatgtcatatgctaaaagagaggaaataaatgtttggttcgggtgaggggaactgaaaccttaagctgaaactaggatcagtgttgttccattccatcaatttgattgcttcatcttttcctagatacttagtccatcgcctaaccatccactagatgataaattatgagaaaaagcaaaacaaagggaatattcgaaagttttgtttcccacaagattcgaggcttcgattacaaacttacaacgggatgagaatacaatgtggcaagagcgcgtgcttgtgtacgatcgtcaccttccaatttcggtaaaggaagtgagttttgttcctgcaagccaactttgaaggtcaatagacaagtaagttaagagaagaaaatggaatatgattgttttagttggaaaatcggaaaccttaagcaaaactagctttcggaggattgcattaaccatgttgccagcaccaggtctcagggcaactttggcaagtctcacattctgcataatacaaaccgaacaagcattagccgcgtttgaagtttgttgaaccaatacatggcattacaccgaaattgaaaagaaagaaggaatggaaagattttcacctcatccacaacagcatatggtggcatatctagcttaacaatctcatagaaaccaattctgagaatctaaaaaaacaataggaacaaaagaaactcgagaattagatggagctcggtgttttcttcgtggtgtggggaacacagaagggcatacaatacctgtaacagcagaggttccatgctgctaaaagacttatcatggcataatgaactgatcaaatggtctagatatcgcctccagcggattgttcccccgactatatcagtaacctatgcaaataaacaatttagtgccatgaagatctgatagaacaacaattgcataaaaagggaaaagagcttgtaatgagagataaccaatcgaagatcgcggtcttctaaatcccttgttcgaaagccaagagtcctttccacatatcccatctcattatcaccagaacctttccctttctcattaagaagatcagcaaatgcaccacctagctctattctcattaacctcacagcagacactgcatacacaaaagtaaacaatgtcaattacaaaataaacaaacatgctgctgagaaagaagcactcgctttgttggtaggactaaaatgagctcgagagctcaaaaaattggacttctagtcaatgcttttctctttgactctttatcttaatgagtaaggtgttatatcttcagacattaaagcattattgtctagctattctgggacatctctttctcatgttagccgtaacgttactattatgttgtggtgcattaattggccaagcatttcccacggataaaagatgagctttcttgaatggaagagatccctaaagtggttctaattggccaaacatgtcctacgaataaacgataaactttcttggatggaagaaattttatctctaacttttatccaatgaagtggttctgattggtcaaacatgtcctaggataaacaataaactttcttgaatggaagatccttcctctaatttttatccaataaagtggttctgacacaacctcactaaaacatcaaacacaactcaactctccttcttcaatcattatcagatagcataaaaaaacactcaaaaacaagattttttcactcaatgtagtattgaaaaaacaatcaaagcttccataaacaaaagtaacaaatccaaaaacaccaaaaaacccaacttttatcatagacagcataaacaaacactcaagaacaagaattttcactcaaaacagtaat

SEQ ID NO: 43008 - DNA, 3877 bp, Cannabis sativa
tgttgaatgatcaaagggacacgagtgggatttagtttttctctgtagcagttaccttttttgccttcgttcttttcgatcttttctcaacatgatctccagttcatcttcccagtccggccgcgatggtgtagtgtgccacgatttctggagttattgcccctccactctcatttctgggtctataaatgaacaactgtgtagtatgttttccctatacctgcgtttcttatacacatactctgttttctctaaccttatggactctattctgcataacatggagtcgagcctggtgttgtctgaaaaagagcgatcagttcattccttctctgatgcggatcttgcggtggactctgcagagccacggtttttcctggtggcccgatgcctctcttcttcaattaatcccaaaaatttcactaagaagatgggggagttctggaccaacaaatgtcgtttcccggtaactgtctctaaaatgcattccaatttatttttgctaactattggctgtgcaggagataaactgaggattcttaatggtgaaccttggcactatttcaaccaacttatcttgcttcactcaccaaagcaacttcagaatgttactcccgatgatctgtttaaagtgcaattctgggtgcaaattcacaggctgccatttctaagtaaatctagagcgttagctatgaaggtgggagaatggattggggaatatattgatgtttttgaggattctctttatgaaggctgggggcattttattcgtatcagagttatgcttgatatcactcaccctcttatgcgtggcaagttagtcactctgcctaaggttcgcgatgaacattggattgagttccgttacgagaatctccatattttttgttttcactgtggtataattggccacccttttgagaagtgttctggctttatggaattggtggatgctggtgttgatcctgatttaccttatggaccctctatgatgggagataaactaccaaattcgggttatgatcgttatcgatctgatttttccactgctaaagtctatccttttctcacccgtgttgctcagaaatctattgctgctataatccctcccacaaatattaaccaacaccgtttgattaacagggaccctcaccccatacctctcactgttgctgaaaataacaagttaccgtcatcctcaaacccaacagtcgagcctctccctgaacttcctcaacctttcccttcatttttccaaagtttatccttggcttttcccaccaataattccagtccccattccaaactcacactactgcccaataccattctgatgctatccctcaaccgaatgtttatgccacttatccaccttcggatatcaatgtaggtgctggtgcgaattccattttttgtgattctaccattacatctgttaaagacaaagggaaatcaataatgattgaagatggtttcaatgatgggagctcctcaaataagacttttaagaggcatgtagatcctgaaaatttttgaagtatcctgaaccgatgtcgtaacaacaactcggggaacattactttaaacgaattctgtacttagcaagtttctgatgaccaatcggattcccatgaggaaaattctttttgttcagcggtggttgcaatccagcagccccgcaaggcgccatgaagattattagttggaatgcgaggggtttgggcaatccttctgcattcaggcaccttaaactgcttgttaaacagcagtgtccgcatgttttatttatcatggagtccaaattagcttgtaactctatcaatcgggtctgtactgttctaaaatttagtcatggtttagaagttcctaggcaaggtttaagagggggtttattgttgttatggaaagatcatgttgatgtatctctcacctcattctcaatgaatcattttgatgtttttgtttcgtatgatcgctggcctcggtatcacttcactgctttttatggttctcctgaaacaaatcaaagaatacaaacttggaacttattgcgttcttttgctattgcctctcaagatgttccttggttgattatgggtgattttaatgaacttctttctaatgatgataaagaaggaggtccattgagacgagaacaattaatggaggactttaggaaatcaattgatgactgtggtgtaactcctctggattatacgggtaataaatttacttggtctaacaaaaattacaatggcttacttgttaaagaaagacttgaccgtggctttatcaatgggaaatggaaggaatttttttctgacaatcgcattcatcatctggactattatagttcagatcatagagcgattgctcttaatatttccatgttaactcaggatcagccagattttagacctcgtaatcgatttcgttttgagcaattttggctcaaggatgaggaatgcagaaacttgattgtcaacaattggaaatctggtttgacgactgacccgttgccttccctactacagaatattaattcttgttctactgctcttcagacttggcacaacaataaatatgggcagatgaaacatgacattaataaagctcaaaaaaaggcagcagagatgcataatctctcggttttttctactgatcagcatactcaaatggtaaatgcagagaaagtgctagatgatcttcttgaaaaggaagaattatattggcaacaaagggctcgagttgattggttgaaaagtggggatgcaaacaccaaattttttcattctagagccaaatcgagatacaataataataaaattcgatctttacaagctagtgatggaagaattcttgtttcagaccaagcttttgctgatgaggcctctttatttttttcccaattgtttgctacttcgggggtggatttggaagctcttaatgttattatggcagccattgatacttccattactgaagacatgaatgacagtttattgaagactttcacgggtgcagatgtggatgaagctcttaagtctatggctccagataagtcgcctggtatggatggaatgtctgccatattttttcagcaacactgggatattgttggtcctatggttaaggctagtgttttgaagattttaaatgaaggggcggatatgcatgatattaactctgctttgattactctcattccgaaagttgatcaacctcaaagattaagtgactatcggccaattagcttatgctctgtcttatataagttggtgtccaaagctattgtggccagatttaaaaaggtgctaccagtggctatttctcagaatcagagtgcttttttacctggaagacttattactgataatgttcttcttgcttttgaattggttcactgtcttaaaaacaagaagagaggacgtcagagttatgctgctttaaaattagatatgagcaaagcttttgaccgcgttgaatggtatttcctgaaggctgtgatgcttaaaatgggttttcatgaaatttgggttgaactcgttatgcgatgtgtttcttcttcaactctttccttcaatataaatggtgctatcaaaggcttggtcactccacaacgacggttgagacaaggagatcctctctctccgtacttatttttgatttgttctgaaggactctctgctttactgccatctgaagaaaataatggtaatctcaaggggctgtctatttctcgaggggcaccttctgtttctcatttattatttgctggtgatagcttgctattttgccatgcgaatgattcttcatgtcaagccataagtcgtgttctggatatatatcatcgtgcctcgggtcagcttctcaatac

SEQ ID NO: 43009 - DNA, 6061 bp, Cannabis sativa
  modified_base (5999)..(6002): a, c, t, g, unknown or other
ttaacaaaaaaaaaaaaatatgttataacaaaacaattatcactaaaaggtaacttcttttgtagtatatgctcgatgaacttggaaggccataagcactcaacaacaacaagaaaaaagaatattttctctttcaaatatctcttccatactactatactatactatactatactacatttaatatgtaatacacttttcctttcactttagatataagagtataaaatggtgtaatattttctacattagaaattgagtcaattagaaaagaagttaaagtgggatgaccctaaccatattcgtttgaaatttcaaaattcaatatgaaccattacttactgtttttcttcacctgtgaaaatggacttttggccttttaatgttcacgacttttaggtgataagtgcaatattgactaccaccacaccacaaaaaagaaagatattatactttatttatttccacgctcacggctcacataataaaaagctatatataaaaattataagactttcatgcacaaaatcttcttaattaattaacttgttttcttgcttaatatattaaattgtaatattattataatgtgctacacggttatttttacgagttttgtcatctgccaaaatcgaatggaaagatttaaatagcctttatttcaacgttaaaaagctaattaaagcgattgatttaatacttacatatatatatagtctctgtacttacctaatccaattatatatttggattacttcattaaattattgtgaaataaatcacagtgtttgagtgtacgtcaaaactaaatgctgttactgatcatgattggagatacatcaattcatatatatttagtaattaactttagattagtggacattaaaccaatatatatactataaaatctttgacatatatgtatcagaagatcgaatgggataattgatatgatatacatgatatgaataaataagtgtgtttaattatattagtcggtgaaagtgaaaagctagagacaattaatgaatgtgtggctatatataagctggcacaaactcaaattatttaaagctttttgttaccactataactctgaagtcaaaaacatacatttgacatcgttgttgtgagtttgaaaaaatagaaatatcccacttattaattgtcagacaccgtttttctgaaaaatattgcaatgtacatcctaaaagaatttaatcccaaaggctcaacaacgcgtcaaatgtcaaatgatcttctacaataggaaactatttgtgagtttcttcaccgacaagtttacacatttatatataactcaactcaaccatgcatgatatatgataataataactattataaatattggaaaactctgcattaccatatatatgtggagaaatatgatataattaatttgtgtatattttaattaattatttaatattatgtactattttttaaattttttaaataatttatcatgtcacaaataaatatttaaaataattcatttcataaatgagaaaacaagctcacaacaacttaatgattttgtgttttactaggtaaattattcaaaatattaccaaagtttggagagaaatattaaataattattttgaaatatattttgtatatgaacgtgaaacaaattgttttgaaatttatttttgggatgattcattattattatttattttctaaaaattggtaaaatctatatacctactactaatattataacttcaaatacaatagacaatattgctattattttttaaaaaatagtttaattattgaaaagtttatgaaaaatgcagttatattttctagtgtccctatataccgaaaaatagagagtcctatggagaaagcatagcccaccaaatatttttcctagatatttccattaaaaataaaactaaacacatttttttcttttacgtaaatatatactcggtttttggttatgacatcaacgcggtacaactagggtggcggtgtttcgatgcagtactaatatttaattgggtaggtgagttaatttttattatgtaatattatatgacatatctaataaactacatatagatattatagatatattgtttttctaaccaaatatatatcacaaaatgtttacttctggtgtcatattatatcgtatcgtatatatatggtcgaatgcgtgacaaatattcaactatgtttcacaaagtaaactctaggactaataattttcaatatttaattatgtaatgctgtgaaattcaatgagtcaccatttcgtgctatatattctcatcgatcggattgaatctaatggcgttctccatatatcctttcttaattaatcgtaactctaacaattttatttgtttatatacgtttggtttggatctacttttaaatcgacttatgaaaccaaattaattaactaattgaataaataaacaaattatgagggataaactcacagatatagtaaataatgttatttttctctaacactactatttcctaaatatatatcgcttagctttagtaatgggcaatcttagctttaatcagttcgaatgctcattttttactaaggtaaactgatggacgatatcggatgacattgtcaaaaaaaaaaaacggtgcatttatttttaatattcttcatgcatagcctatgtcatttatttgaagactaaacacacccatatatatatttctcataaaattatacctatgtatatttactctcttagcataactgtattaatcaacctaaacactattattatttttcaagaaactttattttttttaagcaagagcaagaccatgttaaattaagtcaagtagtaaacttggggaagacgttagtggtaatgcgaaagaaaagtcaaactgatggaccataacgtggcgccacctgtcatccgacgtggatttaatgacggggccacccccattctcagccttcaacgttttcaccactcgctactttcacgataaaacgcgtgaccaaatgggttcaatgaccaattacgtcattttattatatatataaggacaagtttaattttttgacaacgcttaattttgtataaataaaataattaaacgaagtacaccgccgtgtttataacgattaacgagattcacgggcctggtaagaaaacttcatttgtatatttgaaaaaataatttaattattaattaataaagtcaattaaatataaatatgtaatatcgtaagtaattagcttttgaaatttttagcttataaattagaattgattggagtattggagggaataataatatatttttcctactctccttgatgataatttaatataaaattgagaagaagtgtttatttatttatcatatgcacaacgagtcagatttcgccaattaatgataccatcattattagtgtattatctttcaaagtggttgaagaaatactcatccctctctttataattttttttgcagctttttattttctaaataaaaagttaaactaatattaagaatattttaataacaacgtcgttgttgaaagaaacgtcgacattcaaactatgcgtattgcgtacacacatgtatatataaaatatttatatattatatcatcattattaatagaatctttaaacgtctacagcaacaatacatatgttggttagtatttattattattgttttaattgttatttaatgtgcttattaattaagtacaaaaaacattgttcatagtataattctgacccgtacagatataataatctaacaatataattgcgttctagggggatatatatctgttatttaatcttccattctcattttctttttatttcttcgtggatttctaatgttcatttttagaccaacaatttaacccttcccaaatcccaatacgccagatttaatttgtataataaatgtgtattaattttagctagaattaaaatttgttgagtatcaatccaaatcttatattggaagaatagacaagagttaagagttattttaaatataaatgtttttattatgagacctacttagacccatgacactaaataatctagtggcctttggttaacttttatttcaaaataaaatacttattccaccaaaatagtaaaaaaaactattctattagaatgatatatagaatacaaattatttcattttcatgattccatatgaactcttttccctatgatacatttccaaatttagaattcaaagacatatatataattgtaagaaatgcaaattaatgtgtacgtatttcagctaaaattggattttacattatttgtgatatacgtaacattaaaaattatacaaattatcttattaattcctaaaagagcataaaaatccggctaagaatttaagctatatgttcaaaatctctcttaattagtttaaatatatttatcaaaaaaataaataacataatatacataaattaatttaataaattttgttattataatatatttatatttaataatgttactaagttcataattttttgtactttagaattatttatagatcaataacctttttttcactctattttgtagcttagaagtatatctagtggaaagattacatcgtaatttaaaaagaaataataactaatggtacgtacgtatgtaaacaatctaatctatatatgtagaaagtttttggtattattccttgaatcgaatcaagacaaaacattgtttaagttaaaacaaaaattaaggaccagcttccaagcaaagactcgtgtaaattttattaaaaaactgtctataatattgacatcgcgtatgagcagcgcgtaagtccacggcttaatcgtgtatctcaatacgactttgccgccttacgactttgtcaactcccttcatcacactcctttcctgctctccaagctttcaaattttcccctatatatattcaaaacaattcttaaacatttcttcatcttcactcttcacaattcataacacaaaaataaaaaaggcccaattaattttcctcaattcaaaaccccccaaatctagtgaacttttcttcaacaatggcgaaatcgcaatcgaactccgccagtaccatacctctcatcatctttgctttccttcttctagcttcttcttcctccttctccgtcgtagtcgccgccaggcttctcatcatcaaaaatgttgccgctgaaccggctgggaatctgattcttccgggaattatagcggcggaggaaggctctcagggcggcggaggacgctaccttccgtgtgattcggggaatagaaaggttggagtaatgggatttgaagcgctgagattgtgcgggaaacgtagcgaggttgttctgagtatgctacccaaaggtgtagtagttccgccctccggacccagccgtcgaaccaatgacgtcaacaactagctccatcgatcgattcgatttacagttttatgagctctctatatattcttttatttattatttatttattttgtttttatgatttttatgtgtgtaaatactccttcattacacgggtttattacttgatgagaaatcaaaatgtacaataagttgttgtatgtttttttttttggatttattaaaattttcaaatccaaacgatatattcgtgatttattatttgatcggatctaattcatttataattttatttcttcgttattggtattgttttcagatttcaatttattatgcctgttgatcaatcaaatcaaatctgaatttttattattatttttgctggtttaatgaatagtgggtcaaatatatggacgttgacaaatgtgttaagagagagacaaaaagtagacatttgggttttttttttttttaagcttttttcacttttaatcaaaaaaacaagtaaaaaatagggattttttctattatactttttcatgaggaaattatactctataccctttttatattnnnntcttttatttttaccctcttttttaaagtctatcatttttacctctttttttaaatatt

SEQ ID NO: 43010 - DNA, 3405 bp, Cannabis sativa
  modified_base (1297)..(1298): a, c, t, g, unknown or other
  modified_base (2538)..(2544): a, c, t, g, unknown or other
tctctttatatatatatatatatatctctcaagctaccaaacccaaccatggaaactaacccaccaccaccaccatcatcatcaacatcaacaccgctaatccccagaaaattaagcaacgcggttcgtctgatcatgttcatgatccaaaaggggatgtcgatcaagcgaaagcgcctgatgatcttgattcctgatatgatggaacgtgggaaggtactcggcaaatcattcaacgacctcatgattcgccacaacacggccttaggctgtagctcccacgacgttcgaatgtcgttcgtgtccccgagggactacgagttcagctgcagcagcaccccaccgcatcgaatctactccgctgaccgtgtttccagaaataataagcgcagaaacggaggaggccgtcaccgttatgttaatgctaatgctagtaataatattaataataataataattataagaaacacgttgacgtcggttactacaagcagtactacgggagtggtaatactaaacaagacgatgtcgtttcggttgttagctccgttaagtcgtccctcagaggaggaggaggcggtagcactaacggcagtgacgatgagttcccagtcgacaaggcagcggaggagtttattcagaggttttacagggagttgttgttgcagaaattaaatttggcgcgtgagaccacagccacggttcgatttggctgactcacgcgcctgtgagggattgtgttttgcagtaactgaaagcaaaacctgcgaaacgacgccgtgcttttgtttgatgtacatttagtaaaaattaaccgataattaatgaaggttttaaacttaagcatttttttactatatataaaaattaagcattttcttttctattgttctgctcttatttttaggggatgaaattttttcatttatttttcctttacttaagtaactgttacgttttctcaaaaaaaaaaaaaaaaaaaaaagtgctacgctatataatattggttttcagtttaagatgaatatgtgcacggataaaagagagatgaaagcaaaacaaggaaataaataaaaatctgtggtatcatgttggaaagtttagtcgcttcgcttaatctttataagggagtgaatatttaatatatgctaattattacttagttattgtttttaaagaaaattatactaactttgccatttataatgataatgattctagggattatttcacaaatacacaaatacacaaaaataacaaaaaattacaaaaatacagttttacagaattttaaanntttttacaattttttttttaattttatttacagaaaatacaatctttttatgttgtactcttgttaatttgttgttgattttttgttattttttgttgtttggattttatttttatgtaagttttttgttgttttcgtgttatttttataaaataccgtaaaaatataaaaataatctttaaatgtaaaaatataaaaaatttacaaaaaataatggattatgtaattatctcaattattttttcatattatgaaaataatattattgcgtacaaaataatataatataatttaaaagactaaattataatttaattttaataaaaaatttctacataattttaagaactatatatatagtgttgcttatctgttattttagaacaatgatgttttaatgttgttgttacagaaaaatgacgtgaaagtaatatttttttaaaaaaaaaaaatgagtgaaaatctattaaaaaaaaagataaaaaaaataattcatgaaaatgtaaataaaaaaaaaaaggtccttaaaaaaatagtagagttttcatttttacgggtttaaaggtataagttttgaaaaaaaaaaaaaaaaagttatcttataggaaaataataagaaaagttaagaaatattttttttaactttctcttatgtatatattttgaaaaaaaaaaatctgccaaattccttaaaatttttagtttagcacgatcaaccctcattattgaatttttagtagaaactctccaatattcaattctgttttgatcttcactattctgtccactttggtctgttaagtaccaaggtagactgcaacagtgtacaaaaggtagacttcaagcttattgacaacaaaagaggccaaatcgaagccaaaaagctttagcttcggcgatagaaaaatcgagaaatagagagagacagacttaggcgatcactgggtttagatttctgggcttcgagatcaggtttctgtggtccttttggaccatcagcgaccatagacggccgtcgtggcgtggacatggttgagttgagaacaaaagagaaggatgagaagagatatggtgaggaaggaagagaaagagaggttggggctcagggttctcgggcttgggagagcggatatgaggtatgacttgagagatggcggagcaccgtgcttctggtccgatttcgacgccgcaccaagcaaagagaaagagatcaggagaaagaagaaagaagaagaagaannnnnnnaaagaaaaagaaaaaaaaaaggataaaacgataaaaaataattaatatttaaatcattttttaaatatttatataattaataggtggacaaatgaaaattttccacgtgtatacttgtttacaccatgacagttagccttgacatttaacagactaaagtggacaaaatagtgaccaaaacaaaactagaatttgatgagttctaccccaaaaattaagtaatggagttaatagtgataaactaaggtggtgtttggtaataattttttaatcagttttctgtttttaaaattagaaaagggaaaatatttttcaaaaacatgatctataaaactgtttttacttttaaatttcttaaaattgagaaaatcaaatttcaaaaaacaaaaaaaaaaagtcactttcaatattttttaaataattttttttaatcaatattttgaacttcgatcaaacccggacccaaatgagaaaattatattgtatacccactttagtttatatgttttaatttttaccttcatttctatattttttaaaatatacctactttaatagatgttgtccccattatacccttagattaatgcaaattgtgtgttagacttaagtaaaaggtgaggatgtattgggcaactcactcataaaagtgggtatattttaatgaaatataatttgagtgtatttttgattaatggataaaaaaaaaaaaaaaaagtatttatcaacttatctcgacccaaatccccccacggccctggcgctgaactcgacctctgacctgaacccaaattcgacctcgaacctagacccgacataaataaaataaaaaataataataaaaatgaactttacagaaca

SEQ ID NO: 43011 - DNA, 1339 bp, Cannabis sativa
taccgaatttacctgcatggccgcttttcactgcttgggaaaattcattccagctcaggcttccattcctatactggtctattagataaaccagaagccttttgtttggaatgatagtgggcttgaaacccaagtatctgcataaatatatatatgagaagggtaataactaatgaaccttctttttctgttaatagaagtacttaccggcgatggccttcaacgactaaggccatgtttcctctatgagttggaatgaaaatatcactttccaatgatacaatgtaatccagagcagccatctggttggaatgattacggaatgggtcaagctccgagggctctagcaatgtctcctttttaatctatcgcacaaagtagatttgattattcaatatgagtaaataacactagataaattcaatagctacgttgtctcattttcaatctgtacaagtactaaccaaatgaggaaatgctaattttaagtcagccattctcctttgccccccatagatgttaccagcagcaatgtagatttgcatagcaggatcaatgtccaatgctctcaatgttagtgctgtttcctctggagttaatgggcattcacccatttttcgcttcttcacagagtctatttctttctgtttccaccatggatacgcatatctacaatatatatactatgtaggtcaacaactactacactgtactaaaagggcaaagatgtagttcatcttgtcatccaacttgcatcacatctatctcaaatctaaactaatcatttttatcggataaattttgaactaattaatatgacacattgatttggtaatagacaaataatgtgtattgaagtaaagatatataaacatatatgattacctgagttttgtcaattcttcaatttaattagtgttgcaaccttcagagcaacctgagaaggccaacatatccatttcatatctgaggtgaagaactacgaatgggccgtttcttctcaaaaactctacgatcttcttgccagtctcttctattttgggagtaaatttcaaagctctgtaatttactctacaccgcagcttttgaagttctaaaggaatcccattgttggcaagccttgagtcacttttagtgaaatgaattactccatatttttgcaatctcggaactacctacaaatcatacatgtatacagtacacacacacacacaaatgtgaattagttagtgcttcttatgatctacgtaccaaattctcgaaatggtccaatactcacatatattaaaattgtactattacacaattcacaagaaaatcgaaaaacacacttattatt

SEQ ID NO: 43012 - DNA, 904 bp, Cannabis sativa
  modified_base (778)..(782): a, c, t, g, unknown or other
ttgaatgaaaataattctgcattctatattctaaaaacaaaaatatgacaaatagataattccataacaattctacttcgttctagattttacaaattgatggataacattcatttcatataattttcttaattattcttcttgcttactattaataatatattttttatgcataaaaaaaattaagaatgttcacctaaagtaagggggaaaatgagcatagataataagattaatttcattaatctcattatctaatcgagaaaaagcataaaaataattgaatagaatagtaagtaatttcaaaataaaattttcctcctataagtaattattaccaaacaacacaaaaatgaaaaatgtttgattttgacattgtctttctcaacttttatcttctcgatcatatatatcattacgaaatcataagtctcattaaattaattgattttttttttcctttttaaagaaaattactagaagcttttctaatttttcttttggaaaaattagtataaagttaaagcataagattttatatggttcggccatgcgattgtctcgagaacatatattgagtgagcgcacttgaatatttttttctattcttagtgacccagaaagaaattggcgccgtggacaagaatcctataataaattgactatgtatataatataacatcctttgttactctatataagggtcatattctattaaataataaataatactatgtttgaattaagaaatgtattatattaattattaccactaaannnnntaatacaatatatgttgtattatttaatacataataaatgatccgtattagcttgtattataatatttacaaagaatttgaggtgaacaccaatcttcaacccggacccagacccagattct

SEQ ID NO: 43013 - DNA, 3803 bp, Cannabis sativa
attctcttcttataataaatttttcaataattaattatttttaaataatatttaattattttgttacaattagatgaactaagtatgagtatgactaatcaaggtcggctatttactcaattatccattgtcttgagtatggaaaaactcttactcttgatcagcaactcgtgttaattcgtccgtttacaaggaaggaaattaagaaagctatgtttagtatccacaacattaaaaccccaggtcccgatggctatggctcggaattctataaacacacgtggcctgaattgggaacagagttttgttttgctattcagaacttcttcattacaggaagcatcccagatgtattcaatgaaacaacaatctctttgatctcaaagagagatacaccgtcttgtgttgttgactatacaagctgattgcttgttgaacaactatttatatcgaagctatatattgtgctctaggcttgctgaggtcttgcctttcttgattaaccagaaccaaggagttttcattcaacatataacaatagtccataacatcttgatttttcaagatcttatcaagaactacaatagaaagaatgtctctccgtgatgtgctttaaagatagatcttagtaaagcttatgatacgattgactggagtttcctggagaactggctgaatcttctttttgttttcctgcaaagttttatgacatacttaagaggaccttcatataatataatgatgaatggaagacttcaaggcagattcaagggtatgaaagggctcaggcaaggagatccgatctctcctcttttatttgtgttggtaatggagttccttactagaagactgttgcaagaatctagagaagactgttgcaagaatctttgtaagagtctcaacttgattagtctctgttttgcggatgatttaatattattttgcaaaggcactagttaggttgtgagacatcttaaggaagcattggatgattttagtaagattactagtttgtctattaatcttgctaaattgaatatttattttgggggtgtggatgaaactactagagtggagataaccaatatgattgggctcgaggagggtaggttcccccataaatacttaggggttccaatgagacctatcaaatggcgcatggaagactgtgggatcattgtggacaagataaaaaagaggctacatacatgggctacgtaaaacttatcttatgcaagtagaatgcagctaatttaaactgttttgttgggcctaagaaattattggatgaacatttttgttcttcctcaaaatgtagtcaaggagtttgagaagctttacaggttatttctttggggtcaatctggggacagaagcaaagttcatcttggttcttgggaaaaggtttgcagaccaaagcattttggtggtctcggttttaaagaaggggccaagtggaatcagactattttggctaagtacctatgggccattatgaagaagcatgatgtgttatgggtcaatgttgtgtatctaaaaggagctgatatttggaactataagcttgctcaggattcaagttggtactcgtaggaaactttgtcacttaagaaatgttttcaatcagcagcgactaatggcaggtaggaggaaagacaagtttggggctgctaaactttacaacagcttgctgaattgtgatgaagacaaatattatagagttgtttggagtagacttaacctttctaaaggaaggtttattctttggcaagcggtgcatattcagcttcttacaaggaatcaggtagctaatatccacatcaacatccattcccttgattgtccggtgtgtggtcaggctttagaaagtctgcaacacttgttttttgacaatatttaattttttccaagcatgtagtccaagcattattcgactggctttgtttcaaggcttggggcttgcattttgatggttggatgtctttcattactaatacaaatggaagggttcgagataacattgtgataatgattcttgctgcagttgtttattgatgaataggaacaaatgtatacatgaacatagttcttatacatgatcactcatatagttaaagagattcaaagaattgttaagtatagattgtatagcaatattcacaggaagtttgatacttgtaatcacatgttaacttgtcgcctgttgacgtgagctttgcctggcagtttgttgtcatggctttgttgtagcttggttgttttgtgcttgttgattaatgggaatctcttctcctttgatcaaaaaataaaattacaagtaagaacaatcatcagggaaaggaaaaatttgaatgtactaaaacattaacataatgtactgcaacacactacaaaactttcttagtacgtgaaattatgtattataattttattactcaaagccctccaaaagcaatgtgtgaaatacacttctacatacgaaccaggaccacaacttgttgtacgtctgttagagtacatttcaacttttaggccgctttgtacttgatattattaaattaacattatcagaactgaataatatataacagaaataaatttattaaataaccggttacaataacctccacttactgtttcacacatatcaaaatatacacaatattcaataaagtacgtgtacatatgtgtatatatatatatatatatgcacattcaaaatatgtaccaaaatattatattcatgaaggtgacaatttaattagataaatggaagagaaattatagaaaattgagggtttatatttttgtggttatttaattttagacagtgttatccaataattttaggatgtataattgttaggcacatggattacttgtttttttataaagtataaccttacaaagtagatggtagtaattaatgtagaaggttccaatgatgtatttatataaattgttaggcatgcaaagcctaattaattaataaatgagggtggccagtggcaactatatatatcaaggcatcgacagtatgtagcataatgtgatttatataattatcaaaaaaaaaaaaaataagaagaagaagaaagttgagaaagagaatggcagtgaagcatttgattgtattgaagttcaaagatgaaatcacagaagcccaaaaggaagaatttttcaagacgtatgtgaatcttgtgaatatcatcccagccatgaaagatgtatactggtaatttgtgattattttgtttcataattcatacatttatttaattataataatagtatagtgatgaatataattctaataatgttgtttgcattgcaggggtaaagatgtgactcaaaagaataaggaagaagggtacactcacatagttgaggtaacatttgagagtgtggagactattcaggactacattattcatcctgcccatgttggatttggagatgtctatcgttgtttctgggaaaaacttctcatttttgactacacaccacgaaagtagactatatatatagtctcccactgcccactgaatggaccaagctgcagccttcatcttcattttctcgaataatattatatatatctaataaatatgtgtaactctttgataaatttaataatacaagtactcctactctttattattacttgttatatattttttgttattatataaaaatatgttccaaaaataaattataagtactgttttatagctcatattatatcactgctagtctcttggaaagataaaaatgtcttagaatagaattagtagagataacaa

SEQ ID NO: 43014 - DNA, 3986 bp, Cannabis sativa
aaaaaaaaaaaaaaaaactctctcctcaaattcaatcacactcttcaaaagaacttcagatccaacgtttccaaatccattttccaaatttggaattccaaaacaaagaattttctagtgtttactttcctttttctgattttcctatttaattaattaaaaaaaaattattaacaggttataaatttcaatcattgtttgatccgcacacatgggatttttctccgattcaaaaacactcctcctcggtagatctcgttcgtcgttttcgaatcaaaattctgtttttggattctgaattcaaaaactaaaaaccagagacagagagagaaagagaggttggggttttgatttgttgtttgttgttgttgaagatcgagaaagtaaatatgagggtggcaaagtctcaggtatggcaaccttgcaagaagaagaggttttgattaggagaattttagagagaagaagaagaagaaggggttttgaggaaagagagagagagagagtgatcaagggaaaaagggggataagttagggtttttctgtttttttattgaagatgacgacgaggtcaagcggcagtggtagtggtagcagcagcaggacgcgagttgggagatatgaactgggtcggactttgggtgagggtaatttcgctaaggttaagttcgccagaaacgtcgagactaatgagaacgtcgccattaaaattctcgataaggagaaagttctcaagcataagatgatcggtcaggtacgtatttttcttttttgtttttgaaattctggattgttgaattgaatcaaggttgtttggatgccaagaaaacagaggaccacttagaacaatgacctgttcaattagctttttgtttttattaattttatatgtgaattatagagatgaagaatgagtcaaatctgtatgtgacagtaatttttgtcaaaaaataaaaacttggaattgtttttttattgttgatccattggttggtagctgagaaagtagaagaattcataactgagactataattttgtttttacaattgttttttctgtctcttatgctaagttaaattatgattgataaaattgccatatgaattaagtgatttattgaaaaaatgctgatgagatgatcgatcattggtctaactgctatatttcattgttatgaagtaaaatttactaaattatcgttatgaatgtcattttggaagtaaattttttggtgcaatataaatatgttatatttggctgggaaaggaaatgggaaataatcttagttatgcttagttttagagaacacactttttccaaacacttcgaatcaagtaagtatcaagagtcttttttctgcttgctaatccaaatttctgtggtataaaaaatactagagagtaacagacaagaaatgtgaattcccctaattaatttagttaggtttaagttagacgagaataatattttgataactagcgattcatttaattcaaattcatttgtttactattatttgattgaccaatctttgatattggagtgggtgaaaagtcaaatgtattggcaattcttcatgtactcttcaacacattagaatagccattccagtcgatgaattttttcattattttactagaatgactattctttttaacaatgacaggaaagatcatttattacacaactgtttttttattggtatccaattcttttctttctcttactatttttatggaatgactattccttctaacaatgagaggaaagaccatctacaattattttttactcttattcagttctttttttctttcttttttatttttttttccatttctattcccattcctctatttttactactctcaacaaagggagtttatttgtgaaaacgctcttcgacctaccatcactgttcttgagtggtttgcatttgcaattattattatcaacagtggatgattccctgtttgttgactgaaaaagttatgaagtaatgacaatgactttaaattaaaaaagagagcaagtcaactttgaaacagttaatttaaaacgtgtttttgattaaaaaaagtcagaaattctacagcattttgtttgttaattttttgtgttgaataattatctttgttagtgcttttggtatagttgaagtatacatttagttttgaattaaataaatatataaatatttttctttttcaattttttaatgtagatgaagcaatgcatgtcttcatgaactcttgatgcttatagttgcatctcttatgtacagagttttctgtctgattagcaaagacattttatttattttcatgttcacttgaatatcttgactcaatgtttgttttttctttttcttacacagatcaaacgtgaaatatcgacgatgaaactaattaggcacccaaatgtcattcggatgtatgaggttagccaacaaatgagttaattatattttgatttaggaaatgaaatgctactagtttaatggattttcttgcatagtaatatcacatcgtagtattgtatgttttataaaatgagtttcaagttgagacttgagattgagaaattggtttggaacatttacaaaggtaccattgtagagttagagtttgtattgttataacaacaaaacccctcacatgtcacatcacaatgcaaccgaaatgggaaagttatgtatcagtaatattctttacattgagctttatttgttgctgttgatattattattgattgttagtgctgattttgttttatgctggttgctgttatattcttcattcttggaaattttagtgatgtactcttgcaatgttgatgtaggtcatggctagcaagacaaaaatttacattgttatggaattcgtgactggaggagaactgttcgacaaaattgtaagattagggttttcctagtttgtaccaaccttaataacaacctctactaatgctgtgtgtatacaaactatctaacaatttatcttgttttcttgagccaggcaagtaaaggaagactgaaggaagatgaagcaagaaaatattttcaagagcttatatgcgctgtggattattgtcatagccgaggtgtttttcacagggacttgaaggtgaaactttaatttttatcgttgtcttccattgtatccacattattgttgtttttaactctagagatgatgaactactgatatactataaatacactgagatgatactattgttgtaaattacagccagagaatttgcttttggatgctagtggctctcttaaagtttcagattttggattgagtgcacttcctcagcaagttcgtgtgagtatgaattgggatgaattttgcattacttgaaaatgtcattcgtaatccgtattagttttggtcggggtgcaacaagattagtacattattagtcgaaaagtaccaagtatgaatagtattctattattagttaaagtagaatgataaaatatgccgactcatttttccattgcttgaccgtaggaggatggattacttcacactacctgtggaaccccaaactacgttgctcccgaggtgaatttacttttcttttgagctaattaaaagtttgtgttaacatgtcccctttgtttcttaacagaaccttctcttacctaggttattaacaacaaggggtatgatggagctaaggcagatttatggtcatgcggtgtgattctttttgtcctaatggctggatacttgccttttgaagaatctaacctcatggcattatataaaaaggtgatttttcctgtctttggattcttaaatctatatctgaataatgctcacaaatatatatattttgtttatatacgcatacataaaacattaacagggatgtctatatgtatttactgttgttatccctccttcaaatcattggataaagatatttttaatatttttcgttctgttttttgttcattacgagaaagaaa

SEQ ID NO: 43015 - DNA, 6553 bp, Cannabis sativa
aaaaaaaaaaaaaaaaaggcagagtaatcatttttatatatatatatcacaggaattggtttagctcttaaaaccaatgaaaagaagaaaaaaaaattacaaaaagtttgacattaatatgtataatatataataatcttgaaattttcttatatccatgaagagatatttcacttttttgaccttgaaacccttctgatcaaaaccagcaaacaaagcactcgataaagcacaaaaaacccaatcaagatgtaaatattagtccacctttgcctctcatcgagccctctctgctgtaaaacgtcggctccagtaaccatacattctttcttatcttcttcataccacatcaaacacgttgacacaaggcaaccatattcatttataagaagggcatcaagggcatatttgtacattgagaaaaagtgcatgaagagccaatacttaggcatactttcttgtgaaataaaatagcctgaaaagagaaaaaaagcccctaaaagtatagtcactagtgatgttccagcaatgtaatttggggccaatgaacttaagaaaaggacgaaagagtttgccataagaacaataacccaaatgactaagacaaagtaaccaaaggcttgccatgttgcacaaagaccaactaaaaaatagatcgagattgagtaaatgacggctatggcaaacaagtaaggcaagaaaacaagggtattggctatgagataagatgagagtctataaaccccacttgatgtttcccttataattattggcctttcatttatgaatatgggaagtgtttcggttgtggaagagagaaggaatgtgagagtaaaagcaaatagaccaaaccttttttcgatgccttctttgttgaagcctatgtttatgtaaatggttcctaagacaaggccaacaatgagagcctccaatgtgttggttaatagaagctgtcttgttctgtaaatgatcctccaaaacctgtagtacaaagtcactacttcatgtattcttgaactcttatacctcaccatatttgagttatgagtactataatttatattattattattatttggagatggagtagtagttatctccggttttaactcatgaagttggccaagtatttccattgcatattctaaggcattgagctgtgaaggaacagagaaaccattagagagcaagaaagactgaagagaagaaagtgtgccatgatgaacaacacttcctttagacaacaaaagaattttatcaatagaagagagtatcttaaaactcggttggtgaatagacaaaacgacagtcctgtaacgcgaaacgcaaatggacttaaggatttgcataacgttgaaagccgaggtactatcaagaccagaggttggctcgtctaggatcaaaacagcagggtcatgaagaagactcaaccctatcgaaacgcgccgcctttcgccacccgagaggccgtgtccgagcaaaacatcggccagatagctgagctttagatcggtgaggatggaggaaatgatgtcgtttacgtcggtggtcttggggaagaggaggcgggcggcgaaggcgaatgtttccgagacggttaggagaggtagacaggcgtcgtgttgaggtacgtaggatgagagcttgcggaaagatgaagggttgagaggtgaagagttgaggaaaagggtgccctttgttggggatgtcctggctgctaaaatgtctagaagagtggattttccggcaccgcttggaccgacaacggctaggatttcggaatgtgtggcggtgaaggagatatctctgagtatgtgggttggaggggttttggtgcatgatttgaagatgagatccaagggtgggagtgatgttatggtacctgttgttgactttgtgtaggagattgatgaggctgttagttcgtaggttttgactggcggtgatggcaatggtggggagtgagattgggattccatggaggaagaatgaggaggagaagagggagagaaagagagaggagaggtttggttcaagagaggagaggaaagagtattgaaggtgtttattaaggaagattaagtttacttacattattattagttggttaagaggataagaagaagggaccctacgacaaatgatgtaagaataaaaacaacatatggggtttatttcctataatatcttgacttggattttattaacagaaaaactagttgtattttgtcacgagcaaactaataaagaaaatgttaaattatggatgagtactccttacaccatctctagtgggagatgtaaaattatgttttatttagcacacaaattaattttgtgagtaaatttataccaaattttagttttgtactccaatgcgcagttgtaaaattttaatgtaaaatttaatatctgattaatgttttattaaaaaataaaatttaataattttattattattttaatatgtaaaacaagaaaaaaaaataatataagtatttcataatttaatgggatagttaaatatattaataaaataataaaaatgacataaataaatgtaaatgaaaaaatagtgaatttattgtggtgtaaattttacatcataacaaatataaattatttaaatatttttgttaaccttatagactataatagctattaccaacatgtaaattttttttagaattaaaataattataattaattattttcttaaaataattaatctttaatttaaatatttaataagacttttttaaaaaaattaatattaataattttattttttatattggagtttccattataatttttttaacaattaattaatcatttaattataataatatttacaataaaattctaatattttataaaaattaaatttccacttcttcttactaaaacaatgacatcaattggaaaacttagaaagctttatgcctgttaaaatttgaagttggaatggggtttaagaactttgtacattttaattaggcccttttagcaaagcaagcatggagaattttctctaatcctacttctttactttgccgaattcttaaactaaggtatttcaaaaatacttctctccttgaagttgatttggattcttatccatctttgacttggaggggcattatttggggttaagaaatgcttgctaaaggtctccgttggagggttaggaatggttttaacatattgtgtgcttccgatccttggctccctggttttacttcattcaaaccattgattttttgaggtcaagtacaacaatgaaagtctctaatctgctattgaattctcgacaatgggatccaacatttttaagaagccttttcttggaaactgatgttgaaaaaattcttaatatccctctcactctgttagatcaggcagactcactcatgtggcatcatgagtccaatggtatgtactcggtgaagtctggttatgcattagcaatgtctttggaagatcaatcatctgctgccagtggtgtacaagctcaacaatggtggaagaagttttggaaaatatcttcaccttcgaaggtaagaatatttctatggcgtgcaatacacgattgtcttcttgtggctaatatcctccataaaagatatattagtaactctgcaatttgctcggtctgcaaccgagaaaacgagacaataatgcttgctcttttatttttgtaaacgtgctcgaaaagtggctgcaatcagctttctgccttgaatattatctgtcaaatcatttggatcttaaggctttaattttggaattttctacagaatggtcatccctgcagttggagcaatttgctaacattctttggagtatttggaatgaacgaaacaaagagacacatggttcaaagcctaaaccaacggatgtgcttctttactttgctctctcatatttggatgaatatcatactgctaggacagacactcacaaaggatcttcacaggaaaatttagctaatttgtctaatgcccgaaagttcagttgaaccccccatctggtaggctgaagcttaatactgatgccgcagtcaacacaaggaatcaaaaatcttgttttggtacgtacaatcttacgaatagtgcaggagatgtagttgttgccacatcaataccgttccaaggaagctttaaacctgaaataatggaagctctagctcttatgcatagtctacaatggcttcaagagattaagctacctgttcacttcatcgaaacgaattcactattggtggttaaaggattgctctcaacccaacaaccaatttctgattttcattgtttattaagtaacatttttcttttagtctctgatttttctggagcacaaatctcatatgtttatagatctgctaataatgtcgctcacttgttggcagagtacttggtttgaggaaatgcctttgcctattatgcctattgtattttaacttatggtttaaatatattagcatatttgactcaaaaaaatatattgatcaagatcaataaccaataacgattaataattttcaaacttttacaatgttttttttttgtatgattttactcagattcattaatacatattcagtatatttagaactataaagaaggaagaataaatcaatttcgtttctttgagaaaatataatttcatgactgaaggtgcatggaatgaagtacaaatgtatcgagtgcggcaaacaaatctttaattttttttattattattatatttaaatttttattatttttttttaaaaaaaaaaaaactaaatcacttgaaccaatcataaactggcacacttatttgacacttaaagtattgatagtaagattgagtataaaattacatttaattagaggtcattcttactattttttgttaattaaggttatgggtgtcgctccatgttcttccatttctttcttttttcttttcttcagaattattctttgaattctttgttctttaattcgtgatttcactccatttaatatttaaatcgaaataatagacaaaaaagaaagactttcgtcgaaattcctagataacactagtagtccaaataagatatatttttagtttttatatatacttagttaatatataaaattacatatatatatatacatgtttttccctataacgtaaaccaactattcgtttaattttaaattataaggacttttattacaaatatttcaataatttaagtaaaaaaaaattaattttcaaaagactcttatttagtaacaaattgcaaaaaaaattaattgataattattagtaatttaattttaaatataatttattttaattaagattttataaagaaataaagtattatgttactatcaggttacaagttattaatttattaattttattttaatttttaaattaatcacaatcatttaatagtgatttaatgactaaaaataaatataactataatagttacatatttgatgtaaccattgaaacctcattcatatatttatataggatatgtctattgtaagcaacttagttttgtccttatgatagggatatttttatagccatagatatttaatttaaaggtgataaattaatgagtttatataagtgtttaatattcagaatatatcaaatcatttataaatttattttttaataatatttttaaatataataataattctttaaatagattattattatattttaatattctccaattaattaatctatttatttagcatctttctctctctcttactcctattatttggtctttcattgaactctcaattctaaaattcatagtgaccatgcaaagcttagattggaggacctacgatttttccatccacctaccgcactgcttcgactattgttaccttctgcaccgctcttgaggttcatagttcatcgattggtttggtgcttgagatggctcaacacttagatgagaacatggtttgaaccattgtccaactgaataaggtttcaaatattctttccttaagctaaattcaacagcactagcgtaaagagtgataaattcttctgccaactccaatgatgaatcaaattcatgaccaaccatgtcatcccttgtggatcaataaacattccaaatctaacaaatttgattctacaatcatccacatcatccaccgcctgcgtacaatcatcaatttttgattcttgtagaagcacactagtttgttattggttcgccattcaaatttttaggacttaaattagatacaaaatctttttttttttttttttttagcctaatggtattttacaatcatataatagcttaataatttaagattttgagttcaaacccatgacctctcctttttcccatccctccctcaccactaaactagtcttagtggctttagacacaacatcttttatatcatatcgttcgccacttatctattactgttagagattttattacaatggaagaaaatcaaaatattacaactctattgtaatacaatacaaggaccaacaaagagattaaataaat

SEQ ID NO: 43016 - DNA, 2609 bp, Cannabis sativa
ttctttcattggtatcagagccatggctaccggtcgaccagaagctccagaaaatctgcaaccaaatgaagctccaccagctgcactaccaaacaacaatttgcttccgttgaatctaagactcgatcgatcaaactacacgctatggagatccttagttcttgcagcagttcgtgcctacgatcttgatggacatctgcttggaacaattccccaacctcagcgaaatatggcaggtaatgctcctaatcctgcattcaatcagtggattcgtctggatcaatttctcatgcactggttaatgaattcgatttctgaaacaattcttgctcatgtgataaactgtcaaacttcggctgagatatggacgatcttgaatcaactttttgcaacaagatccagggccaaattgctccagatccgtgggttacttcaatccacaaagaaaggatcgctttcgatcgatgagtatttcttgaagatgaaacagtatgccgatgccttagctgctgcagatcaacctctcgaatgaagatttgattctttacatactcggtggtctcggatccgagtatgaggctgtaattgtgaatctcacttctcgaaccgacaatccaacacttcaagaagtacaatttatgttgcactctcaagaaatgcgaataaaccagttagctgccgattctttaacaaatattcaggccaactatgccaacaccaccacaaattctcacaaccgtggtggataccaagggaacacaggacgaggatatcgtggtcaaaggggcggcagaggatatcaaggcaatagaggaggcagatgaaacaaacccatatgtcaattatgtggcagagcaggccacactgggttaaaatgttaccatagattcgatataacattcactggacctccccaaactcaaggcacaccctcctcttctacaactcgctctgaatcaccacaggctctattatctgaatcagcagctcaattcgacaattctggttcttggttcttggacagtgaagcaactcatcatatcacaaacacaccagaaaatctgaacacatctgctaactataaaggcaaagctaaagttgtagttggtaatggctctaaccttcccataaataaaattggcacctcttcaattcctacactttttcctcatcactctttattattaaaagatatcttgcatgtccctagtttaaccaaaaatctgctcagtatttctcaattcactaagcataacaatgtcaccattgagtttgatgatgtttgctgtcttatcaaggacaagacaacgaagcaagcacttcttcgaggtaccctcactgatggcctttaccaacttcaagcccccacacacaagtctcaccattccaactcagaaaagtcacaaaatgctacagcaactcccactgttttcaacttcactacatctagcaaccctgataagtccaagacagcatccatttggctctgtcgattaggacacccatcaagtagaattctagctaaagttctttccaaggtgtctccacacaccaaatgtaatcatgtacccttttgtgatgcttgccaagttgacaaattacaccagttttcattcaaacaaactgaaaataaaattaaaatgccttttgaactcattttttctgatgtatggggccccttattctatccatctaatgatggctacaaatattacctcagctttgtggatgatttcacaagatatgtttggctttttcccatgaaaaataaatctgaagcaacctctatttttcaacatttcaatgcctatgtcgaaagagtttttcaaaaacaaatcaaaagtgtgcaaatcgacttaggcaaagaatatgaacccctttacaaattgttcaccacactaggcattgttagaagaaactcttgccctcacacacatcaacaacaaggtagtgtggagagaaaacatagacacgttgttgacattggtctcaccctccttgcacaagccaatatgcccctccaattttggtgcgaagcctacacctcagctgcctacttgataaataggctacctgtcacaaacttgagttaccaaacaccatatgaacggctatctaaccaattaccagattacaatctcttaaaggtgtttgggtgctcttgttttcccttgcttaaaccatatgaaaaccagacaatactgaaaataacgaacttaactaatcttgatattagttggtatattgagtagttagttaaagtgtccagctgtacaattatgttattgtacaattctgttattcttttcagttgtaaggtccttgaccatatctcttgtatataaataccaaaggtctttctcaactcagttgagttgagctttccatatttccattgttcactctctctcaccttcatctttcttgctcattgcttctggtttagttcttggctttctgtgttctttcaggtaatttgatttatagttttggaaaatgttataaagtgccaaatactacagatatatagtatatggtataatattttaatgtcagtttccacatatttttatttaattaattttataaccgttaaccaccttaaccac

SEQ ID NO: 43017 - DNA, 5234 bp, Cannabis sativa
  modified_base (4777)..(4778): a, c, t, g, unknown or other
gaaaacatctattttaatagtggtgtcttaaaatagtgtttgcaactccattgatgctagtttgcttatatgatcacctcaaatagaacaaacaataaaaattgatagcaatacattttcattataaatcaagtatctcatcaatggactttacatttgcaagaaggtattcatttctttccatcaaatctattagtaaacatgtactacaatgaaattcacagccacgagcactcgacactcatattcgtaatgacatcaaaattatatatccaacgaaacaatgaattaatagcgggcaatggaaaaaagcctaactaatatgtgatacataagctaaagatataatatgtgaagtttggggcagtcaccattacttaaacatttagctaccaaagcaaaagaatacctaaaactcattggggtgttacaccctcaagaatggaagggaacttcctaggacaaggttaagcaatggcatacttgagtgtctcggattcattaggtcgccacatggatttctggacacaaagtaaaccttcattctccttcgagtaggtcaatcgaacctcccactgcatggactttgccatgctctccaactcgttaatgatctcaacagtgtcgcgtacaataaactttccttcaggtctcaggatccgatcaacttctgcaagtacacctactatactgcacctgtaacattaatacgagagttagaaaacatactaaaatgtttcaccagttggaaaatgggaataagaatgttgactgacctcgatttaagcttagagaatagatggtcagcatggagaagatcataggtcctgggataagtactgaatgactcgcaccaatcatggtacataccaaatagacctctctcataaattataggtagcgtatctggagagtctattgtgaccacattcataacccaaatgttcaaatccttcaaagcagcagcaaatctggtaacacatagatgtcagaactaaatttacgttggcaaaagcataaatttgcaatgcatcagatgaaaacccattgaaatcacttcataatttaaaaaaactaatgctatttacaacacttaacccactgacacaatttcgcttaccctccatagacagctctcatgtccatgacatttctaacagttgaccaatcaattcccattccgttgagatatgacttgctgactacacgtgtccagtgcttatagtctgcagagaaatcttcaggagcggcttttccataaactccaacctgggagctcgacaaccagtaaggtggtttgtccaaccttgcaggccattgctcaggccacttagctccacgctcagatgaatcagttggcactttgtgcatgcatgcttccagtggaacatacctatgggaaataaacagaccaggataatagtcagcacgatcagaaacactgttgtcaagaaagtcttggggaagattcagggatttcaattgtctaacttttgttccgacaaaagcaaagagtttctatccttaaatgaagaaaactcagatgaaacaattttttcatacttgaaacacttttcttgtatttaaaaatttatataataaaagcactaccaagctgcatttggatcatcggtgacaggacaggttggaggctcatttttcattcgttgctcataacattcattggaagtaggcttcttgtatatagctacacccacaccattcactgtgtctttgttaattgaaaccacttcccagcacatcgcttttgtcaatttcttcatggctgcaaatagtggacatacaatacttaaattattataagaaagcactaagcaaacaaaacatgaacatcaagaatatgaaatcaatttgtataccttcccatatttcaacatcttcaggcagcttctgataaattggggttgcagaccacacgaagaaaccaccaggtcgcaataaacgattcaactctaaaagaagcttaccaccttcacatagaatttgtagtcaggtcaaaatcttaaaagcagcaaaaaaaaaaaaagaaaaaaaagaagtatggcactgccaaggatgtaataaaataagtataccaagctgaactgcctgaacctgaactctaaacatgatttctccataaaatagtacaatttttaccttctatgtgccatggaaccctgcagcgggcacagtgtacaatatcaaagactcgtcctggaaagggaagccgctttgtacccatcacagcagatattgcaggaattcccctttcaagtgcaaactgaacttgagcttcatgttcgtcttttggggcaagggacatggtgagtacatctctgtcaaagagaaagcccccaaaacttgcaacaccacatccaacatccaaaacaacacgggaacgttttccccaagcaatgtcgggcacagtctgcatgagaaagaaattttataacaaagctaatttagtcagagaacagtaagaagaacattccatatttgtttcttcaaggtgagaacccaggttattccaaaatagaattgtatccattagaatccagaggtggatgtgtttctcttaatcattaattactagaacatgtcaatatttctaaacaaagaaaattaattaagcaatatgaataaagagtgattcaccaccaggaaagtagccatagtcagttacctcctgtataaaatcaatgtaatgaagagcaccatgcttgaactgtgttccaccaccaggaaaagtaagatattcaccagtaactttcacccaattctgatgtcctttaatttgtgcaagcttagtatggggaacattggagtaccatatctgaagcaacggacattacaaatttatcgttgatacagaaatttagaaaaagacaaatcaaaaacattcacagatattctcaattaaaatcagggaaaagacaatgtcaaagacgagattgcatagtaactagagtaccttttccctgctcttaggccactgaattgtgcgtttatatccttctggaagaggaacaaggcatgtgggggcctcttcaggacagtgtctctcccgatgttcgtaatgcttggtacttggaagactcctaatagcttgcaaattatcaaggcatggaataaaatcagatccagccgttgaattacacagtttccaagtataaacagttttctgatttgaagtaagttgagtctccttttcattctttgactctgcagcctgagttttccaagcaccgttttcagtagaagtttcattcaaaagttcagattgagccccagaagggaacacctcatttgaaccctggtttttggactgatcattttctttattctcaccagagttaccatcggtatccttgttatcattttgatccactttctcctctatcttctcttcatcctttgtttcctctgtattctcttgtttcttttcctcatcatctgaatcggatttcttctggttctcatctgaattagacttattatcattctctccatcttctgaattggactctgtattttccctcttggaatcaccttcttccgtctgattacctccatcttcaggcttttcttcaattttctcctcttgcttctcttcaggtttctcctcagaattctcttcgggtttcccttcaggcttttcctcttcctgattactattattattaccacttccattgccatctccctttgtcgcatcctccgtcaaatcacctgggttatcttcaaactgcttagtattgccatcattgctcacgttgctctcactcacttgctccggcacttcaaccctactctgttccttaacatcattcctattctcctcagaaacatccgcattctgaacaggaaccaccgacgaagatgtcatcatccaaactccaaccaaacataatgccacgaacaccacaatcgtcaccgtcgagcaatagcccgaagacgacctcctgttgtctactctagtatactttcctaacgccatacttcaaaatgacactcctaatcccaaacaactgaaattcaaacaaaaagtaaatcgattaaaaccaccaattcttaatcgtacagatccatcaaaattctcaagatctgtcactagtaccacagcaacaacaatagtatctaactacaaaaacaaaatctaccaaacaagcttatcaaaatgccatgaaaacagaaaacgataagcgaaaattgaaatcaaaccgatggtaatcagaaaatgcaagcaatgctaacgaagaggtcgaaaatgagaaatcaagcaagatctgtaagagaaaaaaaaaaaaaaaaaccaagatctgataaccaaggttacctggttgtggagtgagaaaatgaatgagatctgaaaaaccagctgatgagagctatactctccacattatgtgaagagagagagggaaagagacgaaaatgatgggagtttgagttgattgcaagagaaactgagtgagagttaagggagatttattagatgcacctccactatcctcactcgcggaattttctcgattgcttactcttaatttttattttaataattattcctcaaaataaattgttaattaggatttttttgttaaaaaattttaaatattaaattatggtaaagtttaaggagcataatttactaccagagaattagtaaaattacatgaaatttgacaaatgtgcttaaattcaataattttaatatcattttatttagggtaattgtctccttttgctctaagtttttttttttttttgattnnagcgtttatatattacaacatgttgagctagccccaagtggttaattttttatgagtccaagtaaaattttatttaaaaaaaaaatattaatagtaataataaaaaaaaaaaaattatgcatatttaccgagatttgttactttttttttcttttttaaataaatgcaaatatatatacgtatcacatatattaatttgaataattttccaaaaattctagtggaatgtaattattattttaattatgataataagattaaattaaaaataaatttacaagttatataattaaatttaaaatttacaacacaaaataataatgtaagtctaataataatttattactacacaagataagtttttctctaagtctaaaaaggtctaagtttatttctcttaaaaaaaaaattaatattgcagagcaatcgagagtattgctattaggtaccagtagt

SEQ ID NO: 43018 - DNA, 1647 bp, Cannabis sativa
  modified_base (1379)..(1381): a, c, t, g, unknown or other
tctctctctctctctctcctagtactaaccatcaaatctagtaatctaaatttcttttatttattgttattgttgttcctttttttcacaggtggatttgcttaagaacaagttcggatttgatgaagctttcaactataaagaagagcccgatttggatgcagctctcaaaaggtaaacaccgtcaagaaagactcactcagatcagatatcatacataaatatctaatatattgtcttgtctgctgagatgaacaatatataccaacaaaaactgaaagacacaaaacaactaagtaaaagtaaatcaccattcacaaggcagcaatggcgtttgtcaaataaactatagagagcacaagttgattatacactctcttctcaagtcttatataatgcacgtcaaatacaacaaactaatgattccgacatctgagtgtaattggttgatagtaataataataatgtaatgtaatgttgggttgtgtgtgcaggtatttccctcaaggcatagacatttactttgaaaacgttgggggaaagatgctggacgctgtgctgctgaacctgagagtccatgctcgaatagcagcatgtggaatgatctcgcagtacaaccttgagcatccagaaggggtacataacttgatgcagctgattgtgaagcgagctaagattacaggtttcgtggtgggtgagtactatcacctctaccagaagtttcttgacatggttgttcctggcatcaaagaaggaaagatagtgtacctcgaagacatagctgaaggccttgatagcgcccctgaagctctggtgggactcttctccggccgcaatgtgggaaagcaagttgtcaccatttctcatgattaaaatgcatcataacttctcgtctttactttggttggttaaactctaataatagcattcatgataaaacccattcacgttgcagtctagtaatgtgaaagagtttcaaatatttagaaatcagtccccatactttccattctatgagtttaacttttgtatgaaaaagcgttgtgtgggagtggtatatgtattgcttattctgcactgcatgatttaaacttttcttgtgtcaaacatgtaacaagaagatgattgacttgttctcttttcaactgggtactagtacagtactattactctatacttaacaaaccctcatcaacatgtccctcaaacatagtctatatatatagcaagaggggtcattgtgttcacttcaagcaaaatagcattccatatgctacttagttacataataaatgacatgtataaaactagtcactaattaataaatatacgtgtaaaatagactctttgaatattgttttttatattataaattattnnnaattttttaaaattttatagaatatgttaaataattataaagtatatgaatatgaaaaaaaaaaaaattagatgaatactgaaacaagtagagagttcataattacactctttttaagaagattagaatcactcattagaattttacacaaaaaaaaatattattgtaaaaaaaagttgtcacattttatttcaagtaatcttcatattttcagtcattatcataatattactattcccataaaataacacttgcataccaaacgg

SEQ ID NO: 43019 - DNA, 13351 bp, Cannabis sativa
atacatacatatatatatatagatatatatatagagagagagcccatatttctgatagatttatctaatggtttccggagcctgttggcatgtggtgatgctgctttcacaagcaaataccagctcattctcattattacaatcatcattgccaatgacccacctaaggatttttcttctctgaactatttctcaagccctcaaacacttaaactacttccactactagatctatcaaaactttggtgtcattgttattgttagtaccaatccttaattgtcagctacctaagcaagtaagtcttagttatctctctctcctctctctctctgcaaaaactataacttttatttctctctttagttctgccagaaaaacttaaaagaactcttatctataggagtttgttgtacatgtgggaggcaaaaagaaaaagcaaaaggggtaatgaatagtttttctctgatctcagtgtgtatcttaaaaaatgattcttttcttgtttatgttggtttctgttgtgatactcaatttttgttttgtccctaactagaagagtgaagttttgttttttttttttctttcttttttgagaattttttttcaagaaaattaacccaacagagttggtaaaagtaggcaaataaacctatctggttcctattcttaattcaaactttgaactgcttttcttgactaaaaattcctaactgtaaagcattaaaagtcaatcgttacagctcaaatatgtttgattctcttctaattctcttttgtttaatgttctaaaactattgcagatgtgacaaaagatttctgaaccaactactgttctgtttatatctttgggctgaaacatttgatttgagtcttgtgatcatttttttctgaagagaaaatgaaaacaagactagacttttacttaattttctcagccattttgttggttggaacaatctctacaagtgtcacagcatatatagaagaagataaacaagctttgcttgatttccttggcaatatttctcattctcattctcttaattggtacaagaacactactgtatgcaaccattggattggagtcatttgcagcagtgatcagaccagagttacagaactccatctccctggagttgggttccgtggtactttcccatctaacactctaagccgcctttcagggcttcaagtattgagtctcagactcaataagttttcaggttcttttccatctgatttctccaaacttggaaacttaacatccctttaccttcaatccaataatttctatggctctttgcctttagacttttcaccttggaagaatctttcagtccttaatctttcagacaatggttttaatgggagtattccatcttcagttaccaacttgactcatctcacagctttgaatctttccaacaactctttttctggtcagattcctgatattaatattcctagtttagaagagttggatttatccaataataatctcacaggtattgttccaaggtctcttagaagatttccaagttgggcatttttgggtaataatatttcatcagaaaatgccactcctccttctctaccagctgagccaccaactaatgctcatcaccaaccaccaatgaagatgaagaaactaagtcaacctgcacttctggctattgtaattgggagttgtgttcttgtgtttgcaatggtggctatgatgatgctcctttgtcgatccaacggtggagatcgaaaaagttcagttgttgctaaaccaaataagaaagaaagctcatcaaagaaagctgtgtcactctctgagagccaagacaagacaaataggctctttttctttgaagggtatagttttgcatttgatttagaggatttattgagagcatctgctgaagttcttggtaaaggaacttttgggacaacttataaggcagccttggaagacacaaccactttggttgtgaaaaggttgaaggaagtaaccgtggctagacgagaattcgagcagcagatggagattgtggggaagataaggcatgataatgtagctcctttaagagcatattactactcaaaagatgagaaactcattgtgtttgattactatgaacaagggagtgtctctgctatgttgcatagtaagttgaaaacaatttttgtcttcaattgtttgaacatttatgtaaaaagatagttgatttaatgagtgttatttctcttatttcaggtagaagaggagagggtcaaggaaggattccagtagattgggaaacaagactaagaatagctattggtacagcaagaggaatagctcatatccacacacaaaatggtggaaaacttgttcatggtaacttaaaagcctcaaatgtcttcctcaactcacaaggatatggttatgtctgtgatactggtttagcaacactaatgaacccaatgccaccaccaacagcgcggtcatatggttaccgagcaccagaagtaactgacacccgaaaatcaactccagcatcagatgtgtatggtcttggagttttgctacttgagcttctgacaggaaagtctccagttcatgctactggtactgaggaggtagttcacttggtgagatgggtgaattcggtggtgagagaggaatggacagctgaagtttttgatgtggaacttttgaggtatccaaacatagaggaggaaatggttgagatgttgcaactgggaatgagctgtgtgacaagaatgcctgaaaggagaccaagaataagtgatgttgtgaggagtttagaggaaattagacaagttaacagtggaaacaggccatcttctgatattaaatcagaagtttcttctactccaatgccaactccagatgctatagttagtcattcataataataagatcatctatcagtgattcatttcattctatagtgttacatattttttcacttattaaaattcatttcttattgctcaaaatggttttgattgagattattactgaatgttataatagcagtaactttagaatctattgtattacaaattctggcctttgaattgaaatgttgtggagtaacacaattttattttcttgtactttataaatacaaaataatattcgagtttgattggccattgtctctcaattcacaatttttattattgaaattaaacgacatttatctgtgaaaaacgacaccaccaaacttgaacggtgctaaataagtggcacattttaaactttcattaagaaaaaacaacaaaattgacgttaatcattcaacagaaaaaaatggcactagttattattattaatgaaaagcttttaactcattttttataaagaaataatttattttattaattgttattaataagagagctttaatttcttttcattaatgaagtaaattatcaataataataattatttacttttcatatcaattgttcatattggaggataattatatattataaatgctgtgttttttttttttcttttgacgaaaatgcattttatattaaataagcattcataatacaaaagcatttaacgggagaggcattttctccgaccaggaacaaatagagtccaccgaaagagcatatttggctagcaaatgagctaccgaattagcagatctgtatacatgagagatttgtactccagggaagttggacactaggttcgtaatgtctgataaaagacaatgaaaatcaaaaactgaggcagaaggtgattgcaaacctttggccactataagagagtcagtctcaatatagtgtacattcagacgattgtctattaaccattgcaacccatacatcaaggctaaagcttccatcacctcaggccgaaaagagcctataacgggcttggaaaaagctgcaacgatgtcaccagcagagttgcgaagaactgctccacagcttgttatttgagttcctttgttgacagcagcgtcagtgtttaatttaagtctacccgtaggaggattcagccaagaagcttcatgtttgtgttgtatattgttgagagatacagcagcagttgctgcattgttcgatttctgggctgcttggaagtcttcaaaataggatagagcacagtataatatagcatatcatgtggtttagtactgctgccatatttttccttatttctctcattccaaatgtgccaaagaattgttgtgaattgttcaatttgaaagtctgaccatattttcgaaacatgaagcaataattctttgagggacatatgctcagaaatcaattggggaagagagaaagtagagtccttccagatcttctttggtcgattacagaagaacaaagcatgttaagttgtctcacttgcattttgacagagagggcacataggagaatcaaaaatgtgtctatggtgaagagttgaagtagtagggagacattcatttatagcacgccataagaagattctaactttagaaggcagagataaggaccaaaactttttccaccatttttgagtttgaatactcgatacagcaggttgttgttcctcaaggcttgttgctaatgtataacttgatttaacagtgtatgcaccattagtttcatagtgccaaataagtttgtcagcaactggaaagatagacaaaggtatctgaagtattttgtcaacatctgaagcaagaaaagtggcatttaataactccaaattccattgtcttgctagtgggataagtgaagacactttctggtttatgttaatcccattcgatcttaaaggttgaaagttggagataccagggagccaaggatcagatgcacacaagatggaaagttgggaacagcccttccttgaatagagccattaattaggaaggaaaatgtgacacttttgatgcatcttccaatgagatcaactactgaagaatcaaaacccaaagataacatcatttgctgaatgaaaatgccattccactcgatcgaaggctttgctcatgtccaatttaagggcgacataaccttcctttcccctttttaagtgcttaagagaatgtaaaagctcaaaggcaataagaatattatctgtgattaaccttgacttgagaaaagcactttgggattcagaaattatatcaccaagaatcggttgtaaacgaagaacaataaccttggagaccaatttataaagcacattgcaaagacttatgggacgcagctgagtcattaaagttggctttttcacctttggtatcaaagtaatgactgtttgattgaagctagaaggatcgcccccatcgtcgagaattttaaggattgttttagtaacaagctcaccaacaatatcccaatagttggtgtaaaacatgacggacataccatcaatgccagaattgccatcagtttgcatggatgatagagcatcgtaaacttcagatgccgtataaggtcgagtaagtatctagtttatatcagctgttatgagacatgggacagctgacataacctgctgtaatgcatcagagtcgacaccttcagacatgaatagggagtgaaaataagtctgaacaacattagcaataccatcaattgtagtgtgttccatgccttggtcatcagttatcattcggatggtgttattggtccttctacttgaagctttctggtaaaagaagcgggtgtttgagtcacctgattgcagccaagaaatccttgatctctgtttccaatattcttcttcttgaaacagcaactcatcaagaatagactcacttgatttaagctcttcaaaatggttgttgcttgtgtcatgtttattgttaagtgctgcaactttttcttgagaaatcttgatttttttaggcagttctccgaacttagaacgatgccaatgctgaagttgagtagaacaattggaaatattgagctgaacttggctcacgggatcagtagcagaactttgccaatattgagtgatgatgtcaagacattgttcctctttcagccataatttttcgaactggaagtgagacttaaacttctgaataggtgcagcagcaggtgtagatatggtgactcgtagtgctctatgatcagagccaaaaaaatccaaatgatcaattgtaggggttatgaaactgtcagactaggaatggttaataaaaccatagtctagcctttctttgacatttgaactttgagcatgcttgttgtgccaagtgaatctatcacccgtgaattccatttcatgtaatccgcagcagtcaatggcatttctgaaagcatcaatttgatgttcataacgcgaagggccaccaagcttatcatgattagataaaatttcattaaaatctcccatgacaagccaaggaaacaaaggagcaatatcttttagtttgttcaaaacttcccaagtgaaatgtctttgagaagcacaaggagctccataaaaacgagaaaagtgacaagatggaccatcaacaaaacccatgtaacagtcaacaaagtttttaccataattgagaatagatacatttacattggacttccaaaggaataaaagacctccactaagacctactctaggaatttcaataccattaggaaactttaaagcatttctaaatttagtaatagaccctaatttaagcttagattccacaataaaaataatatcaggacaacactgagaaacgagcaaacgcagttgacggaatgctctcggattgctcaagccccgagcattccatgagacgatattcatggcgattggcgaggctgggatacagccttcgccaaggaaacaacacatccttcatccacccgtgagttgttagaacattcaaaagatgggtcaggttgttggtgcagattgagattggtagtgtcagcaagaggagagcctttggtacgacacctcttcaacacattacaaacattcccccctgaagtggttagttgtcgtttggtaaataaagaggacaaccgattctcggataccataagagaatctgatgcagaagttgagatagtagtggtagtggacattagagggggggttattttctgtagacatgtgaatgtatgctggtggaattatcattggaatgggcactaattttttcatatgtggagttgtaagtgggggatatgtggcaacagggggcgaagttggtgatagagaaatattaggagataatgtgctggtaatggtggggctaatagtatcattcagaggagggttcagggttgtgggcttggctgcagtggtgataatgttgcccatgttcattaacttatctacttttatttctttagaacccgatgaagatgcttgatccttgaaagagaagccttttggagactgagaagagagacagttgagttggagcgagtgtaaattcttgttgttagactcaatgattttagtggaatccaagatttgctttcctttctcagaattggtaatattggtagggacagcaggcaattgtcttgagtgcgaaaagattgaattgattgtgtttcgagcaaggcgagtgataaacggccaaggaccctctttagaaaagtcttgcctgtaccgattgtaactagaccttggaaggggagatccttccatccaaggaccatagggcagatttggttcaattccttcatccaatttttctaaaaacagagggcatttgtcaaagacatgtccaattattccacattcatagcgaaaattcggcaattcttcatagcgataatcgatccaaagttcatcagccatccaaggaaaagtaacaaattgaccacgcagtaaaggtttcgagacatcgatttcgacacacattcgaagaaatggcccccaaccttcattgagagagtcgtcatagacttcaagaaaggtaccgatcatgttgccaagaatctttgcaagggcttcagatttactaaggaaaggcaatcgaaacacttgaatccaaaatggagtgatggtgtaagtttccatagaagcattttgaaggacacttggtaggcataagatcatatgttggttatgaaaatgccaaggctcctttgccggaattctcttaagatcaccttcacatctgaatgaaatagtgaaggagtctgttaaagcatcgtaatctgaaatggtaacagaaaaacatctcacccattgcttggctatgaaatttttaaatagcttggggttgtatccctttttggagaagatcctacagattagaagattaacagcaggccttggggaaggaatattcaaattagaaagcttaatgacttccctttctcagatcgacagagcatcagacatattaggaatgaaattatccatgaatggatgagaaagaagaaagatacgccacggatggaaagaacgtacaggaaacaaagcaaggaaggaaccaaggaaccagagaaaaattaaaaaagaggctggtgggaacggttataatcgaacattgagggaggaaaatacaaaaaggagcagttaaaatgaaattaacagaccaactgccacagagcaaattgaagggcagacaatgctctaacaaaaataaatgattcaaattgtatttcattataaatgtagtgttgaatatagcatttgtttatttattttttatttttttaaatttagcattctttcgccaaattaatataactaaactacttaaaaaaatttgaaaactttcaccaagtcaatacaactaaactatttggaagcaatattctcgacaaaagtttgagctagcccgctggccctggccttctctaggcatagatgcgacttggtcgtagttgtgttttgttattgtaatttgatttttgttactgtgattttagtcttatttgtgtgatatagttttattttgttttgttgctaatttttctttatttttcgatgacttgctattaaatcgctattagagcatgtttggtttgaaagaataaggattttaatggaatcattattacaattatactgtttgctttaacttttaaagctttgtcatgacattacattgtaatttccatttcactatatattacaatctccattacataataaaaccaatgtaatggtgattacattgttaaaaaagacctattttgctcttcttttttatatttatttaactttaaatattaaaaataataaaattaaatatattttttatcaatatacttcatactttattcaattacaataatcattacaatattaaaccaaacattataatatcatttccattacaattcttattctattacattaccattatcattcccattgcattatatcaaagcaaacatcaccttagtggttgagaataacaagttcgactaaaagagttgttagtagtgcagttacataccttgcacaataattgagtgttcacgctacgagattgaaaaaatttgatgcaacaatttatactatgtgtcttctgagcaatagatgaaactgaatataaatgttcctaagatcaactgtaatgttacaatctttttcacttttagtttttttgccaaacgatctaaagattatgcgattaattatttggctcatttttctaattctaatcctgatcgtgtctctaacaaaaatatcccgattaaattgcaggctactattttagctgattgctattaataaaattacataatttattaaaaaaatggacactaaatcaaatcccctttcaaaaaaaaaaaaaaccttgttaaatgacataaaataaattatctttttacttttataaattcaattacactaaacacaacatgtgtaatattactggaacacaacatttattttaatgccaaattaaacacatattttaaaatatttaattagagataggatttataagaagagacaaataaaaagcataacttgcacagaaaaagaatcgatatttgcaataatcaggcaatcccacacgaattctacaaaacactcttagcatcaagtataagtaaatttattttttcacaattctggttttcacacctcctgaaaaataaaaaataaacaaaaacttgtaagaacctaaaacctgcaagatagatgattgtagagctaaaatctgtgtcaaaattttacaacataccttcaacttcctcaaattgaatttctttcacaaattcagcacctgcatgatactcaaaactggcaaaaagacgagaaaatttgtactcagccgaaacaaaacaacagaagcaaaaacaatcgacatgctgattaaaaaaagactttattaagatactataaacataagcaaaaacaacaaaaggggtcataataaaagtagatgtactccgtttaactatggaagttgcaacacatatacaataaaaaattggcaagcatgtcaaaactgtaaggtcttaatttaaaactttaatgaagaaagacagtatctactatctataaacaatagattgcaggattaagagtatttaaagaatctcagtgaaattgaaaagcttcccatagtgttgttatttggactgattgatccacatttgccccaagaccaatatctatcgactcactataatgtaaaatgatttttttttaactaggattgcagcctaatcctacaatattttgggaaactaacaattaatatgtaggcagctaggacagactaactcacagccagaccatttgagatacccacttggttattataacacttctaaacacagttaatcatttaattataaacaaacagtcaatgcctatatttttcatctaagaagcatcttcttttcttacctgttagagaaagctacctcaagttcgtagttagaaacattcttagcagattcagctaatacagtaacaatctcagtcttccgagtactagccatgagcaaatcatattctgcaggaacaataatagcgaaaaaattatcacttagttcactcaagcacatcttttcaacagcagcaatggctattctccgttttagggtattcgtctccgggtcaaccatatatatggccaagtcagtaatcaacaaaatcctccttttcatcttcccactaccagtaaacttcaaaactttatcagcaaaaagaacttgattgtcacctacaatacaagatgaaatgcagtatatttgagagatatggctacaccaaagttaaacaatctctgtaaaccaaatacagacatttacacaacaaggattgaactttgaatcaccaactgcggaaatatgtaacacaaaataatcatatgcaaattaaatatcagaaaatctatttgtttgttaccctatgttttgaaattgtatacatttgttactctacactcaaatttgatcaatttgacaaactactctcaattatatggaattaattaattctttgaacttttgacacatataattgaagatagtctgaagatattaattctttgattaaatttgggtttaggataccaagaatgtatgattattgttttatcaagaaattatattcatataaactaaaaagatactaaagattttgaggttattcaatttgatatgagcaaactcaagctctgcatttctacactttagaatcatgccatactcaagaaaattcatatcatggacacaagttagaaccattattcgttcaaaatcactagagaatgaggaaattaagacaaaaattaatggcagaatttaaggctttaatgaatggtgtaaaaaaatcaacgcatgataccatgtttctgtaagagtttcaacaaatatgaatgcgaagggatgtcgatgtagtctcctctgtactctctgtggaaagaagtttttcttcgaaccttgacgcccatgaagggttcctgatcttcggagacattgctcccggagggtctcaatctccttcctcccccactgttttcgttgtctagggtttcgtcgtcgtcaaaattgggagattggggatcgtcgatttggacccggcgctgcgacttgagtcgatccattgtttgctattcgggtcggtccggatccgaatagagggagagaacgaaaggttgtcttgtcagttttaagttaagaggacgagtagaggtggaggtgagctatctaacttgcgcagggtgggtaatgcgcaccatgtgacagaaatccatccatgtatttttttttttttaaaaaaaaaaaaaacaaaagaataatattccattcaaagtcacaaaaccaaatgatcaaaacgatcaatacaaaattcaaaagctaaagatcatgggaaagattctggctccaaatataagccgtattcaaagaaaaaataatacgagcaagcgagtgggctaattcattacaagatcgcttgcaatgaaaaagaaaaatactagaaaaagaggacctcacatttttaatattctcaataatagcgttaaattcagtagaacgtgtttctttactcaatgtaacttacaccaagcaaaaacaatcagagaatatcatcatgcttgtataccttagacggcgacaaagaatcatctgttgcaacaaacctactgcctctgtcgcatgaggttcataggctactgccaccgtcatcgtctctaagagaaaacctcacttgaccgactcatcaccacattcccaagatcaatcttccattctttggcattaacaccaacatccacaaataagttgacattctccatgtaatatcctaaaattgagaaatagattagcaatttttattaggttaattaagaataaatgtgaaattatattattatataattaattgtatgatattatttgtgaatatttaaaatttaagactccatttatgtgttagaagtatttttgtaattttgacccgaaaaatggtaaaatagtaattttattatatattgtgctagtggactacattattatctagtatgtttactttgttgtgctagaggtgaatttcgacaagtcaaggcagtatagtcacaatcagatattttggttcaaaattattattatgtggttatggcaattattaacctcactttcagtgaattaaattaaagtgatttaagtataattaaaataataaatatgaataatataaagtaaagaaaatactagaattatagaggtttggtcccttgatgatggtaatagtctactcccatttagttgtattgacttgtgagtaaaggagcaagaaggtattaatctctctcgaaggctcttacaatgatctctgagttcttgcactcttaaacactactagaaaattgggttttagtgacacacattgagtaactctaaaagtgtatagtgacacttcaacgcgcgtcactaatgagggtg

SEQ ID NO: 43020 - DNA, 5877 bp, Cannabis sativa
tgaaactttcacaaattataagacaaaataattacaatgacacacaattacatacaaaacatgtttaaagtgatatcaaataactctttactcaagagttatcagctttgaatgctagaaaatcgatactccttttagagaggcatccctcttagaatcgtatatgattcttcttttcttttttctttttttttttacaatgtttcgttcactttgacaatttcggttgacaagtatagtgagtaaatcagacagacgtgtggagagtgatgagtaccacatgtaaagtgaaaacttaatagttcatcgataaggcaaatatgtgatcgcccgaatacatatgctttgttcggaggccaaccttgatttcctctttaatttagtacaatgtactaaaggcaaacttgccattgcaaggaacgctttctcatatagtggaacttcactttgaggaacatcatgaatatttaattattacaggttgtaaagcggaggctttacttaaatgtatcagcttacgagtgttgggggtatcgtcttataggccccgtatagatctgacgagcttctcgaaaaacactcgcttgtatccatttccaagcttcatcatgccatatgcgagtgccatgtttcagcaaccatcccaccacaactgaaaaatgacttggaacttcgggtagcccttgaaagtgtccttcaagagcagtcgaaagccacatggggatgctactgaagttctcatcaagtggacctctctacccgagtttgaagccacttgggaagactttaccactattaaggagcaattcgcaagcttccacccgtagcagtgatgtgttagtcttttaaaatataatgttttttatgttttaattctttgtacacttagcaattattttaataagtgggctgagttcttgtgtctcttgtggttgctagttggcattagtaatggtaactaatgcctataaataggagagggggttctcttgtaaggatagcttggaattagagcagagtactcttgtggaaagacgaatcctctcgaaaggttggaataggagagacgccggaagctagatcttgtaaccttgtcgctgatttcagaataaagatcatttaaggaatttcattactggttttgttgtggaaagtagctgatagcctgatagattatttcgtccgagtaaatgttaggatagggataggtcgagtgtattactcatggagagtactccaacgaagctttggattagagttcttgtatggatctacttaataatatactagagctttctgtctccaaagatagtagggtgtagaaaaataataatggtcaaatagtcttgtacatatttctccagttacggggcaaaagaaagttgaaaaatattttcctcgtacagtcacgcataatatattttttttgtggcagccttgttcatttatattaatggtatacactatataatatttatgatagaacaggaagcagaaatgtgtgcctcgccttattctgcaatttttcactaataaaaaaaaataaataatggtagttttgatgcagttctttgacataaacaacacataccgcctgacacttattacatgtaattaactgagtaaaggaattctattctacctttcctagcaatatattctttgaatgttcatttttcttaaaagaatcacgctgtatacgaaattatggcattagctatacccatagaatactaatatgtatcagttgcgcatgtaagcctgttgcttgtcatgatggtctgttctgtacttggcatttagaactaccaaatgattttgctcctctgctttctcgacaattgatgtgaaaggagtctatcatgtacacatctacaagctaggtttgtttgcacttgttcattacaaatttcaggactatctcacagaatgttgataatcatcgcaagccaacaagaaagagaaacgtgttatcagtatttaacttttccttctagctatgtgaatatcaagccttcaaatttctaaaggcttacatgtttccgactgtcaggcagtcattttgcagccacttggagacaaagggatagcaatagttggcggtgatacaattaggggtttcacgacctctgatcaggtgctcccttatttatttaccttttcatgtctgtctgtgacagtaatagtatctccattgttttgagtctactcatgttatcttcttttgtgggatttaaataaatttgttttaaacttggttggagtaatagttgttcttataaagacttctggttctcatttgtatcacatattttcaacttggctgaaaaacgaggaccgactaaactatggattcaagatgatactcggcctcatcaaaactcactattttcactcatatttctatattttttccaaccctatatttctactaggagcttcttcgtattcattttcttttatgacgtggtagtatattctatgtaccaccagacttgtattcccaagcataataataattatacttgctgtcagctactcaacaatcatgaactaataattgaaagtagttggaaaaatcacacaattcttgactggcatcgtttgtctgtctgtttgtccttatcaaaatgtcgtaaacatttatatggttacaggcgtggatatcattgattgcggagaaattggatgctactttggcaaaatgtttcgacaacgtggctttttctctgctagatcaagtttgaaagcaagcacagcaagtttagcgcagggcacttattatatcatatttaactatgtttataaaaggcatattatgttgtacagccttattatatgtaaatgctctatattaatctatcaaaaggtagcgtatgttattatttatcatttgtttatatcgatatgttactcggaatatactgtattatgtcaaacacatgtaaatttaatgcattttgtatatagcatgtgcagttatgatggaagaaaaacatactgcgtagattctgttggcagtttaaacataccatttgcattgtgatttgtattactttattctttcaatctcttaaatgcaaagtttgcacatgcatacataactacgctaatgaatatctaatagattgcatgtggatttcgtgattagtcccgataagatttaatacaattaggtcatataatccgaatgaataccgaccaaactataattttccctgtaacatgatgtttaacgctcccacctatttgtcattcggaactgcagatcttttaagtcaaattcgacaccaatgtatatcacatgattagtagcagaagatgcatggattggatagatttagtacccaaaacaatctccaaacacggtacgaaagagaagaataattcatttcatatcgttaaaaaatttacaactgtataagaatcctgtaatgagttcataaattcctatatatatatttatgtaaagaagaaaaaaatcagatagaagaacaaaaaattaaattgaaaaagaatggctttgtatgactgctgtgtgtttacataggtgcctgcctacctagctggaagcaccccttgctttgaatttgttagagaagaagagagagacctcaactcccaaggcaatgaacctgttgcagggtcagcaaagtaggccaaaacaaagtctcttaatccagtgtcccaaacttcacagaattgccgtttccaattgggtggttcaatggctgcggtgcctaagcccggtgctctatcctttgatcccttattttgttcctcttgccaatcaacaacataagtagccacccttcggtagaacttggctcgaaaggtatcccacacctggtatttgtagtggttaatcagggcaatgttttcaggtacattcaggtacctatacccctccttgagcctgaagtggtgcactacattgagaagagtcacgtccagcaattcagggcgcacaatagatttatgtctctcggggctttggagccggcaagtgtatcctacagtcacccctttcggtgggggagagctcaaccctgatggtccaaagctgtggcaagttgttcttatctcagcaattgaggtggatgaggagaagttggccacaagctctcccagcgaattctgacccggaaaaccaagtccctggggctgccgaaacgtgttagggaggtagaagaactcatccacatcaaaaaatccgacccagttgcattcttctcttgctttcaacgcacaatgtgagaatccagcttcctgtgttttaatccatggccagctttgtctactcacattgtatccttcaaggtcgagctcttgaactacttcttcaatcccatcatcactattgttgtcgtatatgaaccagccctcgattccaagccacgcatggtacataatccactccctcagagcaggagcttggttccacaccattgtacacacacaaagctcatgcttcttcttcttcttcttcttcaactcatttcttcttctgtttatctgtacacgggatttagaactgttaattctagcagcggaaggtaaagcattacggcgtggatatttctgattcctactggtataaccaatggttacacgaattcccttagccttttctggattaatttgaatactcctaggcaatgggcaccggacaacctcttgtgccgccgttatcgccggagttgtaagcacaaacccttcgtctgtttccccacgcttcaacccaaatcgacatcgtaactgagtcggatcggatttccgatggggcctgagattcaaccccttaacgaacacaacaaccgtatctctatccagaacagcctcataaactaccttgtcccatgaatgtactacccgcttaataggtgaggagggccaatactcgttcacagagtctccgcgtctcctcaaatccactgcagcggagtaattcgccggaggatgtggacatctcacaatcgatcggaactcatcgtagccgtcggtggacaacgccggtcgaacaacgagcccagctctgccgtcttcaaataactccctggaaccattggtggaggagatgtagtagacgcaatcgaccagggcaggctggcgaattctagcaccggccaccagtagaagcacatggtcagggaacaagattcgctcttccactctggaaacgcgttgttgtcttctggtgccaaaagaatcaaggatagagttgctggcggcggagtagaagagagtgaaggtcggggaggagctgagagcaggtcgaaacgacgtcggactgaggggaaaacggtcggaggacaagaagagaaggaagacaaagaaggagaggcatacgactagagatctcactgagcagaactttggctgaaggtaaggcttacctaaacgctttctcttccgccgttgctcggaatccataacaagtagtttttttactagtctgagcttaaaaaagcagaagagccaaaacggtatgatataatatatatatatatatataattgttgattattgggaggtggttgaaaggagtatgaaatggaaaatggaaacgtggtgcagatctggaaccgacaaagttggaaggtgtgtgagattattccgatatgcgtgagggagtggcgaatggggagagaggagagatataggacgcgttgtttggagccgtcaaatgagagagagagagagagagagagagagagagaaggaaggaaggaaggggaggctgcagccgttccgtgttaattagttttagtattagtagtagtctatagtgtggggtttattaaataaaggctttttccaactgagtccaacctaaaagagtaaagatgcttttaggatggggacatttggtgaggt

SEQ ID NO: 43021 - DNA, 12550 bp, Cannabis sativa
ttattccattccatttctattctattctattcctattcttaaattttcatttttcccaacgaaacgccaccttaatagctaagatggatggttaataaaatttgtaatctcctttaataaaaaatctattttatgtcaaatttagttagaaaaatatatttgtgatatgtttcgataaatattgattgaatattcattataattttatgttcttttacttaatttgcatctatatatacattgaaatataataagaaatttagaaatggtttaccaaatataacatttatcgattttttgttgccaaaatatactatatgggagacggtcttatatttgtaatataagaataagatattttgactaatgtacgaaaaatgtacaagtacaacaataacagagagacaagatggaaactcatttgtcattcgtttttcatggcatgttcatttttctttttttgcccaacttccacaagcaatgtcaagagagcctcgcacacctgagacgcatcagcctcagaagggtcatctgtcaacgacgagtaaaccatccagacatggtctagtttgcgttttggccttactacaatggaaccaggaacttctgcatcacggcatgtgacaagaccgtcgctcttctcaccatacctgatctgcagaagctgagcacaggcagccattgctgcaccaagaggtattacaacaggcagttttgttattgattggccagcagaaaggggagccatcataggtagctctgcatgcgcaacacgcgataatgttgctaaaacagcaggagatatggcagcttctgttcggaatgaaacaacagggagttcccttggcaagtggtgtttcttaagaaattctctacgtctctcgtatgttaggtcttcaagagcttgcaaatcacccttcatcatagacagatgacaacagcattagaacattagtatcactaaggagtcaaatagaaagcatttagcaacatgtctacttttatgtgttgcttaatttcaacacttccacacaaaattatattaacatatcttagcatatagaatttacgccttttcgcaaccccaggaaataatgaatgagccttatcttcgtctaaacattattcatcacattcaggcctctttccacaggtcaaattgtctttacttttgggtgtagttgaagtatttttcaagaaagcaaaggcaagaagcccacaaagacatctttagatggggtggtggcatagagaaggcaacaatatatgccccatagttgggatgaaaagcatgctgctatagatttgaatgatgaaaagaggacaagaactcacaataccttaattactttacagatcagaatctccataagttttcgtaaatttacgtaatcgccaagctgcccttctcgcaagatatctgaagcaattggactgccaccatatggactttgagctaatgcaaggccagcaactttatcttttaaatcaggccaatataatgacaaagcagcagccgcatctattcctcctttactatgtccaagaagcaaaacacgcttcccagaaccccaatagatttcctcaatgtactcctttatctccctagcatttttttcgactgaggcctaattaaactcacagaaactacagtttaatttccgtaacaatttgctactaactaaaaaaataagggtaaatacttttttgaaacctgtgttttggaaaagttaccgattggactatctattttgtttaatgacaaaataaacactatattttcaaaattgtaaaaataaaacattgaactcaattttcgacaatttttttaatataactaacaggagaacaattactagcacaaacagatatagaaaatgtaaccagttttattataacacctctagatcgaattattattaagttttactttgacaaaaaaatcagcttaagatcttatttatactattttggcaaatccagtcattttaacaacaaaatagaaggtttaattagtaacttttgcaaaacacagagtctaaaatgatatttaccaaaaaaataaaataataaagaaatcggttgcataagtgataaccaaaatacctcgctgtgaatcttggcaatatgacaagccagacccatctttgagaagctcatttttgtatttacaaaatacagtggtccatggttgctgaaaagacctgtaaattataaaaagcaatcaaatcaagatttgaaaacagttgtatatccaataaaacattttaactatctctagagttgttgtaaaaggaaaatagcatgactcgctaggcagccaaaagctctgccaattcaccagccacacaatttaagtaaggttttgtggttccaggcatagcatgactcactagtgtgtaaaaacataagaaaggtcataacttccacacaatgaaaatttggagccacttcaaacatggttcttggttttgatttattggagttagctagattaataattaaatttcaaggtcttaacaagatgcccagtaagaacaaacttccatacaataaattggagccactccaattgtattcattttaatttatcacagttgaattaaaacttgagtggtcaaatattcaaggtccaaacaagaagtgttatccaataactttaaagaaataattagttaactcattactgatattggaattcacaagtcaaactgtgactgccaagatcttaagtaaaaggctccactttataatatgtcgtaaaagaattctcaaataagatggtagtttccatttaacagttacgatatttaagctataaatcgaaacttggtataatattttgtctttaaaatacaataacatcaaacactacctggaaccaataagaattctcaaataagatggtagtttccatttaacagttacgatatttaagctataaatcgaaacttggcataatattttgtctttaaaatacaataacatcaaacactacctggaaccaataagtaaaccattgaatttggcaacctgtgaacgccatgcctgccaaagtgatatagttgaatcaacaacggacaattgttaattccgatgtaggtatgcaatatatgacatcaagcattacctgatactatcaagagtttctgtgaatctgtgtgtcccgtcttcaactggaggcatctccggatcacgttgcatccacccaatgtcatcagcggatccacagacagttcttcgaactcgattaatgaggctgaaagttaaatcatgcacattactgttgacatccaaaatgatacaggcatcaagatactcaagttagaaatgaaacattaaaaaatgtggtttagctttagtgaggttttaatgacgcttcccattagccagtctaagagagcaacatcaatgaccctatacttttttcctggaaagaagctcatttccttaaattcaaactgttagaatttatgttctcaaaaataccacaattgccctatgtcctaaaatggtttcccccgcttcgtggcctcgttgttctttccgatagtttatagtttgattttaatatcatgcattaatttataaaaggacaattccaaaatacaacaatatgtagcatgttgagcctcaatacccttgaaaaatggaaatgccactttgaccattttgatttgattgtacaagagagctagaaattcgagatgaatccccaactgaggagctagcttcagtattagatgattctgtatgtgttaaatgatacccacttgaagacgcaacatcactagagctagcctgagacccctgtgtttgcccagatgaaaacattaccaattcatgtgcttgtaagttggaatcttccacgtctctagatgaaggttctactgcaaatgtaaaataactcagaaaacagacatattggttcaaagtaaaaagtaatgaaatgaaaagagaaaaatttaattctaataaagaaatatagatcagatcaaataaggtctttatgcaggcataagatgtaatgcggtgttgtcatgaaatccagaaaattgcagatttggatatatcaacaagcttagggagacaacagttagccaatgtcttaaccttaatttaaataaaaccatttgttaaaataccactgaaggcctgaagggttcctttattttattaaatactgccagataaagagagcccaggtgtgtgtgttcatgtttgggacacctgagtttagacccctcctctcccaaacatgtacacacaacctgaatcttaacagagccctaatactctactcataggatatttaaccaaaccaattatttttttttttttttggatattccaggttagtaatgtacaaaatggataaaatacgcaatcacatatatgtttcagtttttgcagacaaaaaatataaaaatccagaaaagtcttccaaactcagggcaagatgagacgcaaaaacaaatgataagaaatacagcactagagaaaaaagctgaccagaatagtcattaaaacatccagttatgaatgatgttgtttgtgcaagataagatgcagcatcgtttagggatgggacagacgtaagaagctgagggataagcccatcgtttcctaaaccatcactctgagcctgagaattgataaaacaattcatgcaataaacataaatcccaattgttcatcatcaaataaataaattaattatgcaagatcataatgcaaatatctttattactttgctttctttatttatttttaaaaataagcatctttatactttattattctaatttgaaaatggccaggcttgtcaatctcagtaagaaactaaaaccaaagtagaaagacaaaaagtcatattacagtagagaaaataaaacaatcttatgaaatatatatataccgttaactgcgtggaagacgcactttgatttgggtttccagctcccattttagatttcaatttctgccgacaataataaaaacttatattagcattattctttcttcttctgtttcggcggtgcagcaatggagagaaaaaataaaaattgaacattgagcagagagtatgcttgtcaaataatttccatatcatatctctcagtaaattgctgtaatacattataactccgttcaacataactgttgatagaaaaggcattcccctctatgtcaatcatctttcttggtacttcaataatacactaattattctctaattacaactgaaaatagaaaagtcaatctattcaccttcattttatactcgtctctcttagtccgctgtagtagacgttggttttgagtctgcatatcatcacacgcttgtccaatagtctaaacaaaaaaaaaaaccttaaatgctgaaacaactccatcactaaagaacagcaagatcccaatcaacagaaaccaacaggacacaaacctcagtttcaggcttggaaacctcattcacttcattattgaaattcaatacatcagcaagtcccaacaaattgctgacatagcagtaaaataaaccgctataaagatcaattaccaaaaataaaataataataaacatgaaagtatgtttagttccaagcaacacagaaaattttaacacccccacgcatcttacaactctcatattaaatagaccacattagtcacaacaacagagctgcattaccacataatgttagttctagtatcctccaaatccaaagagctacctttatgatgaaaaaataaaggaaaatgttttccataaattttatacgagactttgttaggattatactacactcaagttatctatttttttaaaaaaaacaaatctgaatttattgattcaatccaaacatgagaaagaatccttggaattcatttttattccctcttaaaaatccaaggtccaaacaagaccttaagcagtacgttacttatgtgctcactctactagacattttctcgcataaaacaccatccaaaactcagtacttaaaacttagtaagattgtaacaagttgacaccaccattgaaaccgaagctactttaagaaaaatacaaactaaatgaaaggattgaatcattgaaatgcagttacgaatcaaaacttagtattcaaataacattatctctctatcccccatgcaaagggcaaaaacaaacctttcagaagcttccaatttccgccccctatccgcaatctcaggttccgaaagaggactacgaaaagccccatgaaagctcgattcagctccatctgaaagcaataatataaaatttccttatcaacaataaaactcaagaactatactcatggtggctctacaagtttgcagctatctgtatacgttcaaagcaatgagatcttgtaatagtaattcaatatactaaaatttctaaaaaagtaatggcaacaaatgtagaagcaaactaaacaaacaattatatattaaatgacccaataactatgtatatatctgtatgtatatatatatatatatatataatctcatggttagagaataggaaatttcagtcatacccatgttcgcgattgaaaccttagaaaaggcttcgactcacatcacatataaccaaaccctgcaaacgaaaccttagaaatcgattcaaaagcaagtttcagaaaccctgagtcgaagctattggtgattcctttctctgaggagggaggaggaaggaggaaggaggaagtaggaagaagagaagaagcggaaaacaagttggctggaactttggggaaggataaaaaaggtattttgggtataaaaaaaggcggtgcggtgttagggggttataaataaaataaataaataaaatagtatcaatttagatgagagggtgggtgggtagcctatataaggcctgggtgtgaatataagccctctattttaaacgctcccaattctttttccttcctttgttttttttctctctctctctatcccccgagtttctcattccttcctgtgttaatcgccacagcgccaagcacgaaccagattcattcaacggtcgtcttaaatctaaatcttcttgtggagaccccaaatcaaatatcactaaacccaagctcctcgctttcacggtggttcctgctctctttgcaatttcacttcgtaatttttgaatctttcattcctctttgtagtttctcacttgcccgttttcaaatccactcgcacttcttctctaaccaaatccataaagttcataccttactgtttcttttccgatctcctaatctctgaacccaaacgaaaccgaaaccctagatttcttttttatccaattaattgttgattttttttttaatatatattgccacaaataaatacgtactggacaatacatgatctgaatttaaattacaatacaaaatatttttcatacttttgatgggtttttctttagggctttgaaattttatatataactaaagatgagttttatattggttctgattttgaagagtgtatcttttacttctgattgaggtgaagctaattcttttgtatcacgattatgttggtatgattagagttgtcaatcacactgatatcaaggagaccggttgatatcaaggtaacaatgtcggaacaagtcttggaagggagccaaccggttgatctccagaagcacccttcgggaatagttccgaccctacagtgagtctcttttatgtaattatatgttcactcgatttgatacgcggttgttattgtaattttaagaaaagccaactacaattagtgctgcggatattgtgtaaatattgttctttcttgtattcgactttttgtaaatgtgggaaatggatgtgagaatggcttttttaatttatatttgtcaatctatgaatattctgccaaaataaaaggtaaatctatgaatggctttctctatgtataaaagaaagaaagatatgcttctgcttgcatacaatatgaattgtcgttgaaaatgagataggggtactactactagaactggatgatgatatttatgggcttttttattcttattttcgtggagtattgatcaattcctaattaatgctaagaatttcattcttcttgtaatttactattatagacttgggcaattgatataatgagatagaatcggtaaaaatttactttcatttggctatatatgcattcttggaaacaaaaatcagctctttaagctgcaactttgctgaagcatgttactgtatagactgcttgctgctctactttttcagtaattaggtagattgttgttcgtgctgtggtgggtgaattatcttttgaattatgaatacttttcgagattaacctggagtaagtttttagtttcatcatatttgtttgtggtctcaggaatattgtctccactgttaatttggattgcaagttggatcttaaggccattgctctccaagctagaaatgcagaatataatcctaaggtatgtgatattctcttttgcctcttgtacctacctttttcttttatttttctacgacctatttgtttcatgctatacaactgcattaataacatatagcttgctaggaatgagaattttctttgttgtatttcaagtcacatttttgcattatgaaagactcatttacgtgaggctttagagcttcaatttcatggtgttatttttctattaatgtttgaccagttacgatatgcatggttcagtacaactattcctaagtcccaacattatcagaagaaactttatttcttattgtcactttgtttatttgatttgttgtttccttgcagcgttttgctgcagttattatgagaataagagaaccaaaaacaacagcattgatatttgcatctgggaagatggtaagattcagaagagtaaaccgtctttgtagtcaatatgtcatccaaattgaaataaattgatttggcttcgtattatgtttttgtgacaatacttttgcttcatcttttcaagttatgcttcctttttccttttctacttttcgctattctcgtaaagcatatctatctatgaggccatatggtgaagatattttttttctttccagtatttggtatattattttttcttcttccaatatttggtaattatatgaatatatatttcattttacttgcttgcttatttgataattatatagtatagtatatactaatatatattatatgaatatatattagtatgtatcttacttgcttgcttatttgttgtggtgttgtatagtataggtgtgtactggggccaaaagtgaacatcaatcaaaacttgcagcaagaaaggtacttttcatttcttccaaaattgagtcttttcttaatctatatgctggctatttttggatatccagttgtctagtaggggtcaattggtgtttcgacagatctgatgatttcactattaaaaaatttgggactaaaaagaaaaataagtaaaacgaagaagacgaataaggaggaagtgtcttatgatttacacatctgatgtggctgtaagcttgttatttttcaagaagtgatccattatttatttcatttttggcctaatttaactatttttgagataatttaaagatctaatactattaaaaatactttcaaacactgtcctaaattctaaaagcaattgaaatgaaaaggcctaattaattaaggtccaaaaggccaaagagagtgaacgtcaagtctctcaagcatatgaaagcttaagcccacaagctttttcaactgcttcttctcaaggtgtgccacgtcaaccacttttgaaaaccttgcctgagatgatgttgctaaatgatgcacattaaggttatgtttggtaggaagaaaggagaactagaaggatgaatgaggggagtgtgatggatgaagagggtagtaactcttttcctcgtattaaaagaagaggagatttaatacgagctgaaaagatgggcataaagtttaattaaatccaactcattattttattactgattataaaaaaatatatatttaattttttaaaggatatttgtgtaaatttttattcatttatatgttaagtatgtgcatatatatatgtatatcctcttccccccaaatttgcaagattaattttagaggttaggagggatacctaggttgatctatttctcctctccctcttatcttctttcctacaaacaaatgatttttgttccccctcatcctttgtgctcctacggtaccctctccatccctccaaaatcatggaaaacatagtgtaaccctgtattagaattggaatcttagaaacttagacaataacttcacgatatgactactggtcaagagccctaattcctattccatggatatatatgcttctgaattttgcattctgatgtgctttttctgttcagtatgctcgtatcattcagaaacttgggtttgcggcaaagtttaaggtattatctttatctttcctttgtttttattcttacttttaatttttgctggtttaattttgtagtttaggcctcatgttgatttatttccttttgtgcaggattttaaaatccaaaatatagtaggctcttgcgatgttaagtttcccattaggcttgaaggacttgcatattcacatggtgctttctcaagtgtaagcgtcatccgtatgtttatatctataacttagttgactgatgccttattaagtattgtacatatttggtatttgaaacttatagttacttagagctcatcttgtgaccaatttggaacaagtctggccaatgcgaagattttgaaagtattgttgatccataaagttttatgtgaatgttcttctattaatgatgagtttttttcactttttcagtatgaaccagaattatttccaggcttgatttaccggatgaagcaaccgaaaattgtgctacttatatttgtctctggaaaaattgttcttacaggagcaaaggtagacatgttatattactttcctttagaattcattgtctgtctagtctgtttctgctactgatcaacatcactatattgtttccttaactttccggcctactttaggtgagggaagagacctacactgcctttgagaacatttaccctgtcctgacagagttcaggaaaaaccagcaatgatgggattgtagaagactcaaccgtattgttcttgtattaaatttttggcatttgtgtttttagtcttatatagtatgaaaagtgcatccttacctatggcactccttgcaatgttcgacttctagaagtttttgtattcagttcttttggcagatagagcaaccaaagacaatttgcttgcaaaaggtttgcagtgaagcactgtcgctgtggcaactgctgcacctgggttgaattgtagatatgaaaatggttgttgtcaccgttgactgatttgcttaaccattagaccaaaaatttgctaatgggttatttggtgtaaaattgtgtgaacaacatctgccaagtccttgaaacagaaatggaaaatggaggaatgaaaaaacttacttttaaacttatggttgaccttcaacttctttcttacttagaaattttattattttttattctgtttgcattataaatacgagtgtattatgttcatttagcaatttcttgtggtaataatggtctataatactttggtcgtatatattttgtttccgatagttggtgtttgatgatttaggtgaaaattggaaaacctggcactttcactattcgatacccactaaaaactgtttcttaacaattttgagcagaaagttgtactagaatagaatggagaagggagaggattcttgaacgggtgatggactatctattgttgaattgctttgtttttgtttaaaattctttgacatagccaattagcacgctagtgcatctttttccgtattggggtgttaggaaagtggctggtaagcatttgttaggacaagaaaacacggagtgaatgtaatgaagaaaacgcattttacattgaataattttcagttgttccgctcagatttgacggatgaatacttaaaagtatttaatagctatttttatttatttatttatatttttatggatatcttttcagtatttttatttatattgttttaggaaacattattgttttcaatttgtgcaaacacatgatgtggcagcaattagggctgtttatataaggttccaaacttcaactaattcaagccaaattatttgagaccgtactaaatgaatctagtgtaaatgatttgatcaatcttgaacgttttaaattttttggttctgtcatagttttaataatttcggtagctgttcaaaccaaaccaattcgtataattattttataagtatttaatatattttttttttggacgaaatgttatattttgaaacaatttttggtagaatattgatattgattttatattgttatgataataattctttattattatttatgtattataaacttattaaaaataaacaaaattacttatgtgtc

SEQ ID NO: 43022 - DNA, 1022 bp, Cannabis sativa
ttttaattatttctaattgtaaacatgtactagtttttttaaacaatgttctattaacttataaatgatattggagtacaaaaacaaatataacatttttttattccaaattcaaccctacatttacattaaatttttttataacatttacaccttatgctaattatggtcattgacaaaatttgcattttactataatattatttcaaaaaccttaaaataacaaactaaataagatgtaaaatcttaaaaagaacaccaaactataatttttgtttcactttggctttccaaactttcccaagcaataataagttctccacaaacaaaactcaaaagcaaaagtggtactacatcaacaagaactaatcctttttttcataatctctaccgaaaatgaaattgtcattcggttagcattttgcaaagatgttagtgagtcttatccagacagaaactcaatccaaataactacagaacaattaacagaatcaagtcactaactcaaaattgaaggaattctaaaacaagcaactctttgcttgcttgatcatgctctaagaatgttaactagacttaatctttcactgaattactctctacctttaattctttttctttaggtaaaacatttcgagctatcaaggacgcagacaaaagagattagaggagaggcaagcctacatataacacaaagattgtggtgaagaacgaaataaggtacacaaaactacacctacaaaaccaagccagaaatagtgtaataaaacaataaatataactcgccacgaagacaagctacgtgcaagaactacaactcttcttcctaaaacattagaacatatctgaccgattaatgaaaaatatttactaaacaccggcttggtttggtctatatgtcaacaacatcatcttcaatcccccgttagagcctgcattaaagtgaaatacgcagaataagctttcgccagaataatacaagtatacaacaggctcacaaatcgtatgaaacagtcaaggag

SEQ ID NO: 43023 - DNA, 2105 bp, Cannabis sativa
gttagagttcacttatgtgatattattggtaaaggtcttagtgtgtttgatttcagtctctttgtttacaacaagtttattaagaccattgatgcttttgatgagattggaaatttgcaatctccatttcatcttgattatgttgttgatacaaatggttctggttttatcaatataagcattggtttggggcctagtaataattggtctaatgttcctaatgcctacttgaatggagttgagatttttgagattgagaagatttctagcctagttattcctttggaaagtccacataagaagaatcaaaatggtttggtagttggttcaggatcatgtgttggttttctgatcattatagggattttgatcatagctttgatggttttgaggagtagaaaagcaaagtctaaaagaaattctagtgagttcctttatggaggaatgagtttggctgatcatgatataccgaatgcttcgaacttacaacttagactgaagaaatcttttgctgaaatcaaacgcgccactgacaactttgatgaaaagaagttagttggagaaggtgggttcgggaaagtttacaaaggaactcttaaagaaaaagaagaacacattgaagttgctgtgaaacgaagccaacccgggcatggacaaggggtaacagagtttcatacagaggtattggtgttgtctgaactaagacatcgccatcttgtttccttaatcgggtattgtgatgaaaggaatgagatgattcttgtctatgagtacatggaaaatgggactttaagagatcatctttatgatatgaagggagaaaagaccaaattatcatgggagaaaagacttgaaatctgcttaggtgcagcccaaggtcttcactacttgcatactggttctgtcaaggaaatcactcatagagatgtgaagtcaacaaacatcttacttgataaaaacttcaatgctaaagtttctgattttggtctttctagatcaggagatccaaatcatgaagctgagggtttgaaaggtagctttggttatatggatcctgaatactttaggacttcacagtatacagtcaaatcagatgtttactcttttggagttgtacttcttgagatactttgtgctaaaccagccatattctctcaacccaaggaggaaaatgtaagcttggctaaatggggaatggagtattatagaaatgggcagctagagaaaatcattgatccttcattggcttctgaaatagacacagcttcattgagagttgttggggatatagctgagaagtgtttgaaggaaaatggttcagagaggcctacaatggatggtgtagtatgggccctgagatatgcattacagcttcatcaaattgcatcaagaagagagggttttgaagacacttttactaccaacagttcacttgaaactctattcccaagtgttcatcacatgcctactaatgcattccctgttgaaattgatgatgatgatgatgatgcttccatgtatggtgatatttattcaaacactttctccactcagttttctactactaatgagttgtaatcatttgcatatcagaatgtttttcttttctgtgtttaaagtcattagcttaaattttggtaatttgcctaatttgcagtaaaattctcttatgttttaattttatacaattaattctttgatttttttttttttttgtggcaatatcccttaaatttacttttatttgcaaattgagacgctagttaaattttactgttaaatatcaactaaattgtcactgtatatacatgtatataggtgatatgtttacattggttttaaaattttagtgtcatgtgtacataggtatttacaatgacagtccagttgatatttaatagtagaatttaacttacgcatcaaatttacaaacaaaataaatttatggaaattattgccacaaaaaaaattaaggtcgtttggtaatatttttttaatcagtttctgtttttaaaattagaaaagtaaaaatattttcaaaaatatgttctattaaactgttttcacttttcaagtttttaattaaaaattgaaaattttgaaaa

SEQ ID NO: 43024 - DNA, 7220 bp, Cannabis sativa
  modified_base (578)..(583): a, c, t, g, unknown or other
  modified_base (6192)..(6210): a, c, t, g, unknown or other
ctctctctctctctctctttcgatctctctttttctcatttgatgttggctgattttttagggttgcgctggtgcggtcaccatgggtggtggcgtgcgatgttggtggtgcattggtggtggtgaagtggtggtgaagtggtggtggtttaaacttgttgattttgggtttaaatggttgttcaaatcattgtatatatgtggtggtgtaagatgtagaatagtatggtggtggtggtggtggtgccatggttctaatttttttgttttaaaaaaattcttttacttcagttcataactgaagcgaaaaaccaattagcgtcggttcacttgtttttttgattcagttatgaaccgaagtaaaactttttttgcttcggttcataactgaagcaaaaaaatatttagcgtcggtttaaaattaaagcaaaaaaatcaatatttacatctacggcaataacgtcggttacacaaaccgaagcaaattgtttatgtgtcactttaaaatcgaagcaaaaggtcctttttgtagtagtgtgtcaaaggcttttctctttctcgctctctctctctctctnnnnnnctctctctctctctctatttcgaatccttctctctctctttctcttcaattttcgagcgtcatagtgaatgagtacatgtccacccatagcaggtcacatactcaatcatagtgtgtaagactgtgaagaatccaaatgcttaaaggagaatcgggctcagatcttaataatactctgtgatagaaaggaacaagggttagaaatctgagtggagggaaacgtttattttttttttgtaattgatgtaaggtttcttgaactttatatgtgtttaaattctattattttagaaattttatatttaggatgttaaacaatatacatggtagtaaatctagatcctagtaaaataattaccgacaactggtcttagagcaatggtaatgatttaccttcatgaaatatggacttaaaacaatatttgtgatgatttggatgtgttcatattggtttatgtgcttatttgataaatgtatattaattacgattttacgattaagaataattttagtttcatcctgaaagtattttttctagaaagtagatgaaattaatgaatttagacttttacaaaacttaatttggatttttattgaattagttatgattcttttgaaatttgaatgaaaatatctcaacctgttgcacacgtgcacgcgcggaagcttgggaggacctcggtcatgatcgagcttcaaatagctcgtgactgaggttactcggacaacgttttgtccgaagccgccccacgccgagctcccttggtcaagtagactgcagtgcaacctttctcacacacatccacccccttgcgcgcgcgcaaggagtatgcattgcatactccttgggccaaacttatttttgtgatattttgactttcaaaatcctttttcgatgaaaagaaattcaaattttggtagaatttaaatttttaaataaaatctaattatcagaataaagttaatttttattaatttttaattaatttaaattagttttagatattagtagcctttgaatttaaagttttgatttttccacaaactagcctttatgtcacagaatatgtgttacaacgtacttaatacacgttgacattgacctagtaaaagcggactaatcacagttgtgtgattttcaaatattaagcgcatttattttacgtgggatgtaatccaattccacgatttcaggggatgattgttgtaaaatattagtcaaaatttgtaattaactgacctcgtatataattataaataggagcaggttatactgaaaaatggacgaaaaaatgattagagaaaaaagccctggaactgtatcagaaatctaataaggttgacttgtggactctatgtagaattttaactgcaaaactacgtaaaaaacctttgtgttcttattttttctttactgcttttgttattgtgcaaatctaggatcaaatatagttaatgaatatccgtgttaacagttttagtgctttcattgagagccttcgtgaaaaaagctcagaaaaaccctccttatatacgtataaaaacaaactttctccatggctggcaacggagaaaacgtcgacactcctcatgaacaaaccactcaccatcctggaaaagagccaatgggctcccggaggcctcccaattcacgatctaaacggaccactcgttccaggagaactcaacctgatgttggcccaagtacgcggaccagtcgttctaggaggacccaacctgagggtggcccaagtacacagaccacacgatcaaggagaacccataatccgagaacaaggtatgaagaacctataatgaatattggtagagcccatcccaatccagttggtgaggatggcgcctacgatccaacaagatacacgccaatcgtcgagttagaaaattaccaactcatacgccgtttggaggaggcaaactggaagaatgctgagttggaacgtgaggcagccgctgccatggcggcataggagaataatactgaaaatcaacctaaccctggagtgagaagaccacgaggcagacctcgtggctcacgaaacaggaggcaggagacagctcaaaggaaccctcagaacgctcaagaagaacatcctggggaaactgagggtccccctgaaaacgagcaacctagggaaaccgaggttccccctgaaaatgaacagccaaatgattagccagaaccatctcatagaaatgagaatatgaggcgaccagaaacccgggaacaggatattccttgtggaaatgagggaaatcttgggacacaacctggaacacgtaggtcatcagcgaggaaccgctaaaggacaaacaacaactcatggcaaatgaccaatttgccttcacatacaccaaaaagcatgcataccacctaggggtattttggtcatttctacaacctcatatatttttgacattcccattgtctatctaagttgcctcgttactacactaaaaaaatactaaaatatgattctattggccaaactccgtgttccaatgttgtcgggcataaaatatgaaaaacataaaacttcatatataacatatataacacacctagaattcaaataaatttctataaattcataagtcataattagtaaactaatttcatattcaagcactaattatttgcaaattattatattaaaattaagcagtctttacacttaagtactatttggtgtccgtttataactgatatttaagatgtagggtgatcatttgtgtcgtttttgaaattaagttactctctaactgacacataaagtgacttttatagtaatggctcttcctctcataatgcctgactaaagcttggcataccatcatgttcagtgttatatatcttaattttacaaactccattggtttatagctattagttagtagaattattatcctgaaaggtattatgttagttaaaactctatgtaagacattgtagcaggttatgggtctaaaatcacttaccatttccaaacatatactcttaggagtaagagttaatgttttggagttcaacttctttagtaactatcctgaatgcaaaaaatccagatagcctccctcacctcatctcctataatttcctaattatattggatgaaatagctactaccatatccatctgttccaagagttctacaccttgggatttcgaacaaaactacaacgacatcttcttttgtgtatatttttttaagcttatactaacctaattcgttgagaggacaagaccttgttgcactatttcagagagaaccatcctccaattctccaattttgttcccaataggctcttgtagaattgcaaaaaaagcttctttaatctttggaattacccacccatatgcgtttaattataccttttattgtataaatttttgtttgtactcgcatacttttgataactgcatgaaatatatcagagtttacatcaccttctttgagccaatatatcttcgttttttgatgaaagaaccaaagataagttatgtgaactctttgtacgtatttcttccttgcctttatttccttatgctgctgttgatcaatcacattgatcacataattaagggggttttgttaagaattgcttgactctgtgatcattaagagaatgacatagaaagtaattatatatatactagatgagacaaaaatgtttttgggcttttaaccaaaatctcatattgattagaaatggaaacgaacatggaaatatatggaatggagaatatctgcaatttgtacgagaccatgtatataatccaaaaaagtcatgagggtttaggcctaatattatagacatcataccaatgtaaagatagtctacctatagattcaataagtggtatcaaagtctgagttcttaagtttggtatatcacaataaatgtaattttttgtaacagataaaatgtgttccctttttcacaacgtcaactgtttcatgaatactatttttcagttacattgaattttttcttgtgactaaaagacggtaactatagctaaaaatgtaaaatatgctgtgatgaacctaaaagcaaagcgataaggggttagactcaaattgaagacaatatagactaatgtagaaaaaggagctgtttctttacttaagaatcacttgtaagagtgtcagtacttgattttaaattattgatcataataggtgaatttattctcctttaactatatatatatatattaagataataaaaatcttacagtattaaattattggttacttatggggtgttttggacgatttaccaaaagtcgaaacattgaaccctttatcaatttcccagcttttaactagctagctgtgttagtatgattcaataatgcaccaagcaaaaatacttagtttttaactagataaaactaggttatatattattccaaagaatatttttatgcattatatttcgatgatcatgaagctagcaaagctaccgaaattccaagctatatagctagtcatatatagattctgcatgcactaaaaatatatgagagttgatcataggaatctaagacctattaacacaaaatgcttggtaacatggtcatgtctcgttttggaatctataaccaatgatatattccttccctaacaaaatgtcctgcgctaccttttgttatgattattattatttatttttattttttttattaaattgaggtaaaaaattcttaaaatttttcaatttgctaataatttactctgaaaagttacaatttttacgtcaaaaccctcgaaacccattttcttttagcatgtaataattttcatccattgtctaattacatgccaagtatgatttacataggctattgtttacatggacagcacaatttaattgactaacatataaaaataaaataaaatttataatgaaaaaattaaaattaaaattttaaataataaataaagaattattatacccgaaattcggctaccatttcaatagaagacacgtgtaaaattgaaaagaatatggcttaaggcgtgtaaccgtaattaatttttaaatggaataacttataaaatacagaagtgacagagtatatttacaacttgttgactataaggtcttatgcgagataaagatatacaaactattgcctcgtgcattaatgagaaaccatacgacattatatgagcaaggcgaggcatcatcctcgttacgcaaaagtggatgtaaacgagatataatgactgtgaggacatttagtgtataatagacagtatacaaactaagtataacagtcgggtaaacccaagcaactaatagtgaggcacccatcttgctataggaaggcacgctcgtggaactttcaccaataagttccagacgtcttttaatgatatttatagtcttgacaagaaagttctgttgagcagaggctgacattcaaatgatgttaactgttaaagtaccccttgtcactaagaattaattgcgaatgtcaaaatgaagcgttatatcttcaagcgaaggagcaacgaggtttacattatcaacctcagaaagacaggggaaaagttccagctcgctatcaaggtcattnnnnnnnnnnnnnnnnnnngacatcccagaacgttatgatttataacgtgtttaatacacgattgtcttaacccagtaaaagtggactaatcacagctgtgtggtattcaaatattaaccacatttattttacgtcatatgtaatcaaaccccacgatttcaggagataattgttgtaaagatatcagtcaactctataattaacggcatgattatgtaattataaatagagaaaagttagactgaaaaagggacgaaaaattcataagaggaaaagccctagagttgtatacgaaatctaataagattgactcgtggactatgcagaattttaactacaaaaccatgtaaaaaactttcgtgttcatactttttttttctttactgtttttatttttctgtgcaagtttatcacaatttaggctcaaatttagtaacaaaaatcggcgttaacagtttggtgctttcattgagagccttcgtgtaaaagctcagaaaaaaccctccttacatataaaaataatctccttcgaggttgacaacgcaaaaaaatgtcaacacacccatgaagaaactcatcaccgtcctggaaaagagcccatgggctctagaaggccttccaactcattgtctaaacgaaccactcgctccaggaggacccaacctaaaggtggcctcagcactcggacaactcattctaggaggacccaacctgaggttggtcccaatacacgaacgacacgttcaaggaggactcaacaagggaatggccaaaatccaagaatgagagatgaaagacttgttgggctttgtgccctaaataaaactttatttcaatataatcatttctattcaattatcaataaagaaacaaatttattctcattacttattcagtatgtttgggttaatgtgatcatttatatgtttatttgatttttaaattcatctaaatccttatcgcattgatattcttgtttattgtgtcgtcaacacagtggaaattaatcaagattaagtgattaaatg

SEQ ID NO: 43025 - DNA, 5069 bp, Cannabis sativa
atatatatccgccgcgaagcgcggatgtttagtagtttatacaacaaatttcttcgacacttttagagaaattattatttcttcaaaataataataaaaagaaaagactgtaaagtgataatcattttacatatataaatattatttgttattatcaatatcaattaaagttttgtataatattttttatattatcaaaagaaaaattataaaaaatatattaatttagtttaaaaattaaataataatgtatatatttatgatgatatcaatgaaaataatataagaaatttttttcattaaatctgaaatttaattttttttttttgtataatataatttaggatgttcatagtagcgcacgcaaattgcaggtagttttctagttgttaatatattacaatgcgacgcaggtggtgttacacagtagagggcttacaagtcaaaggaagccgcacccaataatataaagatctcctgtaatcagaactagattccccttattaactttattaattacatatacgaaagaaataaggcgtttgtggtgattgagacacatacacaccataagttgacaatatgccaatgatctagtctgattctaattattgtcaaatataggcgggacccttttactaaagaaataacaaaactacagctgaagtgtctcaaactacaaaggaaaaagagaaaagggccacttttgtttctcatttttattcttctctatgtttataggtaagagtaagtcctatcctatccatgcatatttcgaagagggaggagaatatgaaaaaattgtggtaaacgtcttttttctgtcatgaactaattggttgacatgcactatccaattttatattaacgtcttcctgtgtcatgctaactattttagatcatgtcactttctcatgattctgaagtttggaaaaaaaaataataattaaaacctagtacagtggtggagacataattagagttttaacaatgagactggtttgccaaatatatataagagaaaagggtattctatagtctagcaatgtgattcattccccacaccctttatacttcggaacaaagctgaacatgtatcttctcttcaatggaagattgacaataaagtatggagaagattctaatcaaactgttaatgtaagtttcgttcttttcttctgtctttcccccttatgatctaaggttcatcacgtagctttatccattttatacttcttcgcaccctcttccatttaaacaaggaaaaatatgataatttggttggagttgaccattttttgtgtttattatacacttattcacttctagtcaactatttagtaatgttgctctccatttcatctcattcatttcatttagttttcttttttccccgtctcgattttttttttttctttattttctttttgaccaaaaactaagatacggtaacaattgtgtttttggtttaatatcatctgcaacatgcatgccctattgtaagagctttttaaggatacttaagattttgtttatctttaaagattgccctgataatgatgtgtgaaaccatggattttaacttttatgctgtctgtgactaagtcatttagaagaattgagtttcctcttccaacaatttaatatgcaactgaaattcacaggtttcactattcctttcacctaaaagaaacgatcctctttaaagctttcaacactcaactttcttttttcttgcttccccggttcccttctttccccacatgacttcttatggtttagatagccacataatttgattgcttgaatcatgtgctctctttcatctaattgcagatataagctggggactgaaaccataacatttccttttgtctgaacgctatggcttcttgtacatcaaaatatgtaaggtttggccatctagatatcttatttttcttctttgatttatctaattttataagttgtagcgtatccactatagttagtaaattcaaactctgaaagttgtattctatttctcatattccaattgttatctgcgtttattttcattgagattgctacaatttcagatttcttgatgatcttgaattgccaaagttcaaactagacaaagaaggttatatattcaagcttacctccatgatggataggaaaattgcacccaagctcagatccaagaagcctgaaagcaacaaaacaggaagaactttgcgagtaaaagaactttcaagagtattttctgaggattatgaggtagtggagaagttggtattggatccacgaggcccggttgtgagcaaatggaacaaagttttcttagtagcatgtttggtctctctgtttgttgatcctttgttcttttacctgccaactgttaggaaaaattattgcattggtatatccttaccccttgaagcttctctcacagtcattaggtcactagtggatgcattctacatcgttcagatttccattcggtttagaacagcttatgttgctccttcctctagagtatttggtagaggagagcttgttattgacactagaaagattgcttcaaggtatcttcgcaaacatttttggctcgatcttgtggctgcactgcccgttccacaggtattcactttctctccaatagacttttatcacctgttttcttatagcaatctaaaacagagtaataacaataaagagaaaaataaggtgaatttagtgtagtaatgataaggaaatagccaattacttcaacttaacgtctgagcattaactagtagagaaatgtagaatacactttcgaaatactataacttcattcttttactcatatcaggtgataatttgggcagcactaccatatctgagaggttcaagaatgattaattcgagaaatattcttaggctcaccatcattttacagtatctcctgcgcctttatcttatttttccactttcatctgaaattgtcaaggccaccggccttgtgacagaaacagcatgggctggagcagcatataatcttatgctctacatgatggcaagccatgtaagtaaagcatcaatatttcttcctatctgatctcatgtgccaatattccacagccacaaacaggtttcgactttcaactttcagtgtgctgatgttctatgtttcaacaggttttggggtcctgttggtatctcttagcattagagcgccaagaacattgttggactcgtgtttgtaatcttgagtatccaatttgccgcaattggtattttgattgccgcatagcgaatcacaatgaaagagttgaatggttcaaggcaagcaatatctcaaggcattgtggctcaggtagtcaattatttgaatttggtatctatggcgaagctttaaaatttagagttttgtcattagacttcttcagcaagtatttctattgcctttggtggggactgaaaaatctaaggtaccaaaaccattgatgaataattcattttggcttactatatgttgttcattttttaacaattttgtccatctaaaatattgcagctctctaggccagaatcttcttacaagcactattgttgaagaaattacttttgccattatcgtagccattctaggattggttctcttctcattgctcatagggaatatgcaagtaagtctgagtacttggatatttgattcttacaaatccaaaccttttaaactataatcacaatataaaatcaaacttcacaggctataaattcaataacagtccatataaaatcaaagcatactagtcatagattcatttgcagttcatactaaatcaagctaaaagaatcataaattcatttgtagtacgtaaaaaatcaaacttaaaattatctgatatctaaacttgatatggaattcaatcaattttactttcctttattcatagacataccttcaatcgacaaccgtgagactggaagagtggaggatcaggagaaccgatacagagcaatggatgcgtcacaggcagctaccacacgagctaaagcagaatgttcggagatacgatcagtaccggtggatcgcaaccaggggagttgacgaagaagccattctcaaagaccttcccgtcgatctccggcgagatatcaagcgccacctctgtctcgatctagttcgacaagtaagtctctcccaattcctgtcaagttcatcgtaaatagcctaaattgatctgaatcttcaatcttctgcccttcaggttccgcttttcgatcaaatggacgagaagacgcttgacgcgatctgtgaaaggcttaaaccctcacttagtaccgccggaacttgcctggtccgagaaggcgatcctgtcaacgcaatgctcttcattatccgaggacatttggattcgtgcaccacaaacggtggccgtaccgggttcttcaactcgtgccggatcggtcccggcgagttctgcggcgaggagctactaacttgggcgcttgatcctcgtcccggcgtggtgctcccgtcgtctacacgtacggtcaaagccattgcgcaagtcgaggcctttgctctgatctccgatgatctgaaattcgtggcggctcaattccggcgactgcacagcaaacagatacggcaaacgttcaggttccactcccctcagtggcgaacatgggcggcttgcttcgtccaagcggcgtggtttcgttacaagagaaggaaggaagctttggagctgaagaggatggagagtttcatttcagcatcatcgtcgtcgccttcgtcggaggacagatccagatcggaggagagttccggctcgggaagcacaggaatggggttgggggttgcatataagggaaagctaggtggaagcgttagaagcgggagtaagaggttaggggctgagtttgatattctcagctcgttgaaaaagccagttgagccagattttacagatgaagatgatagaagaagaacttaaacagaattatttagcgccaaaatatatatataattactatagggcaattctaatgtaaagggtgtattctttctcatgctacagggactcatttgg

SEQ ID NO: 43026 - DNA, 5941 bp, Cannabis sativa
  modified_base (4653)..(4681): a, c, t, g, unknown or other
atatatagctatatatagatacagctatatatacattattatgaggtgagctatggctagaagaggcagtggtcagaaatggcatggttcttcttaataagtaaaaacaacagctcactatataaattctgaaacattccaatgaaggaattttactttaatgcaatattcaataaataataataataataataaattatgaaaatgatggctactaacttgttcctcttaccataaataataacccattttctctgtttcttttttttttttaattttctaataagcctatttcactcatatacaatgggatgatcacagccgttaaaacctattatagatcatcatttaatgtgacatactgcactaagtgtcacataactaatttaactgtcatattatgagtcctatgtatgaaaatgttactaaaagaattggtttgatcgatttcgagtcaacctagctaaagttactagttcttgattgagtgtcttgaagtgaatataaacaatttatgaccttatcatcatcacatgagattcgatcaacaaatgactcactttttatatctgaagctgtctctgttgagtatcctcggttttcgactactgcctcggtctcttcaagctcggctttcttccatttagaacatgttgcttctgcttgatttgcgaataagagtttcgacattggggaagagcaaatgtctttgtaagtttcataatccgcagcatgggtgttcctgccttctaaaagttcagcgagaggattcaaaaccgaaattggatcatcgttacttctctctaagttttgctttaagcttagaaacttggagacaaactcggttttagagaagtagacgaaaactgctgtttcgtctaaatggtagacggaagttacagaggttggaccgaatgcttttgtgatgcaacatctaatgtctttggccttgagtttggatggaaaaccccaaatcaacacaatattctcgaatgaaatgttggagaatcgccttttcgggttggattccaaagtttcggtgaccttattaccggttcttagatcaataatgtctgcattggtccagctgagatacaaatggttgatgtgcttttgaagtttttcattgtatgctaagttttcggttgaggaatggagtttaaaatcgatgcctatataactgcatgcttgagcaaagatgcatcctgtcataaaagcatcgtatccagcttcgtgcttgcctccagcattccagctcgaacacctgcaaacaaaaacgaaatctcaattgcataagggggaactacgatattcgggaaccatgaaactataacaactattggtacccacaaaggactcgaaacttaaactttgtgggaacaaagcatacctgaccattcaaaccgaaaagaaacagcaagcatttttacttttagcatcagttaattaaaggtttcacaaaagtttaataagaaatatggacacagactaactaatgtgtacattaaatgatagagtacgagcatgtgtgagagagaaacacaagaaattatatagtcattcatatatgtgtggatatggattgcaaatcaactttttcatatgggtatattggttcatttaattcttgctcaagtcaaatgatgaaaaattatcatgcccggttcattcggggagtaaagattcaaaaacctaacttgaacaatcttgagagctaaattggctaaaggaatgagtcataattattaaggagaaccataataattaagatatattatatatatttgtcaggctactattttaagaaagattttaacattttctagtgtaatgtttttccagtattttcttttgttttgttttctttaatgttggtctttctacctcctctccataaagagttaggcgtcccaacaaatgtgccggcgaacttgactaaaatcatatgtactatgaacttgttcattgtaaacaaaggaaagtaggaacaaaccttgaatcatcgacttgagcctccaccttaacataggaatcagatgctacagcactacttacactaagagcaatatgtgggcatatcatggtgaatgctgaggataacgatgtcttggacttcttcattcgttgttggagtataggatgagtattcagaagtattttggtgtcgataatgtgagggaagtacttatgaatagaagcaacaaagtcttcagcttccagcggaagaggaccgacaaatttgttgtggacatgtgcaatatctgtataacaaagaagataatttctcgggattaaaatatggtaatcgaatgaatttttataccaaacaaacaaaagagaaagttgtggtttatataatgtacccaagaagcaattgtgaccaacaatcaatttcttttctgaggaaagcaagtcaataacatggcgaaaacctattgcagcttggatcttcatctctgcttgtttccgatgctcatcctttacttctttctgcgaaaaattaagatacagaaacttccaattaataaggatggagatgtcataacatcactattttccttgttaattttattctccatgtgatcacatcaaatacatataccgacatcccttccttattagtatactttggatcttttcacttctagtaatcaatgatttcggttcaaatttttaagagaacaagatagtcgaaacttgaacccagtaaaacttacagaataaaaatctcaaactcgatctgtgtttgcctcttaaatttagtaatactttgattatagaatgccatgcaaacaactaggtgagccaaataatttcttaaacgagaaagagaatattgaaaagcttaccataagcaaatctctgtcgtgtttcgagtctgtatagactactagatgttgagattcgcaattttcacctttaacacgaatatatgaaagatcttcgaagttatttttaataacctgcatttttttcaaaaaccacataaaatgaattcacattcaatacaagcatgaatagctatgatttctcaaaaattacaatcctataggttaaagcaaagagtaacagttaaaacattaccagctgaatcaaccttagctgatgagaagtgaatccattcacactaatagctggacgcatcttaaagaaaatagtttgaaattgttgtttggaataactttgactcccttgagattgagattccccattttgaaactgtaatagccgatcacgccattcactaattttgttcttcattcggtcactgaacagaatgcttaccataccaactaccggcatgtctctaacttcttttgattcaccctcgtattccaaatcaaaacgtttctgtgcatctacttcttgtcttctggataaataagatattcctgagattacccaagggagttaattttctcaaagatagaactttgatgcattaggaaagaaatgaacttatatcagttataataaagtgatagcagcatcgatcgtagtaactattcaaaacgattataactcagagctcgaaaatcccaaccagggctaaggcttagaacaagaaattcaccttcatgtatgcaagcattgaaatcaaactggtacttagccaggaaatcaattgatgaagtctggaagagatattcataagaggaagaaccatcaatgttcagctcttgccttgggaaaatgtagaaattgaacctgataaaagaacaatcctattcagaaatatacatgaaaatggtacaaataagagagtaacaaaacataacagtaagccctaaatcaaaatctaccatagttatgagctttttcattctccacaaatactaaatattacactgaaccaaaacttttctctacaaacaaacatgaaaatcctttcattccttccattcaagaatctcagttaaaatccttttcttttctcaaaatgatgatattgagcaacaaaatgttcccaaactagattttctatacctttctagccctttttttctcatgaaacaaacacataaccaaaagaagaaaaaaaagaaagatcagtgatttcaaattaaatacactcagtgagctcaaaacttctaacatttaacttaaattccttcacttttccaacacacaattatatccaatatacatatacacatacataatagtaagccctaatcctaaatcaaactctagcataatgatgagctttttcattctccacaaatactaaacatcacactaaaccaaaactttctctacaaacaaacatgaaactaaaaaacatcaagtattttaatataagatcattcttttcattcaagaatctcaattaaaatcctattcttttctcgaaatgatgatattgagcaacaaaatgaatcatcaaacaaccgagaaaattgataaaccaaaaacttcggctcaaatttcttttctcttttttcctacaatatgcaacaaacacaatgttccaaaactagattttctatatctttccagccctttttttctccggaaacaaacacataacccaaagaagaaataaaaaaaatcaatgatttcaaattactcagtgatctcaaaacttttcttcactcttccaatacaatatacatacgtacacatacaatacacacacacacacacacacannnnnnnnnnnnnnnnnnnnnnnnnnnnnagagagagagagagagagtacgggtatgcaatgaaggactggttggaggaatcccaacggaaggggcaaacgccgaactgaacaacagcaaacttctcagcggagtccttgaccttaagataccttacatcggagcggtcgaactcgaaacactcacgccacggcgcgctagtaacgccggtcatttcaaggtcgatggcgacgaaatccgcggctcgaacatggctccgaagctcggctagagccggctcgaagttcgacttgattacctgcttcagaggaaacgccggcaccgacggcgcggtcgccgcggcggagctgaaggagtgtaccaacgcacgtgccagcgcggcacgtgccgaacgaagtctgtacattcttctctcaactgcaaaaaaaaaagtaaggcgcgcacaatttaggtatatatatatacccttgtaaatttacatatatacccccgttgtaattttgtgttgatatcccaaataattatttttagtgaaatttgtttaccatgtattttatagttatttaagatattatattgtaaaattttaataaatttaaatgtatacataattattttattttatacgcgttttgaatactgctttttatattgtaaagtattttgaatttctcaaaattttgtaagatatcttaaataattaaaacgtacacgaatataaaaaataactagactaaaattttcttccagatgccgaaacaggtaagtagagggtattagtgcatctattttaaagaggtgtattatagaatcactcaatacttaaagttttgatttttgtaaactgtactaataaaattagataaaaattacaatttttacacgactattcactcttattttgattattattatgcattaaacgtgattaacataattgagtaattatacattgaacataattaacataattaaattgacaaataaataaagagtttaatgaacttacatgtagaagaaaagagtgttccttaagatttagtgataaaagcttttgaaggttattagaaattttagagtcttaggtgtctttttataggctcacttagttagataatcatatcatatttttccatttcaaatttaaacctaatagatttaaattcaaatcgtaaatgttttaaattcaattacttattagataatcaattaaaaagataaatatttttatggagataaataattaattaaaataagagattttcattttatagtttttcttttttttt

SEQ ID NO: 43027 - DNA, 3088 bp, Cannabis sativa
attaattaaggaatgaactcattataattctaaccctataaaaatattaattgaaattaaactaatatagtaaattaatagatgaaaacaaatatctaaaacggagaatgtcgttgaaccgaaccactctcagacgactgctcttgaattcctcacagaagaaaacgttgatgtgagaatgagacaaacttcacatcacccggtgaaaatcgtcagcagtaacttcttagccaaacttattacgtttcttattttaattattgatcaatattaattcatagtattttagtaattaattaatagttatttttaattacccctattttagttatgatatacagtataaaaatatataaaaaaaaattaaaaattaaaaatatataaaaaaaaaattaaaactatttagatatgtggaaaatatgaaaagagtatattggtgcacactattttaggaagttgcaaccaatcttttatatgaagtaagtgacagcggcttctgtactagttttaaagtaattatcttcattattttactatattctattttatatcaatttttatattgcatcatactttaattactcaaaattatcctttacaccattaaaatactaaataaatttaaagcacagactattcagtataagtagaacaaattgtattgatttgaatacattatatatacatatataacttatgatttaagaaagtggaagctaatttgatcacatttagggccctaatcacatttagctaaaaataattttcgagcgaagaatctctattataaaatatgaggagtgagtgtatgttgaataaactgctagtaaaaataaaagagaaacgaaattattaaatgaaaaattttgggttgagtcgcggattaggtcgcaagcagtcggaatttgccgatcgtctacaggataaaacaatccaatcgtactgtatcgaaatctcactacactgtagagtagtgtcgaatacacccaaagaattttgataccgcatatggaatttacttatttatgaaaattgtattttttcgatatggaaaagatgtattcttcccaccgaatggattgaataatcataacaggaagaacgtgttttgaatcgtggggtgtagttgattggtttgaacgtgtctcatcaatgatactactaagtaatcagttccaattaaatatgtttctcaattaaataaaaaaaaatgattttattaaataatttttctgtaaaaataatagattgtcacagcacttgtgtgagtgctcacccattcgcacaaaactaggtactctagtctttaagacccaaatctaaatgacaaagttgcactttatatactcttgtaaataagggttcatattttatatgagactcttttcattttacacctagaacacatctatattttgttaaatcaaaattccaacagtgtgttatggaaacatataatattacacagaataaaataaattctttaattatttgatttagctgccttctaatttttgttgatctcatactttgttcaaacaaaacattagtacaaatcattatcgcgcgagaaagtcactaatttgataaaaagagaatcgatggccgagcaatagtctaaaaagattcctccttactgtttatgtatttttatttatttattttccttcaataacgggcaaagatctttaagggacaccttatgttaagtaattatagataattgaaaaaaaatcacaaaaacaattgtttgttttttaaaatatatgtatatttgccccactacaaatatgcatagttggttataataacaaatgagaaaccaaaagctagctacattctcagttctcagaatcaacaatttaaatgttagaactttgaagattgatggaatggaacttgctagctattattgatatatgctgttatatttggccagctaggctaacgtgcttataataattgcatcgactttcttatatatataatacacgaatatctccaagatctaattatacgagataatataaatctgtacttcatgttactattcgacactttggtgaattataattaacaatcgggatcacaatacacatatatcattacgatcaaactaattataatacgtgtctaggtagataatgttatttttcttatacgtggaagaaaaaatcgtgaaaaaggaatgatataaattttaaacaaagtcgaatatatacagcaaaagcaaagaaagcaaactgaaaacttgcatgagaacatgagtgaacgacagttgtacgtgccgtttcattgagagatggctcattttaggtaaatgtagggatttcaaggttggcaaaggttaaaagtctgattaaaggttgggcggtggaatgggtccacctataaatgaaccattacagcatcaacatccaatataacactgctacgtgggaaacccaccgcccatgtaccttatggtacgtcacgtgagccattctctgattagatgttgttttggattcagtaggaggggactcacttggcgaattatgaaatgctttacctgacaggttggaagcattgccaacggattaattttcttgctttccgatgctaattggctatggtcaacgccatggatgattgtgcttaaatgctacaggccccaactgttctcacaaaaataacctctcaaaaccacacataacatcaaacagaaactagaaaataatttaaattaaaaaaaaaataaaaattaatagtagttcggtcaaattttttaaaagtattttttaaaactcataaaataaaaaacataaaaatattattttcaactttcaaaaataatattttttttgtgtaacatttatatttttcgttttctttttcaaatactcgcatcttaaacttggacccagaactggatctcaaacatcaacctggacacagacctatatttcataccccaatttggaacctggactcagatcccaacctagacccgaactgtgatgaccgcattttaaaatatgagttagtaaaggcaattaacgttaattattaaaattatttttataattatttatgaatttatttaatt

SEQ ID NO: 43028 - DNA, 7248 bp, Cannabis sativa
ttctctttctttcttcttcttcttcttcttttttctcatttattttatattattttataacactataaaaatattaaaaatactgtaaatttgtattttataaatttatgaaataataccttttagatttaatgccatatttttgtaagactaagttttttttttttgagataattttgtaagactatgttaagagagctaaaattttataaaatgaataattatataatgaactatttttataatttttattaaaatattttacggtattttataaaaagaaatacaaaaataataagaaaattatataaattaatatgaaaataacatctaaacaacaacaaaaaataaatacaaataataaaaaaattaacaacaaattaataagagtggaacataaaaaatatatcaaaagacattattttctataaataaaattataaaatcgctgtatttttgtaattttttgtgttatttttgtataattgtgaaatccctcaagaaaaatacccgaacccttaataaagcccaatttattcactgggccagtggtccgttatataaataaagctctcccgattataacaaggaacgcctccaatgctgcttctggtagcttcttcttcctccttctactcctaaatcgcattgagaacactctactgttcagttccttccaggtccaatcatcgcagctattgcacactcaaactgatctgatacttcctctgttccgagctctctacttcaatcttcaacaatggcgaccgtgatgcagaagatcaaggatatcgaagatgaggtgtgttttcttattcaattgaaattttgaacccagagtgattagatgaaatcaaaatcaaaatttcaaaaatttatccatattatgttctcacagtaatgtgaactttttatttatttatttattttatctataggtttctaagtggtggtttacctttaattctttgtttctgtaaatttgttcatggggaaaagactactcttattattatttttttctagtttctattattgtatgtattggcttaaagcttctattagtctatgctgtttgtagtttgtaagtccatacgaaattattggaaagaaatagcttcacttgttttttctccaattctaagattgtatgatggtttgggcttttctagaatgatgggttttagataaataatgggcaaaagtttatgtctggttcgtgttgccatttagtgcctactctgtttcatactaaaagaaatgtatctataagttttcggtgctgaattttagctggatgtatttaactgagagagattctgatgatttgaaattttgagctaataatatataattcccttgtttatgcagatggcaaggactcaaaagaataaagcaactgctcatcacttgggtttgctcaaggtaatttttgtttttgttttgaactaaagagaacgtcaaagtttcttcttaatttcattttatttgatcagttgtatgtgttattctttcacttgtgttgatttttgtgaaaatttgttgtattgctttgtccaaatgagttactgtcctgtatgttgttgtccgttatttgataggctaaacttgccaagttaaggagagatctccttacacctacgacgaaaggagctggtggtgctggtgaaggatttgatgttaccaaaagtggagatgcaagagttggcttggtgggttttccatcagttgggaaatctactctattgaataaattaacagggaccttttcagaggtatgcaactctcttctcttgtttctctctgagtgcaactgcaaattaaattaagtctcaagtatattatcatgttcttgcatggaaataggtgctatagttatattttctagtttgaaattttggtaattgtttaaagatacaccatatttgatcaaaagtttattaataaaaaattaagaaatgttagttttagggtgcatacacgaaaaacaaaaagattgagaattagtttgcaaaataattaaataaaaggagggagatcaagctgtcaaacattgtaaaagttggggatgaagtaattatttttggtctatttttaccacactactcttttaaattttgaattttggttaggataattaataacaaaagcctcccttcgctaaacaaaacaatcattttctcaaatcttcacaagttttatatatgaaaactagatttgatttttgacttagggttttttcattgttttctgttttaatgttgactagaattgatgttctgtaaacattaagttaggggaagaatttttgctattttcaaaatacaagaatggatcaactaattttagccagacttagagaatattttgtttttagccctattggtaataatgtttcctgttttgtttagaaaaataagcatttcaggattaaatttatcaagttcccaaagttttatgctgagtttcatgaacacatttcctctctgacattaataataaatttaaaagaatctcaacttgaattttgttgaaattttaagcaggtagaacgtacacataaaaaataaataaataaataaaaaaggaagaaaaattaaagatgtgactgttctgttaagactaaactccaaatttggttattgtttaccggactttctaggaatctaataagttatttactgtgaaattaatttattattttcagtattctttgtatgttcatgtgtgttcagtctttgatgtatcttcaaagtttcatgatactttatgtttacaggttgcttcctatgaattcactaccttaacttgcatcccaggtgtgattgggtaccgaggtgctaaaattcaggtagtgggctttttgcatttttactcatttagtttagagccacttagctgttccggttttcttttcgtatattccctggaacttttagctgctatgaatgtgattaaagtatgttctagaatatgaaattaatttacttacatattaaaaagagcatagtaactaaaatgggctaacttatctacaaactgccagctgtgttgatgtaatttttgtaagtgccattgtgatttgtctggtagaaatgctaggatcaatgctttagtttcggactcacttcttttctttctttgtgtttcttttccttttattccctggaacttttagctgctgggattaaaatttgttctagaatatgaaattaatttattgtatgtattaaaaaagagcatagtaactgaaatgggctaacttaccaacaaactggtcgctgtgtttatgtatttttcttttaagtgccattgtggcttgtctggtggaatgctaggatcaatgctttaattttttactcgcttatttctttctttgtatagttctttgttctttttccaacattttatcatttaactcttgtgctttaatgggcagcttttggatcttccgggaattattgagggtgcaaaggatggaaagggtagaggaaggcaggtaaacatgatttttttttctccctacaatttgcttattggcaagaattgtttcacagcttatcattgtttctgtttttgttaatagtaatttgatgtctaatgttcagtttattggatattaatttgtttttattcatatggaactgatgctgaatgaataaggacattatatctaattcacttcacttgtataaaatggttgtttgtgtcgtgagactggtaatatttttgtaaattgtgatagaggtttaactgggaggcacaatcaaggatttttttcttcttctaaatgtattactttatacattagaatcaataaaaagtatgtgctggtcgagattcatcttccttcctgttttggtgcctttaattttttcattccgctacagtggaactggcaaaaaaaaaaagtatatggtgttggttgagtgtcaagagtcttgatttggtgcatatacatgtctactgagtggtctacaaatgttcattcatcattcatgaagtcacttattaattgatacacctctgtctattccaggttataagcactgctaggacttgcaattgcattttaattgttcttgatgcaataaagccaataactcataagcgcctgatagagaaagagcttgagggatttggcataaggtatgacttatctggttgatgctctttcccttgttgtgtttacatgtctggttattcttcttacaaaggaaatttattatgcagaagtactgtatgttaatcttttcttattgaagatttcataaataacttttcttaaacaatgtatgttttgattatttttgatgaccggaaagttttattttcagtgtatgtcattaaggttgagaattaaagtgaaaacaaaaagataatgttagatggatgtgggtaggaatggctacttgaagcaataggcattctcagtacaaaaaccatgtttttcggttgcaacttggctccttttatccatttgtcccttttcaataattttttttcctcaaacgatccttttttattttttgagagcaggttgaacaaagaaccacctaatctaacgttcagaaagaaagacaaaggtggaattaattttacctcaacagttactaacacacatctggaccttgatacagtgaaggcaatttgtagtgaatacaggattcacaatgctgatatcactcttaggtttgacgcaactgctgatgatctcatagacgtaattgagggaagtaggatatacatgccttgcatctatgttgtgaacaagatcgatcagattactcttgaagagttggaaattttggataaacttccacattattgtccaattaggtatggtatttcttttatctccaaagtgtcattttctctgtgaatttgtagtaaataattgttgcagggactgaattatacgattgacttatcttaaattctttaaacttctgttaaagatctattttgattttaattcagtgattagcttattctgttgaatactccacttacttgagttgatcttataagaaatctgcttatgccattcatagtcttcagaaatgggcagaaggttttctgttcttgagttgtctaaaatgtatcaatgattgtccctccttttgtgttttaacataaacctactatgtaaaaatgaaataactggaaatacttgaaaagaggaatgatcgcttgtatatttcaacgctattactgggcatattgacagtggtcggttcatttattatttagttaagggtggattgaataacaccatcttttatacttgttttcttgtagtaatagtattctgaataacaccatcttttgtatttgttttcttctagtagtagtattctgtttccactgcttgttttaacaaacaaagtaggaaaatgtttttttttatggtttatattgttggctcacatatggtagatttctaaccaaaatttttatcaatgttaattgtctaatatgtaatccactatgattattatgcagtgctcacttggagtggaacctcgatggtttgcttgataaagtatgggagtatcttaatttaactcgaatttacacaaaacctaaagggatgaatcctgattacgaagaccctgtaattctatcatccaagaggagaacagttgaggatttctgtgagcgaattcacaaggacatgcttaaacagtttaaatagtaagtagcctcacctataatcttcatggcctgattacatataattggcaattattctgtcaaacatgtgaatgctgaaaaggttgtttagaaagaatttaactgtgccatgatacggctgcatctaggacagttaacatgacaactattgtgataatactttattatggttttggcttatttgcattggttgtctaatccggctgtagcttgtttactttgtcgaatagctgtttattttcccctcttttttctttggcttcagaacaatcacttgtaaaactggtcacttcacacatggttttgctttgtgtgttttaacttattacttctaccttggtaactatggattttctcttcgtaagtgaggctccctaatttatttgggagaaggtcaggctgagacattttccccctttgcatctttttcaaaatgtgggtcactacacacctctataagtttctaatgtatttaggtgtagtagatattcttctcatctgacaactattttgaatttcagtttctcgttctgttcctcttcatgttgactctgtctattctatttctttaatttaatgttacattgcaagtgaaagttacctctgaccaatgttgttgcagtgctctggtttgggggtctagtgcgaaacacaagccccagagagttggcaaggtttgtaatatatcctcattctctatgctattttctctctccctcttccctatctgttctgttatcatgaatcattactttttatattctgtaaagtagtatcacatacttgaagcttttgaaaatggcaggagcacgagttggaagatgaagatgttgtccagatcataaaaaaggtgtgaaattggcaaatcagatgacctgtttgccttttcacattcatgatcagaaaccggttgcaagtgttgtcctaagaatagttaagatttgaaatatcagagcaggccgcactattcttactcatttttgttttttgttttcaattattcattctagttgaactaccacaatatggagactgcttgatatgtaaatttattagttttatggtcaagcaaatcttctagaaagtgtaaccattttgactgactgtatttgatgatgtaatgaagattgaatgaactacatggatgatgatgatgagctttccaaacacaactcggtagctagggattcaaattcggatgttattagccctcttattaaattttctgaatccttgcaaatcgtttcaagagtaatgtattatatattgaactgactaccagacattacaaattaatttttagttttcatatacagatttcttttgcttgatttacgaccttcaacaaattcagggatattcatcgttctatacaatcagaaaagaaattttcttttaatatccctataataacttccacatgtcagtagtatatgttacccatcacaaagtgtaacttattaccttactgttgtttaaaagcgtagctttaaacaattaaaatttgaaaggctgttcgagtctttcctcatggaatctgttaaacttaag

SEQ ID NO: 43029 - DNA, 4276 bp, Cannabis sativa
cctaattaccttaaaacaaagttaaatatttacatcctctattaggaatgcacacagggcagggagtgctcttctcgtccccatccccgttaaaaattttaattccatccttgcctcattctcgcttattccacatcaagaacaggatgggaatcccctactataaaatttaagtttatatatattaaaaattaaatatataaaaattattaaaatagataataattaaaatattacacactatttcttatttaatatattatttattactttaaacacaacttaaaaatttataaaaataatattaatatactaaaaaagtataaatgtaaactataaactataaaatattaaacaagtccccatcagggtggggagtgtcatgctcgtcccagccccatttaacatttcaggacaaaatatgatccccattcacgtgaaaaaaaatgtgcatccctataatcagggctgaccttaggataggctcccacacttttcggagggcaaaataaaaaataaaaaatttcattaaatttttatttaaacaaaattaagtgtattgtaaataataaatatttataacttagctcaaattctatgatacttcaccttagactcatatatctaacaatgaaaaaattatgcttttttttttcttttttttttttcaaagaaaaagtgtaaatgaaatttaagagggcataagggaaaaaataatacaatacaataaaatttggtgaataatcataatatacaaaaaatatagggtcatattcataaattcgtaaaattgatatcatcacaaaaccctagtttttaagtcattcatgtcaatatcaacttcttctaatcgagttagggttttcttcaggcgactaccactacaccttcaaaccacttcctccaaaccctagcgatcctctcagtatctgtcttctaccttccaaaacatggtaattctattccactacgctgttttgatcaactaatttagttctttctcaagatctttccttaaaaattcaatctttatctcgaaatcgatgtttttgtttgtacagatttttagactagttttgtttaatcgcagatccagaaccatagcattcttaaaaatatgattttgatttggaattttatgtgtctgaatgttggggttgtttttttactttgtatgttgatagtctatgtaaatgttcatctgaatttgtgggttttgaaacatgttttggtacacaaaatctaatttttgaatttgttcttaatttataattttcttttcttaagagtacattgaaaaataagaacttttctttgatgttgtaagaaatttctgttgtagctttgtgggggttgttaagtgtataattttagactgtttacaggtatgaatgaggttcttatagattgaataagtacaattttcacattatagatttttttgtttgtttgttaattttgttatgatatgttttttacaggcttcaaagaggaagaacagagagccaaaggaagagaatgtcactcttggcccagctgttagagaaggagagcatgtttttggtgtggctcacatttttgcttcattcaacgacactttcattgtaagtctacttcaattttcacttgatgtaattactgtcaatgattcttgctagtgattttcgtttttggtttgatttgatgcagcatgtgactgatctttccgggagagaaacccttgttcgtatcaccggtaaggaattgtttttcttctagtggtttgtatttgtactgttaaatttatttattgtgttgttttatcctatgtttaattttctcaatgatgaaacatgggcttatgttctgtttattttcatgatttctaagtaagtttgattcgatattagtttcaatgatttgaatttgttttcttggagatttttattcaaggaaagatgaaagatctttaagtattgttatatgtatgattttgtattgaagtgttcggttaattgcgacatgtttgtcactttcaatgtgaattgcatcatgtgtgaaacctattaatcaaaccttggcctttgtttgcaattactgtttggtaaggtttccataccaaattcagataaaagaaagtttccatacgaaaatatttacgatttgcaatacaggtggaatgaaggtgaaagccgacagagatgaatcttctccttatgctgctatgcttgctgctcaggatgttgcacagagatgcaaggtttggattggttgatcataacaatgtctatttactcatcttttgtgctctctttctaagttaccaagtgactcgacatagttcatgtttgtagctttctaagatattgtaataatgcaggagttgggtgtttccgcccttcacattaagctccgtgctactggtggtaacaaaaccaagacacctggtccaggtgcccagtctgcactccgagctcttgctcgttcaggaatgagaattggccgtattggtacggatcttcttactctcgattctcctcttaataatcataagccttaactttttcttaccgactaacatggtgatgtatttgtgtttcagaggatgtcactcccatcccaactgacagtacccgtagaaagggtggtagaagaggtagaaggctgtaagctttctatatttggtgcaagtcccattttcgaaaatggcaattgttgtgattcttcaatgggacaactaaggagagaccaccttgagttaagtaaggttgattggacttttccagttttgagccaatatgtagttttctcagttaagacttttgaagacattttaattttgagtttgtagaaagaaagagtgtgatatcatgaattattcagattcttcttctacttgttaagttgaatttcaggtgtttatggtacttgcactatgagttttgaatgaacttattatcctcaagccctattagtagtgtgtttttacaaagtagttttttcttttttggatttgttttacaatgaccactttgaactaatttcaactatagaaaaagatgagtattttgctagtttatcttttccagccttgaaatttcttggactttctttcaataaacataggaaaaatacccttaattgaaatagcattgttaataggcactagtattatcatgaggtgtcatcttctgattggtactaaacactctttctagcatttctttaattgagctataagtgagtacttgcatagaagtaatatttcaaagcttggttaaatatgattaacttggtttgtgggtctaggcatgaatttgatactaaccaactatgcttgtctatatctcatcaacaaagggcaaataacttgtacatcacttttaatggccaatagtttcaataaaaacagactaaaaagtctcaagaaaatgttcttagttgtttgcagtttgcagcgtcggccatgccatctacgatgagctaagtgcttttcttcatttttggaattaaggcttacccaaacccaacaccaagaaatgcatggtttgggtaccaacttcattttacaacatgaattggctccaaggaatacttagttcaattactaatatcatatttggtcttcaaacgcttcccaaataccatatttctcctccttgtacccgaacctcacaccaaggaatacttggttcgggtattgggtcataaatgcttcattttgttgctccatgcccgagctagacatctcattctttggctcgggtatggtttaaaccatattcctcaaaataagctccaacatacgttggattcaaccatgtaccaagtatattcaaacaatcatcttggtacctcgaaccctataccaagaaataccagactctggtacaacatgacttatgcgccatccattttagttcttttgtagctttcatgatggagccaaacttccttgacacatacttgagtatgctttacattgtggctcccatattggagcctaaatcttcttgacatgtggttcatacccgagctttattatacctctgcaagactcgggtacaccttttattatgatttcattctcaagtctcaatttatgtagaaaataaagttatttttacttgacatatgctcggaatctttatagcttttaaaagtctggttcgaatatcctataataatattgatgtcacgataattaaactgttttgaaaaagtaaatatatgattaatttcagtaataataaatacaattgcgtaatgatactactcaatactactaatacttttg

SEQ ID NO: 43030 - DNA, 5165 bp, Cannabis sativa
atattcttgtcaaatcacacaaagtgggattttctacaaaatcatttcgtaggagaaaataaccactgacccttttttcattttctttatcatgatcatcagaaaagtgggaaatgttttgaactttcatttgtatagaacaaaaccaagatttgtactactactattactactattcaggccactgtgactcttcttgttttcttttcaattttagtcagagaccacagttttaccaagtaaatatacacctgagctcagtttgagttttcttctcttggtggtgattatcagaaactaaacttgaatttctattgatggattctctgtctctcattttggtgattgaattgtctattaagacaggtatgtaaaacctgtctacctatttgagtcttctttatatgatgaaattggtttttgaagaacatgtagagaaaaactttttgtgtttggtagccaattaataattcatgttgtgaaaaaaatcttcttacaatgagtatggagaaaatatcatgcaatttgttgatcactgtacttattatggctacccttctggttgatgggtcagaggggcttaatgctgagggtgaataccttttagatataaaaagaagcctttttgatacatttaatcatctgggtaattggaatcctcatgattccacaccttgtggatgggaaggagtgacttgcagcaaagactattatgaagagccagttgtgctgtttcttgacttgagcctaatgaatctcactggtactctttctcctagcattggtggattggttaacctgactttgcttgatgtttctttaaatggcttgtctcagaatataccaaaggagattggaaactgttcatatctggaaactcttaatctgaataacaacaattttgaaggccaaatacccttagaaattggcaacctctctcatttgtcaatcttgaatctgtgcaacaacagattatctggaccttttcctaaagagattgggaatcttgcttctctaacccagcttattgcttacactaataggctaactgggcctttgccaagttcttttgggaatcttaaaaacctggtaactttcagggcaggagaaaataagatctctggaagcttaccctctgagatgggtgactgtctaaacttgcagttgctgggtcttgcacaaaatcagctgacaggagagataccaaaagagattggaaagctcaaggaattgactgctttgattctttgggataatcagctctcaggctttattccaaaagagcttgggaactgtaccaagttggtgactcttgctctctatttgaacaagcttattgggggaataccgaaagagtttggaaacatggtgtctatccagaagttatacatgtacagaaatcaattaaatgggacacttcctagagagattggcaacctttcacaagcacttcagattgacttctcagagaaccttttgactggtgagataccaatggagttgagtaagatttcagggctgacattactatatctctttgaaaaccaatttgaaggccttattccaaaagagctcacaagattgaaaaacttgacaaagcttgacctctcaatcaactccctctctggtccaattccagctggacttcaatacttgaaaaacttgattcagcttcaactctttggaaattcactcactggcatcattcctcagtcacttggattatatagctcactttgggtggctgacttgtctgaaaacagcttgacaggaagaattccccgccatctttgcagaagttccaacttgattttgttaaatctggggtcaaataggctcactgggaaaatcccatctggggtcacaagatgcaagtccttggtgcagattcgtctagttgggaacaaccttacagggaattttccatctgatttatgcaaattggtaaatctgtcagccattgagttggatcataacaggttcagtggtgccattcctccacagttaggccactgcagagctttgcaaaggcttctgctgtcaaacaactacttcacttctgagttgccaagagagattggcaaactttctgagttggtgatctttaatgtgtcctcaaactctctttctggaaggattccatctgagattttcaattgcaggatgctgcagcggcttgatcttagccataacaactttgtcgatgatttgccaagcgaagttggaacactatcacatctggagcttctcaagctttctgataatagcctttcagggaagataccagtctcaataggaaatctgttgcgtttgactgagcttcaaatgggtggaaactcattttatggtggtataccagctgagttgggctccctttcaagcttgcagatagcactgaatctcagttacaacaatctctctggggagattcctccagcacttggaaattttatcttattagaaaaccttatgttgaataacaacaatttgagtggtgaaattccaagctcatttcagaatctctcaagtttacttggctgcaacttttcatacaaccagttaaatgggcctcttcctgatttaccactctttcgaaacatgtcagttagcagctacattggtaaccaaggactttgtggtgaccctcttggtgaatgcaaaacaacaccatcttctctcccatttccttcagatatgacaaggtcaggcaaccatgttggtaaagttattgctatagttgcagcctccattggtggtgtttctctcattctaattgtggtcattatctatgtgatgagccgtccagttgacactgttgctcccttgcaagaagataacaagacattgtcttctacaacagttacagatatctacttttccccaagggaaggattcactttccaagacttggtaaaagccacagacaactttgatgacagatttgtaattggcagaggagcttggggaactgtctacaaagcagttttgccattcgatcgaaaaattgctgtcaagaagttagcatcaaacagggaaggaaacagcgtggacagtagcttccttgctgaaatccaaaccttgggacaaataagacacaggaatatagtaaagctatatggcttctgttaccaccaaggctccaatctcctgctttatgagtacatgtcaagaggcagcttgggagaattgctccatggagctttctgcaatcttgactggccaacaaggttcatgatcgcccttggcgctgctgagggccttgcttacttgcatcacgactgcaagcctttgatctttcaccgcgatattaagtccaacaacattctgcttgatcacaactttgaagctcatgttggtgattttggcttggcaaaggtgattgacatgccacaatccaaatctatgtctgctgttgctggttcatatggctacattgcccctggtaagcattcatcaacttgtttttggtccaattttctctacactcctacatttgcattggcttattatgctcattctaattgctatggtctgcaattgtctaaatttcagatatataatgataattttagaaattggagggcgtttttcataggaaaaatggcatgttttcaaatttttaggacctctaattagagacatagtatcatgtttttcatcaaagtgtttttggtctaattctttctacatgcttatacacttgcattggtttattagtatgatgattgtaatggctatatctgcatttgtttaattgttatataaaatgatatatttgaaaaattaagggcattttgtatgaaaaaaatggaattttcaaaattttaagaactttcaattaatgatgcagtatcatgtttttcatcaaattgtttggtctaattttttgtacatgctcatacaatttcattggattattatgcttatgctcattgaaaattacttgttgcctcacatcatcaatccacagaatatgcatacaccatgaaagtcacagaaaaatgtgacatctacagctatggagttgtccttttggagctgctcacaggcaaaacaccagtgcaggcaccagaacaaggctgtgatcttgtgacatgggtgagaaactacattcataaacactcagtaacaccaggattactcgatgatcgagtaaatctagaggaagaaactactctctcccacatgtttagtgtcctcaaacttgctctgcattgcacgagcttgtctcccttagatcgcccaacaatgagggaagttgtcatttatcttactgagtcaagtaaaagagaagggacaccttatgtgtccccaactcttgacaatactaattgaaaataaaagaaaaataaggatcaaccaccttttattattgcatataatagtttgtactgatttttgtccaccagtatgagtcttaattaaaggttcttcactccagatctatgtatgatatatacatatatatctatatttatatatataaataatatattcacttcttatggcatatgagtcagtagggtctcatttccttgtattatattaagaaaaagaaaaaaaaaatgccaagtataaagaaaaccaccatttatattgtctgcattaagttgcagttgatgtttcttctatttcattttttatttttatcaattatatttatgctaatttattaatttaaatcttatgttctagcataaggtaaagggatctaaagtgtatggtatggattttttatcttttctttttcaataatggatatgagaaagcaaatttatgactcaataattgggttggcaataattacctaggaacaaaataattttgtgactagttttccttcttttttttttttttttttttttgaattggaaaacttcattaaaatgaaaacattacaaagtctgaattggtattactagctgaatacgcagcaggaggaaactcctgattccaaatgccacaagctttcttaggtaaacctatttgtgctaatgcatgtgaaacaaatcagtatacttaagagagaaaagctaataaacttgatgtagaagtaggcaacatgtttatttattttatttttttattttgaaaaagaagtaggcaacatgtttgtaatctataacctatataaaagccataatattttgggctttttcttatta

SEQ ID NO: 43031 - DNA, 2666 bp, Cannabis sativa
cataaccatcaccaattttgtcattaataaatacatataatgtgtaagagttccacaattagccatttacaaattgcaccaatcaagatgagcagaatttaataaatatgtgttgcattagtaaaccctctcagaacagaagatggtcacgacataattgactaagtggcaaacttgtatgaccggttctactaaggtgacctaccaaaataatgaaaacaataatttaaacagcaaaaaaaaaaaaaagattacctcatttgatacatcaaaaactccatcctggatcttcttgtatatggttccagcagtcttaataaatgcctgaacaaaagaaggttaagcatttaactgtttgaagcaaggtaagaactacaaatttaaacaccagaagaaatgaacatgtgtttgtcaaattaatctcgagtaagtaagaaaaaggaatgctcacctcctcgacattctgagcagttttagcagatgcttccatgaaaattaacccatgctccttggcaaactgctccccctcctctgtgctcacagcccttctatgagcaagatcacacttattgccaattagcattattgtcatgtttgcatttgcatgttgtcttgcatcttccaaccagctagccaagtgattaaaagtttccctcctaaatgtataaaaaaaaatcttatataaactggctaaaaggtacaatttgaagaaggatataaaaatgtagacctattcaagacctttatctatatctcactaatgtatgcggcttaggtttatgtccaaaatcttgcttaggactgaattcattaacattagcaaaaaaaaaccctcttgcgtcaaacccattaacttctgggaataagcttgagttggtcgcttgctcattctattgaacacacttgcattatatctaagtgagaaaacaagaaactacaaacatctttagaatctaaccatgggacagaaaccaagtacaaaaccacagaaagaaaatataagcgggaacacagtgacatacagttttttttatctaattctgaaccttaaaataagatatagcgagagataggaaactctagcattgttatcttagataggtatacgagaaatagaatctacagctcataggacgtacaaccatttcacctccacgagtacaatatcatagatttacatgtatcaattacttatgtatggtaacagaatcatatattttaacaccaacaaaagaggaatgctatagaaatcccattatatcacttcatggatactatttcagtattttgcttaatttcttgtttcctaaaacgtttaaagagttcaaaccaataaaggaaagaattatggtacctggtgatatcataaacaagcaatgccccagctgctcctctatagtaggacctagtaatagatctaaaagattcttgaccagcctggaatataatatattatataaatatatataggtaagaatctatcagcatctgaagcagtaaagcataaacacgtaaccaattaaatcaaaataatgacgaagaagaagaacaaaccgtgtcccaaatttggagcttgataggcttattgtcaattgtgatcatcctggcaccgaactcaacaccgatggttaagtcgtgaactggctggaatcgcttatcagtaaactgaagaagaaggcatgattttccaactcctgcaaaagccaaaaatgaaaaatgaaaaatccaaaatcataattgaattcccaaatctcaagtcctctcaaacggtttcaattcaaaattccgatcaaaatgataattgggaaatcgctacaaaccgccaaaaaaaaattaaaaaattgaagtaagggagggggagaagtttagaataaggattattaccagtatcgccgatgatgatgtatttgaagagataagcgtacgacatgttcttgttaatcaaatccctcctattttcccttttgattggatcggcgcacagaaatataactagatctcttctctctccgagtcagatttataaagaaaagaaaatcaacaaaggttgaaattctataggaaacttagagcagaaggcttgcgcgtgtggctgtctatatatatatatatttatgtatgtgtatgtatgtatgtatatgtatatacgtatctatctgtgtaataggagagaagagagggaagaaaggaaaaagagcgattcacagagattttaatggtgaaggcataaaagaacagttacagcgaagcaatgcgccgttgtactcttccatttgtttcttgctgtcacgactaacgtaccgcatctcaggcccagcccattacttcttattgggcctcaatatattcaagcccattctggtaataatgaaatggggttttcaaaaaaataatattaatttttgagcaaaaatttataattttactgttatacggaaatttttacaaaaatattatctttttataaatcagtaaaataaaacaattaaaattaattgtgaaacaactaaaaaataactataaaataacagtaaaaacttaacaaaaatatttttgagaaaaattctaccctacaattaaaataaaaatatataattttagtatgtggtgtaaaaatattggtaaccattttcttgttattgatttatgggtaaataccattttga

SEQ ID NO: 43032 - DNA, 3933 bp, Cannabis sativa
gccaatagaaaccctgcacagctgccggaaaaagttcacaggcagccaaagcatagattatgagagcattcatccccatccattgcaataacaaagtaggttttctaatacatttgacatcgacctgtataagaaaaacatgcaccaaatatcttgcttagcaacctcaattttgtctaaactaacaaatgaagctcctcataatctcccatgtttttcctctcaattctacacaatactttgtatttaatgatctgttcttacaatgtaatagataacggttaaacacaagcccgatgctccagctgtcagacatgtgtagctcaaagtatataaaggttttgaaaaaggaatgcctgcaagaagtagtcattattttactgcaaaataaagaatgaaaaccaaaaaaatttaataaatctcgattttcagataatatacctataacctccagaatgaatcccatgattataaggggaaatgaaaacaaggaccatagaagtatcttctgtctttggccctacatgaaagaaggagaagaaatcaaatgagacaatacgtttacataagcatcatgaacacccaccctgtgaatataaatagcactatcaaccataatcaattcccaaatcatattgatattctgggttaattagtaccataccttaaaatgcacaactatgtgtccgtaatgcaatcccagaaaacatgtaatagcagccattagagagctagaattttataaagaaaacaaattagatattggatcacaaacaatacgaccttgctctcactattaacataaattcaagaacttttgtccaatttgactaatagaagtctgccgtgaatgaaaattcaagggatatgatttaatacatgtcaaagttcgcggagcacgatttggtatctatcaaagtttgggagacacgacacaatttggtacaaagacaattatcacgttagtaaaattgaacgaaatcggatagaagtccttgaatctaacaatcttaataattcggagaatttttttttaaaggcctaaaaagttcgaggtgcctaatttggtacatatcaaagcttgggaggcaataatcctaatttgtctacatgaaaatatgcttaaaataatgaaaaatatttatacctaaagagaaaatttcttccaagtatttaagaaattgaatggtgaataaaggtaagaaaaatgaaagactggaactaaaccttaaaatgccctcaggatcaaatggcgcaaggcaccaccctggggaatttggtggacgaggcccatagtcgggagaattaacactgcattcctaaggaacaagaaaaagcttcacgaacaaacaaaataatgttttggggtgcaaatcaaaagaaaaaatcaagacaattgtcccaagggagaaacctttgttcttctgtacaccggatgttggtaaagatgattttctccaagaataaccctgtcaatcaaaccaacagaattgcaaggaggttcaagacttcccctcacttcacaatggacctgggaaatgaaacattgttctacaattccacttaacgaacatctagggtgaagcaaaacgaagaacccttgtggtaaaggaatatgacatagctaccaagtaatagatgcacagaattgtaaggataatgagatcataaaaagatgacatcgggaatcatcttattacttaagaagcaataatcattgtcctcattacatgatcatgtattgaaagcttaaaaagaacaagtgaggtgttatctacataaaacttgcagatattaactgatgtcatagggcagaaaaccatacaagttaactcacagcttgaaattttgaggcataaccagacgagttcaaatgggaagctgcaaaagcccaatttggaacataaagaccatataataagaccatgtaaactgagcagagtaagatggcaaacaacctgcatagtacataaacaatcataagaaaatagcccaagtacatccaattacttatataccatcatcagtccatacatgcactatactagtacaatcagaatactatatatggaacaaatgggattataaatgacaagattatccaattccaagttcgatcatcattgattaaaagttaatgcctacctatgatgtaaacatatgtcttttctaaaaccaacttacatgaatttcatagccaaacttaagattggaaaaaaaaaaaaaaacataaagagacaagttcatgaaacagacatgagcaccaatgagtatctaacaaaacatacccttgagtgtagtattttcttatgaaggctgctggagattcaaccctgatgtttttaacaaaccagatctctgacaatgaagccagtaaataagcaattgatatcctctgtcaattaaaaaaggcaaaattttcaaaattaaagagatggctacactataaatatcagtactcatagttacacgtagagcagcagacagcagataatattccaatgtataataaaggatgtacaacattggcaatgtaagcatgacatagaagtacttcactacaaggctttccacagagtatggtacctgtaacactccaagccaacgaattttgcccacatcaactccatacatcaaatggttacgcccatggaaatacccacctaatgaaacattccaacaataacaacaaagagctgatattcattaaccattatttcagataatttaaaagggttgcataggaaaaatactgcaccatgcttagagagtacaaggaaaggaatgtttgctctcatttcaaacaacttattctatccaaataaactaaaaccacacaaagatttgactatgttaggaatctttaagtgactaagtttgttagagtggttagttgttatctttaagtgggttgttcaaagttaagctgatcataagctaatggtagagactgaaaaggatctcgggaaccaggatgtcaaagcaagaatgcagcaaaccttgaagtatcaatcctaatagaaagagcttaattcccctcagcagtactttctgtgtagcatttggtttattggagagtttctgcattgaaagccaaagagtgagacctagttttggaaaatttgagccatccccaatgataattgtcagaatttacaggatcatagtatcgaccaaacaaatgcaatataaaataataaagaaaaaaaaaatcacattaataatatctctaattcgcaccttaaagactagactgatagaaacaccaacaccaaaaagaaaaaatggcattacaaaatctgcaagcgttacaccaaaccatggagcatgatttattgacggaaaagctcctccagcgtcgtccaccaatatcattagctgtaaagtaataataaaaataagaaaaaaatgctcagacacaagaagtaatgaattttccaataatgaaataacaataacacaacaattgtctccataaaccgaaagcactggctgaaagtatacacacaacatcaacaccgaaaattaagccctaaaaaaccccaatttactaaatataaccgaaactcagcagagctgaaattggctcaaaagtagagtgaaaaaggatagaattatggaaatcaaatagcatacagctatggtgaggccacgaaagacgtcaagagatacgaggcgttgattatcatcggcgggagtgggtgacgatgaaacggggtcgtgggacagtgagcagggcacaatttcgtcgccacagtcggaggagtctttgtaggggaggcggggcgatgattggagaatgagaggttgatggtggtcctgggccatgtcgatgagcgacgacatattttccggcaacttagaataccgaagcagcagtagtgtagagaagttctaagtgagttttagctattgaaagagtcttattatgac

SEQ ID NO: 43033 - DNA, 4904 bp, Cannabis sativa
ttagaaaacaattgtaacccatctccagaaatttgttttgtgagtatagttaactacagaacttatgatgttatttggtgaagagaatcttcttgcctgttagttctgtttttaggatagttaaaaaggtaagtagagtgttagacagtaggttgagaagtcttgctttgtggtcagagttttcacattttctttttatgtgtgtggaaatgaataagcttttcatgaatgcttaaatttgtaaatgtgattttgcgtttatgattcgaacagtgtgaaaatgtactataaaatggtttccataaactatttgtagaatgtttagattttctcattttccctgtttttctttgttgtttagttactgtagtgtactatttcttgaaggaatttccattcattatttaattgtagttgtaacttgagcagggcgatttcttgatttgcactaaatgtttcaaaaatgaaagttacggggagaataagtcagttgaagattacacctttattgagtccaatcaagacagcggtcatcatgaagctgtctggaatgagtctgaaacactgcttctcttagaatctgttatgaagtatggggatgactgggaacttgttgctcaaaatgttcccaccaagaacaaacttgattgcattgctaaactcattgagctacctcttggggagattttgggctctgcttctgctaccaataaaaaagttaattccaatgatgtcaatggcaacttgaacagtttgaagcaggttgaattaatctcatccgagaatgaagaaattgtcaaaactggggaacaacaagatgagaagacaaatgcgggtgatcagaatggagataccgtggaacatgtacctcctcttaaaagacaacgaatcgattccttatcaggtcttggtggttcactgatgaaaaaggtaggttactaggtgtcttgaaatatgtcattccagaatttatttaacagctatatgtccttatgggggtgaaaatttgattttctttattcgtttagttgaattttgatgaccatacattgccgaattaattgtctcataaatcttcagcaaaataagcttgctttagtaattttggtgttatgaaataattaatattccactccgaaatgtagtaatggttagcattatgaactttgaagtatttccacactcctgtgtcttagtttttcatgcttactggactgtgggtttatgtattaatgtgcacgtgtgttttttaatttaactgcctagtaacattatgcaaagatttgtatactaaagttaatagtgtttctattaggtagctattttgtcaactcaggttggaccccatatcactgctgctgcagctgaggctgctgttactgctttgtgtgaggagatttcatgtccaaaggagttattttacggtgatgatgattcggtaactaatgagctacacactcggattccagataccgaaaggttatatacattctgttaacattacttgtttatttggtcatagtagtgcaattctaaaattctttagtatcttatactcatcagggtcttggaggttgaagatgcaatgatggaaggagggcctactcaatcaggtagatacttttaactcaaccaagcaaaatgaactggttagtttattttcttcgataattattttgtttgtctttttgtacacgtatttccattgttgtagttttaatttcttgaacaaggagacatcatctttttatatttttagctggtttattatttcatttaaggtactagccattgtttactagcttcttcatatttatgtatcttatatatctacagataatcagggcaagtcagttgagaaagatgatataccattgacattgcaagttagaacggctgtcgcaacggcacttggtgcagctgctgctcgtgcaaaattattggctgatcaagaagaaagggagatggagcatctagtggcaactataattgggactgaggtgacacaattttctttgtttattacttcttcattctttcccaatatcaggccacacaaggttaatcatgtgaatgaatatttttcttagatgaagaagttgaattgcaaaatcaagcattttgaagacttggaggtaatgatgaagaagaagcatgctgaaatggaggaaatggaagagattcttttagaagagcgaatcgatgttttacaaaaggcatttactgctggtatacctagatggaaggatcacccttctgttaaatcttagaatgcttctacatattgtcatgtaatgtaagagtaggaggaggattcgaagtagtcgacaatgtaatccgatgcattctcgaagcttactagtttgccctattttgttcaatccattaacttggaaaggaaatgcttgtacttctaccttcacagttggacatgtaaattagggttgaattgtttgtaactagtaaaaatgccaaaatttggagataactgtgctctttctcttaatccatatatgctggcgtgctctttcaaccaagcatgaattgggcatacctactcttatatttttggtgtttaagagaatagccaactaaacaaacacaagttgaaaaaaaagagatgtttcttcgttctagtctagacaatggtcctggttgtccgagcttgtaaaagctgtttttgggtttcttaagtttcaaaagaagagttgttaatccgatctaatttgcactacagtgcattcaattcgcactaagtgcagatttcatattttggattcaatccaatttgcataataactcaaattcaatgtaatctgtaaaagcacaagtgcgaattttagattttccaatccaatctaatttgcacatgcggatatttatactttgcagattggattgaattggatcgttcgaatttgattaggttggatattttatgtacactcttattcaaaaaagcacttctgcggctgttgaataacaagtaaatttcaacttttagttttatacgaatttgtctttcttcttatctattatacctcagcaactctcctctcaatagctgctttaagacattctattacgcgctttctctcagcctccgaaaccattggaagcccatcaacatgtcttacatagtacttctataataacaccataattaaacaacaaaaaaagtaatttaattttttttcttttttttttacttttttttttctttttcttcttctttcttcagaaaccctcccagccctctgctgaaaccatattaccagtcggacctcaccatctctcacccaccaacccccaccccaaaacccagaatcaccccgacaagaccccaatcccgacgaaaccttagtccactccctcagatctagatcgaaaccatagatcctcaaatttccatcattatccaaagtcagcctctgtttcagattaggaccgaaatcagaagttatgtgcgaagcactgttctcctgttccattttcccaaacaccgaacctagctcctcagtcttcgtgggtttctccctcgagggtctcttctctcaaagcctctcaatcccagcacaaaccatttgttgctgctggaactttttcgagctatgtcctgttctccaatccaatggatgcttcgtcgctcgaattggagatttctatcccggggaaggtgttacacaaaggacccatttcttgtattgatttaatggacggagagcttgagtgtttgactgttggagaagatgagaagatggactgaggtttcgtcgagattggggtctcgtcagggtggttatgggttttaaggtgggtggtggggggttttggttttttgggcaacaatgaagaagaagaagaagtagaattaaaaaaaataaaaaagaaaagaaagaaaaaaaagaaaaagaaaaaaagaaaaaagagttttttattattttttttttttatttttttatattttaaattatcttttaaatatttataattattgtgtaaaactaatattacgtggaccactaaaaatttaccacgtgtacaagagtgtacacgtggacagtccaccgtgatacttaactgtgatttttagacagaggtgtgcagagcaaaacgaaataggagtttaggtagatttgccaccaaaattttagttttggtggttaagtgttacaaaccgtaaagttcagatggtttagccgccaatatccctaaataaaatcaattcctcaagcaataatgctagaagtagactcttttttatgagcagaagaacatgtatatagctacatatgattggagaatctcatttcaaaatattgaagtactttcttttaacatttctttttgtatgatattaatgtagttaagtggttctgtttttccttcacatgtttctttttgtatgatatttccttttgtatgatattaatgtagttaatggtaccctatctctcataaataaaaaataatttactacttaaatttaactctcagttgtaaataaatacataaatttaatttttggcggtaataatatctaaggtataattcttgaacttctgtaattaactgactattaattgttaagtaaattaccttacaattcttgattggttcagattattaaatttttattattttttttaaaaaattaatgtactaagaagaaaatgattgaaatttaacgataagatatatacggagtactagaattataacttatctattattactactaaaaattaaatatagatatttatttataactgagagttaaagttagatatttatactgcaaattactctaaaataaaaaatctaatggtactttaattttatttatttattgatcaattttctaggaaaattaccccatatacatatactatttttttaacttt

SEQ ID NO: 43034 - DNA, 4520 bp, Cannabis sativa
tcacacattttaatttttatgattatagaatatcacaatgtttgaacaaggtgatttccaccaggttagttaatgataagttatgctctcctatcatattcattcttttcactagtgagtactattaatattttttagaatagttattggcataccaatactacccttcatgtgtcgcccatttgagtagatgttaatgttactgttgtgcaaatcaatgtaaaattgaggaaagagcttcatttctctttcaccatatatattctgagattcattgtacgtattactttcattttctttttttttttagaaaatgtattactttcacttcggatggtttaatttgacctttatttctttttttttcacttcattgtattagcagtttcttttttttaaaaaaaaaaaaagatattgtaaataataattatgaaaatgttatttttttaacctgtagctcttaagaagaatgagaccattgaaacttcataattactccaatatggatttatttccttcttgcatttttacagatgagaaattacacaaagttcagtgatttttcattctttagtttccctagcattacttttcatcttaaactctggctatctcctttttaaattacaacaattaacataaaataaagcattccacaacacatcgatctttatactcgtcctgaagactcatcaattccaccaccaattactgcatcgtcaggtatgtacttaccccagaaccagtgagctttccaaactctgttaatctcttctattggtacatttttcgtttcaggtaggaagagagccacaaaggtggtcattatcataacaaatgcagcaaagaagaagaagagtccaaatttcatgtggcaaagcatggcaaggaagccctgagcaatgacgaaagtgaagaacatgttgactgaaacattgatggcttgccctgctgatcgaatctccagtgggcagatttcacttggaaccaaccaacccaatggaccccacgaccatgcgaatgcagctacatatgcacagatcaaaaacaatacaacgttggcttcagtgcccgatattgtccctaccccattgacaccaaatttcagtcccagcatcactcccacagcaatctatacaaccagcacaaacattacatgtaagttagtagttgaaacttgtatgcactaaatttgtagctaccaacttttacaatctcgtttgtcactaacagaatgtgaatgatataatgtctagttttaaaagtggatttactcactgccctgaagatttcatatgagtttctaaatagagattgataaattattttctgattatccatttggcagatttgttatgtaatacttaaattctgtgctagatatattgaaattcatgtttacagattacctgacagaaaatcatttggaaaccaccttccaaaaacaaaattcttctcccaaacttgtcaacagtgaagatggaaaccaaggtggcgacaacattgacaacaccagtgataacagcagacatgagggaagcttcatccccaaatcccaatgtcaagaatagaacaggagcatagaacatgatcacgttgattccagtgagctgctggaagaagggtatgacagagcaaatcacgagctgaggtcggtacctgggttggaggatattcctccacgggtgttccaccttcttggcagcctcacttgcttgcagaagatcctggtactcctcctccacatttttagtgccacgaatcttctcaagcatcttcctggccttctcaggattgcctctctctaggatggagttgggagtgtcaggtaggaatatggcaccaactgtcatcattattgcagggacaccggcaagagctagagatactctccagccataaccacccttaatcttggaagtaccatagttgaccagattcgccattagaatgccaatggtgatggccatttgaaatcccatgttgagtgcacccctaatctttgccggtgccatttctgagagatatactggtacggactgccatacataacaaacaaggactaataaaaatactatttctcccgttctttaataatattgttctacatttgtgtttcttcttttctttctaaaactaaaatgtaaggtgtacatatgctcaacatgtttgaaaaatcttccattccattcactttgttttcaaaacaaaaatagagtcttagttgtctattatcagtatgcgaagtccaaatgtactttgaaggtacaaatttgacaaaataatattagtgaaacaaactagttgaatacacatttattttgatcatccgtgatgtttttcataattttgggaaacatagagaattcattatatttccatgcatgcatcaaaaaataacaaaaaatttaaataaactcgagtaaaggtccttcaatatcaactcgagtgagttgcaatgtttcaaggtttatttcattatagagaagtttcaataacaaaagataaggcattattaaaatagacaaagctaggtactttaaatatataattggttacctgattggcaaaaccaacacccacaccaagtaacaaacgaccaatgatcaggactagaacactttcagcgaccccgttgagaatggatccagccaaaaacaccaaccctccgaagaacatggtgggcttccggccaaacaccctagtaattgtcgaagcaaaaaaggaggccacaagagcagccaggtataaggatgaggtaaagagcgtaagaaggtggctgttgaacttgcagtaggcgttttcatgggcctcgttgctcttcatcttctctagtacagatggaaagaacttggccaagaaaggctgcattgaggtcacacctcctgcaaattaagaaatataagacatctatacaaggcaaacaagagaatagcttgaaaaaaaaaaaaaacaataataataacctgatattccaatatcataaccaaagatgagaccacccatggcagcaaccacacaagtaacgatcacgaagacagtaatactgcctccatagttcccacctcctccaacaacaaaacctcctcctgccatctttctttcaggcacttaagtacaattaattagatatattccttaagtgctttgaattctttatgttcttcagtgaattcttagacttttgtatacagattctaattcttttcaccgggaaataaagaatgaaagatgggcttttatttttatttttttctgctacatagccgtctcactatgtaacttattcaccacctgtaactattaccaactaacaacattccagtttatatagtttttttttctttactttctatggctatttggccaaccaaaaaaataggattctgtttcccaatccattggcttgtaaaaattctgtttgtttatagataagagttggtaaagtcaaatctttttgggaaagccaacgagctttattctcccttctaaatttagaaaatttaatctctttggtcttgctgttaggatatgtggtgaataaatttgtttggtctttcaaaaaaaaaaaagaatatatttgtttggtcatggttttttgggaaggaaaataagaaatgttaatcaataaaaattaattaaaaatatttccatcaaaaaaattaattaaaaatttactatgttactatggctggaaataatgtttgcagaaatttatgaaactaaacaatgtatgtaaaaatgtattaccatcttgaggaattccatcgcctcatatagtacaacaactgacattgtttacactgcaattttgcattgattttattctacaaaatcttttactaatgaatttgttattacaggaacattactaagaagttatggttagccaatgttagaattatatagaatagctgaaactagtggcatgacctacacactatcttttgttgggccttcccaaaatttggcctacaaggctacaatatgtgctataaatatataaatatgggaaaaataaaatcagcttaaataaatgtggtaaaaaaatttaataaaaaaatatatagtatttaaaataaaaacttaatacatatgaaattaaattaccatagaaaataggacattttacaattttatatattttacattaattaattacgaattgtgtgcaaaaaaatttattactatttttccatatattttttatatgcttagaaacttcttttttagtttttatttataaaatatatatgataataattattgactatatcttgcttttattagattctacaattttagctatattaatataatcatatattttagttattctttaatatcatacatttactacataccaactatattacataatcatattaatatatttattctttaatattatgtcaataagattattttaataaaaaatttagtatgtttatttttataaaaacttattttaattttttatttagtttgtaaaattatttgttttgtattttttttttttt

SEQ ID NO: 43035 - DNA, 2259 bp, Cannabis sativa
tacttagtagagtgatgaataccttactaatagtttctttgtaacagagaataccggaaagaagcaaaagtcagcaaaacctgcaaccgaagcagaaattactatttccagactcgatattcgtgttggtctgattactaaagttcaaaagcacccggatgctgattctctatatgttgaagagattgatgttggcgaaggacagcccagaactgttgttagcggacttgtgaaatttatacctctagaggaaatgcaggtatttttactggtctttttcgtcgatagtgatatataatttataaattaatgtaaccttttcaatgcttgaaagcatttatcatatgtaaaattcattttgcagaatcggaaggtctgcgttctttgcaacttgaagcctgcaaacatgcgtggtattaagtcacaagcaatggttcttgctgcttccaacagcgatcacaccaaggtaagaaattgacgattctttcctggtacttaatcgatcacgtcgagtcactgatgttatggtgggaaattttattatacaaactaataatcgataatgagatgcgaactgattcttcactgggttcataatggggcaattagtgagtgttgtaatttaaaattccatgaaaagatggaactttcattcggtaaagtgtccccaaaaattttctaacaaccattatgaaattttcgttcaagacaaactgaccgatataattataattgctgaaataattttctcaatttcaggtggaattagttgatcctccgaaatctgctcaagtcggagagagaattacattcccgggattcgaaggggagcctgatgatgtgttgaacccaaagaagaaagtatgggaaacattgcaagtggacttgcattcaaacacagatctagttgcttgttacaaagatatcccgttaaccacatcggccggtatctgcactgtatcaagcatttccgaaggatcgattaggtaaaagtggagttagctagttagtgagaaaagattggaagaggataaatggttcttgtaaaacttaagattttgattattactctaattgtctgctactgtatttttcatacatatggttgtgatattctttctgtaagatctaatttttaatgacaacaataaacaatccttttactttacccatcaaaagtgggagtcttctattttgttttgtgtgcttattacacatgaaggcaatttcccttgctaaaatgggaaaggaaatagggtagaatgagaaaagtaaaatctcgaagtcaatacagtaatagtccgattggtatttaacggtaatatcagagttaagtatataaattcaatagatttatagtgtaacggtgacattttggtccggcgaacgggcaagatcctgcggtgacacatcttttagttcaccgcctttgtcatcgatcatcggaggcttttcaatatcagggagagttcttaaaacctgtttaaccataaaacaccatatataaatgatgatatttgtagtgtgacattataatttattgaaagaatttgaaggtgtttttgattattacctcatatagataccatgagacaaaagcatcagtggcagcatactccaactggtcctttgataaaacattggtttcccaatttcctagttgaattcttttgggcttaaggagctgcaataatgcaacaacctcattaaaagattcttcagaaatcttttttacaagagtagctcaaatgggatttaagtaacattattgttttgagtggaaaaataagaaagtgagagagagagtgtcactacttaccactgaagcttaagggtgcgtttggttgggagtaaacgaatagaatgggatagaaaagaatcaagtttccttctattttttttgtttaattacatttaaaagtattggaactagaatgacattttcactatttcggtagaatagctattacatttcaaaataggtggaaatgccttttcaatacaagataattcttttatctattttttaaatgcatattaaatttaatttaatttctttcctaatcctatttatgtattttcattccttccaaccaaacgtaccgaagagagagatcacttaccattcaagcttaagggttatacttagaaaatcataatgttaaaaccaagttgaaaatgaaaagtaaaagattaataatacataattgtattcaagataccctctacatcaatttgcaagacccctacacatacccc

SEQ ID NO: 43036 - DNA, 4017 bp, Cannabis sativa
ttaatgaaacatacttgttaataaatctagatcctcataaaatgtatccaacacctagctcatcctggagatggtcatccaccatcgccaactcctaacagtttcatacagtgtttgaactttgttaggggtaacaccttagtacaaatatctaatgggttctcatctgttgggaccttgggaccttttctatctgtacaattccttatatcactttatctcgtataaagtgatacttgatttctatatggtttatcctatcatgaaaaattgggtttttatgaagatgaatgcaattttggctagctagttgtgaaacagaaattctataggaaagttggtgtcgttgtttttatttctggcgagtaagaatcacgagcttaacattgtatttggtttctgtatttatttttgtaagtaacaagtgatataaaaggatctagtttaacaccgactgaattttcacaacgcaaatttttataaaataattaatttagacaataaatcacttaaattttgtgacaaatattttaattacacatcaattaattgtaagataaaatttattcacattagcataattattatatgcctaaataaaattatgtaattaataagcaaattaaaaaatttaatttgaatttataccaaataatgttgtgaaacaacacctcggcaagaacattaaacaataatgaacagatcaatgaaaccaaacaacaagcacaataaaacagtaagattttaaccaaagcattaataacatcaagaacacaagggatttaatgaggttcgaacaagataatgatgaattaccttgcctacatcctcggccagaaacaggcacaataatggctttggagagtctttatttattgagtttaagaggttataactgataccaattacacaacaaggaagctatgcttctgtaattgtcttctccaatggtgatgatcactaacaatgtgtcaccccaattacagcactcaaaagcaactctctctttctctcaacagctcctgaaaactcttattagggcacatttatcctgtatttagtcacgcctagcattgtacggtgatgagacaacatatgtgagacacatgtttgaacattcttctcgcattgatcattcatgatgaagtttttggtaattcttatataagcttttaagtaagctcttcaaattgtattgtttatccatccttaggtcaaaatcctttatactgtcttgtttgaccaatcaaagttccttgtcttatttttcgtgtactttgtttttcccaagatggttgttattgatctttcgggtctactagtgagctaatattttgacttatccttagtcacctaaggaaatacttcaatttataactatgactagtcttttctgaggtgatataaataacgtatttaattcttcaatatccgagctggttcattttccagctcttgtacacgtgtcgtgaccgtattgctggttcaaatatgggtataacacaatgagattggggcaaaaaattattgcaaagctagaggtagaccttctatcatctatatcagtagcccaattagcatcacaaaaggccttaagttcataattcaggggcttattaagttaaaggccatacttgacagtaccattacatatctcagaatgtgcttgattgcaagccaatgagtttggagtggtttttgcataaacttacatactttgttgacaatgtatgacagtttaggtctgatgatggtgatgtactatctgtacatctgtggattttcaatgcatcattgtcgtgagcagatatctttgaccacttatcataggggtgatgatagttaaaatcatgcatatttgctttgcatagtaaatcacaagcatatatggcctctggcattaaaagaccattgttgtttggagtaacctcaataccaaagaagtatttgagctccccaagatctttgagagaatttttttgatgcagaaaatgagtgaattcaccacctcagaatcactatctgtgaccaaaatagactaataaaacagtaatagaagaagaagtgtggtaaataaataaagaatgatcagattttgagaagaggaaaccaaatgagacaagacagttgtgtaacatctcaaaccaagccctgggtgcctgtttcaaaccatagagagccttatgcaacttccagactaaattaggctcagttgtaatctcaaagctaagaagttgtatcatatagacatcttcattcaacacctcattcaaaaagacattgttgatcaaactatcgtactcctcaaaatctgaccactctctgtttatttaccacacttctacttctaatactcttgtattagtctatgttgatgacatctcaaactaggccctaggtgcctgtttcaaaccatagaaagccttatgaaacttgcagactaaattaggcttagttgtaacgtcaaagcaagaaggatgtgtcacatagaattattccttcaaatctccttcaaaaatgtattgttgacatccaactgccttacatgccaacctttggagagagctactgtgagaaacaacccttattgcaactggtttgctaacaactggactaaaggtttccgtgtaattaaaaccaggttgttagtaaaagcctataacaatcaacctggctttgtatttgtttatagtttcatcaggattttcttcaattctatacacccatttgcaacaaatttccttaaattgtagataagttttttcatctctcatagagatgctactaccatcggagggaaactgatgaaacctaagaaattgaagatctcaaggaagacgaaggggccgagctcagtttgactaaaaggtgatgaaatccatgcatggatatgaataagaagaaaaatgttctttgtgtaattttttgttttgtatgttttgtgtgtaagtacctgatggatattcttaagccttaggtagatatgtcaaattaaatttgttcaaattagaatctcacgattatccaatattgattaaacaatattctacaagtgagtattacgatcacgaaattatatttgctattcaaatttctttgttatagaaaattttgtggtaatttgaaataattttttctgcaatttttttctttttgtaatcattcacttaactatttatttggtgagaaaattcaaattatataaacatgtgtacttgaggtgtatatttacccatttaaacgatatatgaaaattaaaaaatacaaatataaacaggtcgaacattactaaggaaaggaaatactttataaagtcattacacacactaataacatgcatatacagcactcatgcatgtcatatatatatatatatatatatatattgtgcatgtgtatagcattattattcattactacgttatatataatttatgtatatatatatatatatttataagcaatataaggaagaaagagacagtggaacacatgtacaaccagatgggcaaggttgttgatagcatgattgaccacatttaggattaatattatcctttaagattttcatcattatgatttgatcatatgaaagagaagaaggaatatgatcgatagcaccagtcacgacctttccatcttcaccataataagcattatcattattattattcttcatgaaatcacctcttccacttgcaaaactagtacatggaaaaacaaccattgttacaacaagaagaaataaaaatgagcacttattcttattatatagatatagctctaggatatatatatatatatatgattacttcctaagatcccactcacattgtatttatacatgaatgaggtggtattttttttttcatcgaatatcgacctttatcttcttcccatatacctaacctcattattgttgtaattatatataatatctcttctccaatttgtttatactatttttattaatgtaataaattaatattgcatgtttaaaagatgacacgtagttaa

SEQ ID NO: 43037 - DNA, 4736 bp, Cannabis sativa
aaaaatattgcaaattcagacacaatgaggggaaccccacctgggatttcgctcgtcagagccattagaggtaaagattggagccttacgagttacagatatgtgatgttgttagttacttttgtagcctatgcatgttaccatgcttcccgaaagcccagcagtatagtcaagagcgttttgtatccagacccgactaaagttaacggtctagtcactggtttctacccttggccgatcggtgaggtctttttgaagaaggaagaatttgttaacgagcacagaaatgtgtctcgagagaagggttgggctccgtttaatgggaaagatgggacatcgaagttgggggaaattgatctagcttttttgggatgttattctttggggatgtatgtagctgggcatttgggggacactttggatcttcgattgttcttaacgacagggatgattggaagtggtatttttgtgtgtttgtttggaatgggatatttttggaatgttcactcttttgggttttatctagttatgcaaatgcttgccggtttgtttcaggccactgggtggccttcggttgtggcggtgatcggaaactggtttgggaagaggaagaggggtttgataatgggtgtttggaatgctcatacttctgttggtaacataagtggttcacttctagctgctagcgttttggagtttggttggggttggtctttcattgttccaggtggattgattgtgatgggtgggattcttgtttacatgttcttagctgcttatcctgaggatgttggattctcgtgttctcaaggctcagctacaaatgaggaagaaagtcctattgagaaaagggaaagtaatggtggtggtggtgttcttccttcacatgggtcagtgagtagaagtagtgttggacttgttcaggcctgtatgataccgggtgtgattccttttgcattgtgcctcttctttgccaagcttgtggcctacacgtttctctactggttacccttttatttaagccaaacaggtaatatttcatgtattggtttttggtttcaattcataactattaatgttagagaccataatgcaactctccaacttgttgaatattagagagtaatgaaagttattacattcaattatgcgggatccgaatatttaattgcgccggtgtggtgcctttaggtctcgagtatttttattgggcactagtgctagacaccactggtgtcttttagcatttctctttaatataacagaaagagtaaggctaaagggtatctatagtgcttagcactctcgtcattgtaatattgttattggtgtaacttaatatcgggtcccacttggtttactttaataaatattatagaaaatcgctaattaattatagagttacactttacggtggtgataggcaccatctcatagcaatgctcgaaaatatctgcactagagagtttaagatttaaagtagaaatgatgatctcgggattgatgtataacgtttttttgtaagcccaaaattcaaatttttttaccagagtttaagagcttgttaggtttcccagttcgataaatgtgtagttgtacatgtgtcccgagcgtatgtatgtgcatttatcattgcagtatgacatttatcatatattgtgcatcaagtacttttgtataattaccctgctctctgtttgtatacatgtcatattttctttctaatggcttttgtttgtttttaacaaacaaatttaagatacacaaagaaagtattgtttggtagacgcactctcaatggatgtgtaattgaaagtacaaattgggagtttgtttatcattggatggaggacaattaagagatcattctactcattgtctcatgtgctataagtatgattgacttcttactcactctgcttagccacttgctgaaaagttcaatgataaaaaaagcaacttcatgtaaatcagacttggacaggacacacttatagctgaggctcgttttcaatggatatattgttttttttttttgtatggcatttctttctgcttgttatttaatgttagagagaaacagaggtgaaaagaaatgcattttaaaagagactgctgatgtattggtcacttctacgagtccctcttctgtgttcatgctcctagaattattccttgcatgagtgctcttaaatattttgttttgttatcttggttgtgtttgtgtatttgtggatggttcaatcactaagaagtgacttgttccttgtttcatcactccacagaaattggtggggagtatgtttcagtaaaatctgctggaaatctctctactctatttgatgtagggggcatatttggtggaatccttgctggatatgtatctgataagctccgtgctcgggctacaactgcagcctgcttcatgtatgctgcgattccttcccttcttctgtatcgctcttatgggaacatttcaaaaactgtcaacattgttcttatgatgactgctggcttgtttgtaaatggaccctatgcactcatcaccactgcagtttctgcagaccttggcacacacagttctcttaggggaaattctcgagcgctggccacagttactgccattattgatggcactggatctgttggtgcagctcttggccctttacttactggctttctttcaacaaaaggatgggatacggtatttgtgatgctcatgttaggagctcttattgctggactactgttatcccgtctggttgcggctgaaatttctgagagagcttccaaacagttgccagtttccaacgggcaacaaaattgtggaggtaaccctgtgttcctttcgctttgatagctagacaaaagtgttgatatccaacatttatgtaagttatatttttatattattttctcggaaatcaaaattgtggaagacttgactacaagaaacagaggcacatgtttgaataattccagacattttctagcagaaacaccgaacaattaaattgaaacaaaccaggcagaaaatttacttgttatgctatagaagtttgctcgaatgcatagaatttgtcgtaaatatgcattgcaaggatacaagtttttgttgctgctctatcttgctcttttttttgcttaatgcaagagacaaggaatatataagcattttcagcatcaaattcaaatccattgaaggaagtaaaaaactttctttctaagattacctgtctactatttcatcagtcttcttactcaatacttatgtcttctattgcagcttctgcatctcaaccactactaggtgaccagaggtaatttttaagagatttggcctcctcaataaattttgtcataactgaagagactcatatttaagtgcccatgctgtagcagtgtgaaaatatcggtaagatatcttaaaccagattgttcttttggtcatattatatcattaaacaaaaatagagcacaagtattatagataattcaaatggttttggagagtagcttttggcacatactttatgttagtatgtgcattcttgtaattgtaccctcattttgtttaccactgtgcttcgtcaatgtcgggctcttgaagctggcatatggcgtatcgacacaaatcacagactgagttcaagtgaagttatagcttgctgaaaaaaatgcccaaataaaatggtttttttgtttctttgtagagactgcatttttttgaagttggctttttgttctttgatttatttattattagtgtttttgttggtaatgttgttagtctaagatcttgtgtagtacaatccagactggtgttgttggtgcatttttttttatcgaacttggatttatcattacctattacagacccttcaagttttgatttttgacactgacaataactaagaagtgtattataaataaatggaatcattgtatatttatcaaccgatgggccttccaaatttggtacaagttcacatatttatttaactttaagcataggtttggtcaaatatttttttggactctagaaactccaccatggattgcatggtcatttctttcacagtttctggatctacggttccggtgactttggggtggtgttgctggtaggacttggcagactccaaagtatcgtcgtaacgattgttgttgacggtgaaaaatatcacacttcaaaatgatcggaaaaaaaattgaagacaaaaaagagagacggaaaaggaacctaaataaagcacggatacacaaaaatagtaaagtgtaaatgataaaagagtaattagcaacaacaatttttattcaattttccattatcaaatcgtgatcttattctattataagacttgttaatagtatttttcgaaatattattttttacaataatacaaataaatattttttattttttattaagaaaattaaaaatgtaaatataaattattagaaagtattttattttattttattttttgacgcggtgattaaaatcacacatgattaacaaagcagcaatcctcaattggcgacgacacttccttaaaccaggatagataaccgaagggcatgctttgtcaaaccaagcactgcagaattctcattccgagccgcatgggacaaaactgctcccggaaatttagataatacagctataacgaagtcaaaacagcaccccatctcatcgaaaaatatcttctcaatataaattgccattagagcta

SEQ ID NO: 43038 - DNA, 7504 bp, Cannabis sativa
aatcatgatgagtggcagcttctggagccataaacttcatctgggaaccaacattagcaggaagtgaatctaaatgatggaacaaagggcccatgttattcaattgttgatgatggagctgtggaaaagatggttgaacattaagattctggtaaggattactagactctgtcctatcataggggccacgagggaaaggtggttcttgacctcccctaatggacctttcatctccaaaagaggaattgaaggttgccaactttccagcaaattcggcttgcagatttgcagatgagagcagctcacttttaactgtatttccagctggcataaagctttcaacattcagaggcccacttgctgtaatcaagctatcctcttcagggaaagcaacaccagcaggcacattaaatccaacaaccttagaccctatgttagtacgaagatgcgatgaattttgttcagcttgagagttatcaaagcttaaccactgctcttcaatgttattgttctgggtttgcttccttttatttgctgttaaaacattaatatcatgaacagtagtgctaaatcctacgtcatttgaagttggaaggcgattatctacaacaggaaaaggaagtccatggggatcagagacatcatttttcgaagatccaactggacccctttggatggagactggagctccaactgattgcaactccttcataaaagcagacccaaatagtgtttcaagagttaaagaatttgccgagtcagaaacattttcgactttaccctctctggagttgttaagtgcactgccaatacttgtgtcattgatgtcataagaactgtcagaagacaacttgtctggattggaggatgattccatttcattcaagctagtccccttctgtaataatgagaggaggtgatgggatgcatcactattaacttttggcagcttaggctttccatcggggtccctgtggctctgaacaggtggccgcatgattgaactgttgtcactaattcctaaaaggatcgactgttcaagatcttcacacgtaagaactgcagaaactggctgtggtttattcttgtacaactgatcgacactaccaactatagtagatcccacatctgatgtcataagcttctccgatatttcagagttttggaagggaaaactaggtagaacattctcgcttgtgttcccagatactcgagatccatctttttcactgccaactatcaatgagagcaagttatttggctgcccagttgactgcttgttgctaggtttcctttctgcaataatttggaaagaaaacagaatacattaagtaattattcaaaggacaaacaactgaagttagagggcactgaaactagacccccaaatattaattgaaactaaccttcttcatgaaaccattgagcaaacttggaagattgtacagagtctgggctctgtatctcatccactgagttatcatgatgctaccataaagtgaaaaaacataagtcaatctcaagccaatgacctagtattcatggatgcctccatagaagccaatgacctagtattcatggatgcctccatagaagcaaaagatacaagccaatctcaaacagatttgaatgctttctaaacaaaacaaaaagaaatggtttatttgctctaaagcaagatagatacacagacacaaacatatagatgcgtatctgaatattaatccagaaactatagacaagaaaaagcaatgaatatagttttctcagcatcccagaactccaaatccggaattatttcgaacacaagaaaaagcattgaataaggcagaattaaaataggattttcaattgtaattgatccaataaaaagattcttcaaatcaatggaaatgtaaactagaaaaactagtatatagcactaaaatggaaaattcaatttcgaactatatctgtggatgttttggaaattgtttaaaaaccaaatacttgaaaacagtttagatatcagaggacaatgcatgcaagaaacaaaactaaggccaaaacaaaacgaactaccaccattaaaactgtggtatcctttgataaaactaaatttattaaaatggcataaaaattcaccaaccaaagaaaaactggaaacacattggctacaaagaatgccattacatattgtaaatacctcaagggaactagaagagccagcaacacttaacgctaatgcactgctaaaaagcttatccagtattgaagtagaagaattctgaatagactcgcccacaattgatggcacaattaccttctcagcattaagctctccaggctcactaattgctgaatcttcaatgactggggtgatattagttttgttgtacaatatgctatcggtgccaaatgatttatctgaaacatctagggtagaaggtatgcccacaccctttccgctatggttatcaattgagccacgattgcttatactttcatattgctgcttcctcgaataaatttctttagctgattgtttatcctgttggtcattagaagttacatttgcagaggagctgattttgccacgcaaaagactgtcttcgcgtccagaatttccaacctacacagaagtatatcttaaaatggaaaggtactaaaagacaggaatcaaaaaagaaacattaaattatcaaaatgaaatatgggtgtttgataacagacccaatgccatatacaaggagccagaaagtccaacatgtgactgtcctaatgctattagctcatttaacaatggttgttaacaagccctacaatctttgggaagttggggatcaggaatctctagcatattatgagtaggtaggtttgatgagtaatcaaacccataaaccacaagacagacaactcaatctatcctcataggtgccattccaaatttcttatgattcaacaagattgttggagtcaatatccttgatgacatgtaaaaagatgctcgcacaaacatatttgtgaatgaatcaatcattaaatatctaatgtcgcgaaaattgccacacaaatggttaaaaatctaaaggcctataacagctcacttccaaataatttcaagccaacaaaccaaatttgcagaatttcgataatgtataagaagtgaaaactaaaactagagattcataacttaccactgctggatgggaatggttagattttgctccaagacttttatctatagctgtactcttaaaacctggaggtacaagtggtctggatgcaggagcttgtgaaggaacagacattttttcagaaccattatttgaacccagaggtattgcaacatcatctgatccagtgcttctcttctcttctttggaatcctcccgcagggtagaaatgtcaaaatcaactctactcttatctatattaaacttctgtttgtcttgtaatgatttatgttgttccttcctcattgtttcaaaagaagctgagggataagttgtaacatgtcaattcaacttcaattgggggcaaaacaattaagggccaaatggagaagtacatggaactgatgtctacaggaaaactctaggatcaaagtacacatacctcttctctttctttcctcttctgccctatcttcacttgtggagtcggaagaaccaaatgtttcatcattcaaagagtcagtaccctccctacgtaagtgaggtacagcctgaagataattagataaaaagttaagcaccatttgtcatgaatgaaaccgtggttgactattctgattataaacgagcaattatagtttgaaattgtaaaacttccttgtcagaattttctaacaaatttaacacaccaaaagtaaacaaaccttgtatggacggggaggttgatacggttcagtagttctgtttagcaggtggctttcattctgtctaaccttggatgctgatgctccagcagcatatccagatggtcttggaaaggaaccacttcctagaagtccatcatgctcaggttgctgccacggccgcctggattggttgccgtatcgctttccagattctgcatagcaatatgataaatgcaacaggttgagcataaaatttcatggatcaattgctctatagaaacagtacaaagttaatttgattttgatcaaatcaatcacttccaaattacaacatcatactactgttcatgatacacgagttaatgaaagtgaggagtcctatgttcattgtgttctacgggccattattcatgctagccttcaggcacacctcaggattgcagggagaggcttaagcctcaaatctttaaggggcacaccttgagcatatgaggcatgagctttacatgtctagctcaatcaaaattgagtacatctatcttttttcattctacacctaatataagccatgggatcaaattacttaaatacagattagacagcaactatagaagcggcagtgttatggtttggagaggtaacaaggccacaaatatcactatattatattatctatgatttttttactccgcctagttatggtgttatacactattcaaacttccaaataactgtagcctatagtgttttactttttttaggggatggcgacacgacaattatgaaatgttaattaacacaagttttatttagtattacttagtctacatagaggagtataagtgcctcatacattacaccttggtacctttttcaggcctttcaaaacattactctcatacaaacatcaataaataaataaaaggacaaaaaaaacactcttgcattattggttaatattttatcaaatgccaacagctcacacgactgtacattagttagcaacaaagttaacacatgatcctttaaaacagctaaaatattacttggttgtattgttgtaattctaagggcaatacactgaccaccaaatgtagcagtactaccaaaaaggcctaagaggaactcttataagaatgatatccattatatgtttggaattaaatagaatatcaaacatgattaagaacttaaaaggcatagataattatcttgaaatagtccacatacgcatggagggattctatcactttgaaaacaaattattaatcaaaatttcacctgaatcccaatcagattgcgagtcactatctttgtcacttcttccagaggaacgactttcccatcttccctgaactcctcgattatagccagttgaatcccctttagtgggtggggatgacccaaactcattacgcctgaaactattcagtgataatccaccagcagttctttgccggtcttgggaagcatcctcaagttcactgatagaagatacgcattaggaccaacaaggtgtaacctggttcgccaacccaccaagaaaaaaaacaagaaaagccagaaccatacagcacccaatcccaactacatgaaggaaaacaatctaaatgtatccatgttagaatcattaaaagatagaacttaccttaaaagtgaccggtcgaacccacttggcaacttcttgcaaacctctaaatcacttaatgacaacagaaaatccctcgtatatgagatctttaacttcctggaatattcaagcaccaataacaaaatattcaataatgatatccagttatctacaaactaagtcaacaaccaaaaaataaaaaagcataatacattacttttgggtttcatctttcattccagtaggaggctgatctggtaactgtaggtcttcattttctaagctcattttgcaaacccttctttcaaacaataatcctactccagttgactaacctattcttcgttctcttaaccacaaaacccacctttcattaccataagcaatagttcaagccaaatcgatgaaggaaaacccaaaatctatagcagatgagtcaatccaaattccaaagacctttgtcaaaaaagagctccaatacatataggtactcagagctattccagttcctaacccagtaaaaccattttcaatagtaaaaaaaaaaaaaaaagaaaagaaataacaacacctcgtccgaatagattccccgatcccaatcgaaccaaatcaccgaaatttcaaccccgcaaattctcaaaaccctaaatgtcaagcaattttcatttcccgatccagctaatccaaactttcagaagtcgctaatttcaagaaaaaagaacgggagaaaaatttcccaattcaaactacaaaacacatctatatcaatatgtacatctacggaatcaaagatttttctgcgccaaaaaatcaagccgaatttccacaaaatctaacttcttaataagcatcctgctgaaaccaaagaaaaaacctagggtttagaagttctccctttcgggttcttctgtaagctcgaaaaaacgactgaatggatccaaatgaagagagagatggggacaaagtgactggaaactttcaggttgacgatctcttaagcttcttcaccatgcgatcgattagagagagaaattaatagtgcgagaagtagtggcaagcaatcaggcaaacaaacgccaaaaatgggttttttctgcttcttccggaaaatagtttctccatcttcacggagaaaatagatattatactgacgcctataacttccattaatattacaataagacccccaaactaataataattatagtatttcaatgtgtacgaaaatttagtgcatattttttttaaactatgttatacatacaatctaaaagatatacatcctttgtaatgttatattagtaaacatgtcatgtaacgagtaaagagctatattttttgacattaaggtgttgttgtctaaattttttaaggtatttattttttatggtttcatgataattttaatattatggttaataaattggcttactaactcaatttcaataaaattttaatacatgatatcgtattttgacaaaaaaaaaacatacatctttagataatgcatatatatatatttaaacaagtttttaatccatcaaaaagtatgcacactaattcataaacgacaaagattaaacatattcttgaaaaattggaggacaaacttataaaaaccttcaacatagatcaaaattaatgaaattatatcaactaaaaaggaaaaagtagatactatgacaaaaaatacaaaaagatttggcgaaataatctaatcaatcatcatcgtcaacacgacacgcatattcatacaaactaaaatctaaaaaatacaaacaaaaaaatatacttcaactaattaagtatttatttgcaatgagaaattaaacttagtatttatgacgcaaattacatttcttttatcctataaagacaaatgttctatctcaagcctcagcttgaagtaaattcaaaaactaaaaaggactttgaaatgtatataaacaattagggactttaatagaataacttatctacagcttctcaaaaactatccttagcttggcgtatgacacccaaagcttctgcat

SEQ ID NO: 43039 - DNA, 3266 bp, Cannabis sativa
  modified_base (53)..(55): a, c, t, g, unknown or other
ttcatatcattttagaagttcatgtttgggatgttaaaaacatacttgttagnnnatctagatcctagtaaaataattcaaacaatttctacatgtaggcacctctttacttatttgaatgcatgaatggtcaatgtcaatgaagaaaagattccaaacctcatcatgtttttcaagtagtaaatagaaaccaaaatatattctacgccctcacaagataaatcatctgtaaactttacacaaatgcctcaattaaggatccagcaacaattattaactaaggaatttcacatcaacccaaaataccaaaataaaacattataaatcaatttcacataagtaatttagattggtagcaaaataacaaggtaagtaaagcatacataccataataaaaaaaatcaacagtttaatcttctaacttccttctatcaacaagatcttgtattttggttataagtgaagttttggctcaggtttggcccagacgacataatcctcctatacttaggtaccaacaggatagaggagtgaatattaaccttattaatatactatcttgttttatggtagtaaagtgatagtagaatacctcttacacatcatgacccaaaaatttcctgtcaaatcttgcatcttctaacttgacacgtccctccaattctcaactaatttatttgtcagtaccggtaaagagagtcattcacggattacacatcaccctaagactccattatagagaatctaagaatagatattgtagtatatttttgtaccaaagctcattcaaatgagaaaaagacccattaataattgtgaacttcagttcatctaatttcaataaatgcaaagtaataagattgttttcctttctttacttctcctaatatataaaaagtaaaagatcagtttgtttatattttatacatgatcaccggagaaattttttgaaattttcgggtctcataaactttccaaaaagcttgctgacaactcgttggagaaaccttttgtattaaccttttgaagaaattagaaacctgaatgagaaaaacaaagggatggaccattctgaagctgaaatgaatcaatcgacaacaaataaaaatcgaatgctcgatcgtatacatgaatatatagagtaacgattatgtggatatttcaatcgtatcaaccaaatcgttgttcacctcaatcgttcattacagagctgatcagttgacaacaaattgaattcaattctgattcgaaaatgggatgcacaattgaatcgcttcagttgtgtttaaactattttctccaacttaaccttataccaatttttctacaatagttgtagaaaatatttggaatttccacgattgattctgattcaaaaatggaatgctccattgaatcggtctatcgactacaatacttgcagaaaatatttggggtttccacgattgattctgattcaaaaatcaaatgctccattaaatcagtctattgacttagaaatcttctactccctcgcttgagttgaattttgaaattaaaaattacactagtgatgatatgagaatatcacaggagttgcggtttaaaaaagccgacttaatggtttaatttatatatattattttaaagttaacgagagcgttagtcttctattaagtttaacagaataaaaagttcaaaactgtatctaatttcaataaatgcaaagtaataagattgtgttcctttctttacttctcctaacatataaaaattaaaagatcaatttgtttataatttatacctgatcaccagtgaaattttctagaaatttttgggtcgcataaattttcccaaaagcttgctgacaacttgttggagaaacgctttgtattaaccttgtgatgaaatcaaaaacctgaatgtaaaaacaaatggatcgaccattctgaagctcaaatgaatcaatggacaacaaattaaaattgaatgctcaatcgtagacatgaatatatagagtaacggttctatgggtatttcaatggtatcaatcaaatcgttttttgcctcaattgaccattacggagctgatcaattgacaacaaattgaaatcgattctgattcgaaaatgaaatgcaccattgaatcgcttcagttgtgtttaaactattttctctaacttacacttataccaatttttctacaatagttgcggaaaatgattgttggtttccacgattgatttcgattcaagaatcgaatgctccattgaatcggtctatcgactacagtacttacaaaaaatattttgggtttccacgattgattttgattcaaaaatcgaatgctccattgaattagcctatcgacttcgaaatgttctattcccttgcttcagttgaattttgaaattgaaaattacattggtgatgatatgaaaatatcacatgagtcggggtttaaaaaggcaccttaagggtttaatttatatatatatatatattattttaaagttaacgacagggatagctttttgttaagtttaacaaaataaaaaattaaaatactgttgaattaagaattgtcattacatagccacttttaatatataaagatatagcattttgaaatttttttaaagtgattttttttgtcaaaattaaagacacctaaaatactgattaaaataatattttcactttttaattaacaaaaaattactaattaaaaaaatattacaaaacacacctataatttatgtatttttgcctgggccatggattatttatggaaatatcaagatgctaataatgtcgagtcagcttctttgggtccgacttctagcaatgtaagtaatcggttggcctcatctgagacgaatctggttcttggtgagttcaatctttttgtggatgctagggtttgtgttgagaaccgaaaaatagggatgggggcttttgtttccaattgtttggggcatgtcctattctcaagtgcggctccttgcgcgggtttgttggaacctcacgttaccgaagccaaagctttgctctattggctttcttactgcgtgtagatggggtatatggtgattactgctttctctgattgtcagtgagcagttcttgctgttaatagcttggccgcttgtttcaatgagtttggtattgttcttattgatattaatcatattaggaattgtttcagtggcatattcctgttgcattgtaatcggtcaaagaaccatgctgctcattctttggcaaaacgagcgttagatttagat

SEQ ID NO: 43040 - DNA, 5669 bp, Cannabis sativa
ggaatttctttgcaatgaggagtccaccatggcacttaacaaagattttcggatggaagtgtaaagagcaaaatagaatgtgtgtttggtaggttttgctatcaaaaaataggtttatggagttaagtgtcataaatcgtaaaatttaggtagttttaccgctaatatcttttacttattttgcccatcactactcgatattaattggtgcaaatagttatcaaatctaggtcatcacatatttgagcaaaacacaataatagatcacatttatagattttttataaaaaaaaatattaaaatagggtaggcctttttttttagatttctatttgatgaaagtgtttagtgtagtaagcgtacacattttttcttttctttttatacatgtgtaaaaacaattgttttgagtggttataggcatagtctaatagtttcacatttctcctcacaaagaggaggtcccaagtttgaatcccgagccttctcccaaagtaaaaaaaactgctttgaactttatttttagaactctaaaaggttgtttggttgtgttttcaattttcagaattatattttaaaaaatgagaataaataacactattttggtgttttaaaaattcaacaatgtttggctaatgttttctaaaaattgtttttagattttttaacacttcaatatatccaccatgacataaatgtagccccacctcaaacttaggcccagccttggtctcagactcgacttcgaatcctgatcttgacctggacccagacccctgacccgaacccagttgacggacccagacctagatttcagacccgaacccggacccagactcagaccaggttccagacccaaatacaggatctcggaccggacccagactgtaatgccctactagcttaggcacgttactgtattttcttaattattgtgcaaatattttgctaatcaaagggtttaatataaaattttgtttaataaaaactttcataaatatactttacaaatacataagatttacaaatctcgggatccaagtttatttttcaaacataacaaaagacaacataacaaaatatgtcgatcaatgactaataaaactgagcccatgttgctcgaagatctaaacactctaggtttaaccgtcccgatatatacaattattaccgaacttcaaactcactgtggttcagctttagtcctgcccttacacctacacaagaaaacatatataatatgagtcgacagactcagtaaaaaaatataaaacataaacatatatccgacttgtaattagacgtccatacacctaattaccatgagtctatgacccgcgtccattgcgtatgagtctcgaacgttcttgactatagtatgattgaccataataccacatgcacttagtactctaggcatactagtgttggtagcatcaatccatactataagtacaactagccataatatcacatgcactcagtactactctaaacgtactagtgttggtagcactagtttgtacttcctgaaagtacaacctaatcataataccacatgcattgatcagtactgtaggcgtactagtgttggtagcattataagttcatactttttgcaaagcgtaacatatatttgttggtattccagtgcaactttgtgtacaccataccatgatatgttaatctgatggatttttgaaacatgtggatatgtgtatctattatactaatcttgcctcaattttgtaattaggtgtgccggttaatctgagtggaaaaattactcaacggttggaggccctaaggcacattaacgtaaaactggtaagtgtctcgctaaaacacttttggggacctaaactcataatcttaaaattttctattgatcaatagcatgaaagtaccctaaatatcgagaaaacataaaaattgaggtacctaaaaatcaccccaaatgggtcaccgtttacccagggcctgcctagagaaagggtaaaccttttcctcagaaagggtgaactgtttctgagcagaatttcgaaactcaatctttcaaacctcatttcaaccccaaacctgctcaaactttccagagcaccctaaaattatgttctaaacataattcaacaattaaagacataaaaaatccaccattgctgagctaagtttgaattttaaaactaaaactcacccaacgtttactacgtacaacagctactacgctcttaaaatcaatcacaaacagccacaagaaactttaaaatagtttgtaacccatcaaactcaaacataactaaatacctcaaatttactcataaaaccaaactttctcttccaaagacaagataaaagtctaggattttaccttcgatcttggctaataaatacacctcaaagtctagttgaaaaccttatcaaaaactaaagaacttggttcgaatttctcttgttcctctttggtttaggttaggccgagagagtgagagagggttaggagagagtaagttggttttggttctaactttgtttttgtctaaaaggttcatgaataatataatatattctgataacttattctttaaaaaaataataatctctaaagatgaaattaacactacaaaattgaatttttccaacagttaataagagggtcaaatatgaaaatattggaataggtaagtagaagtttttcccatcgatttagtaccgaaagaaagaaactgctggaaaaagtcaatgcctatggtggagaaccgtgggccatactaaatttttttttaaaaaaaaagttaaccccaactgtttataatttgttgggaatttgttgggtatacttaatattcccaacagttgtaaactgttgggaaggattctttttagcatgttattttacatcagattttgttttatcttaaataaataaataataaaataattaataagaggtaaaattaaatagggcatatatagaaaatggtgtaaccctaatgagaaaaaccaaattgaaagccctaatttcatttctctctctttcgtgacctctctctttatatgttctggttgtgcagcgtcggaaccaagccagggccaacaacctctggccagtgacgaacttagttcgtctcatcgtcgtgacccttgagccgagaacccctaaagctcatactctttctctaaaaattatttgactcaacgagcagaggtggcccgagccgagaacccccatggtggccttgactctagtggacgacgaccaaaggtggcccattgtggtgttgtgaggaaggcctgcgacgaatagaaacgaaagagaaggagggcaaagggaaaaaagatggagctttcgggtctgggatttttgagggtggagaacccattttccgagcttttcttcaaaaaaagaagcgacaatggtggtttgggatgtacaacacgttatgggattttcttcaataaaaatgaaacacggccggaatcagaatttgtatttgtagggtttttttttttttttgaaatggtgaaacttttaaggtttaaaaataatagttacaaattttattcatatttttctttattaataagtttgtttttaaataaagaaaatctcatataaataaacaattacatttattctttataaattaatttataaagaatatatttatataatactttgtcgacggttataaatagtcatttaaagtgacttttctgaacagttgtaaatcgtcatttaaaatatttttcccaacagttataaaccgtcttttgaagttccacatttttatgacacccacataactaacggttttagaaactgatatgaaatagtataaaagacacttataaaccgttgggaaaaccaattttattgtagtgaaatataacttatttggcaattgactattttgcccttacttcaccactaagtcatcttcaaacctagagataaaatgatcataaccaaataatacccacataacctcagtattctatctgtccattcaccattaagtcatcttcaaacctagagataaaatcgtcataaccaaataatacccacataacgatcagtattctatctgtccataaatcttgcccaactgctaaatcttagatactaaatcgtatcaaagtgacaataatgaccaatctgttgaatttctactgttatcggtcataaaacatgaaaataacaaatttcatatataacatgtatgacacacttagaattcaataaaaattttataattgagaaattatatcgctaatgcctatttttgacaatagacttatttttacactatgcacatataatcataaatagtaattttttttttgataatgatcataaatagtaatttaatcactaataatatgctaatttttatgtctaattatacggtcattacatagacctaaacgagacttggagctggactcggacgtcggacctaagacctcaaacgccgaacctcagacctgaacctgatctagaccctagactcggacccaatctcttaccttggttccagacccagaccccgagtatgagagagaaaaagtaaaatagatatgttggacaaaatttaaaattgtttttgaaatagaaaataacatttttgatgtttttaaaaaatttggcctacggttattattagtttttaaaagctattgtgctgtgtcgtagacttctcagttaaaatatatatgagtgatatttattggtacaacaatagtactttttgatgtggaccttattctatgttaaactataataacatgccacggtgttttgcaggccgaagaacatgtctcattgaaatgtatatattatataaaatataaaataaaaacatagtcaaacttgaggcaaatactgtaattaatacatgtataaatataatgctttgaaatgggatattgatacgtacacaaagctaagaataattatgatgataagaagtaatactagcacaagtagtagtagtagtaatagtggtatatggttggtttggctaagtgttgtgataacactaacgcaataccactggtgcgttggtgtgtttctgagcatcgactgcggtggctcgggtggcagaactatagactccgtaacttgggtgaaagatgatgactacgtcagcagcggcgtctccagagagactaagttcagcagcccagatgggtcccatctaacaacatctttgagagctttcccaacacttgacgagaataagtactgctacaccatcaacctcggcgaagatgatcacaaagaccgacgaatttttgtgcgtgcaacatttttctatggagattacgatgggatggactctcctcccacttttgacatctacttcgatggcaacttttgggctacggttaacatgtctctaaattcgaataggcatgttggttatgaggtcttgtattttccaaagtctaaggcaactaatatatgtcttgttcgaacctatccagatcagaatcccttcataaatacgcttgcaatccgaagcttagatgctactgtgtacagccgcgtccactcaaaatttgcaatggttaaggtgcaaagacattctcagggaactcaggttatccggtacgtacgtatataatggatataaaatgggtactattaccctatttatatatatata

SEQ ID NO: 43041 - DNA, 6668 bp, Cannabis sativa
tgtttcatcacttttcagtcatcctaatctacttccgcttcttgatcatgccattattgctgtcaaggttcgtatctctaaactgaatttcatatcttgctaagaatagataaattttttaagtcttttggtgtagttgttcatatctaaactgaaagaatcagtggcagtgaattacatattggactctgagtactgtcgttttccgtcattggaattttgttgccaatttgtatgtgtcaatttcctatgacgagaataagagagagaagattaaaacaaaagcaggtcttgtggatattatcattgtggatactttctagtaaagcatgcccaccctgtatgcgccaattttttttctggtttgcatacttgatagttctttctgtgtgtaatgaattagatgctaagtttttcaagcaacaattatctggtcatctatagtagcaatatcagtttttaacttcagaaagtttgattaacaaaaggtttttaaacactattggaactgtcaaaggaaattctgaaattgatctcaaataagtcgttgttatatatgttggcagccttcacaagaaggatcttggaagcatgaagcatacttattgtttccagttcatttggatggaacattgttggacaatgctaacactatgaaagctaaaaaggagttattctcgaccacagatgttcttcatatattccgtcaggtacatagatatgtttctttagaccttttcaactgagtgatgctagtacatttgtttcagttcctcatctatatgcaatgatgtgcatgtatagtaaaatagtttcaaagtttcaaaaagtttaacatcaaattaaatttaacagctctgcgcaggactcaagcatatgcacagtttagatccaccttatgctcataatgatgtcaagcctggtaatgtcctcataactcataggaaaggacaaccaccactagccatattgatggattttggcagtgctcggcctgcaaggaggaggattcaatcccgttccgaagcactgcaattgcaggtgtttttttttttcgctcccccaaacacacacacacatgcaatgaaattaaaaactatggaacctttttaattaatatttagatattctggaaactaatggcatgtttgtgaagactgaacataatttcatagtgtttttatattttaggttttctagcaaatgcttaactttatagttactgtttggataatgttgtttaaaaaatcttttcaaattaccaaatgtttgagtttttaatttttacaatttgaaagttcacattattagaatatgtcaaaagtagtgcaaaaatgggcacagatttcatctctcataaaatatttcatacttgtactgatggttgattctcattgcttgctgtgtaggaatgggcatctgagcattgttcagcaccttttcgagctccggagttgtgggattgtccaagtaatgcagatatcgatgagagaactgatatttggtcattaggatgcactttatatgcgataatgtgagatcatcctttcgtatttccatgtttataatgtttttcatctctctgtcttctttccccacatttgtttacgtatcttgaattgtgaaactagttatttgtttctgtacgtaccctagattaaaaactagttatttgtttcatgtagataccgaaagtgaactgatttaaaagcttccaactttaccccttttggtaaaagctaggtgaatttaaactagttatttgtttccgagagcttccaactttacccctttgccctgttgtagcctcagggttatacagatttacagactgtgtagtaaattttctgttttataatttgacagtgataaaataacaacatattttcataataatttaaatccttttgtctgatacctgggatctcagaacaaggtggatttttatttttgtaataaagagttggctgttatttcatattattccagctggactttggacaaaatgaaaaccttagatgctattagagtaacattttgtatactttgttgtgtaaattaaggtttatacccttgaatatattacaagtcgcagagaattggtgctgtcatccgtatgacatctttaggcgtggcattctactatgatcaccaattctatgttgcttttaacctagttatatcagacatgtataagttatgaaaatcacagaaggtatttaactttacctatgttattttttatattgtattagcgttgtttggtatattatacttgctctctctacttattattactaatatttgatggtatcattgtcatttgatgagtggctcttctgacaaacttagctgcacagtttgacagattggttttatacaattttctaattacatattaataaatgcaggtatggagtgtctccattcgaatatgcacttgattctggaggaagcttacaactggcgattgtcaatgcacaagtaaagtggccgggtggtcctaaacaggcatatcctgaagccctgcaccagtttgtgacatggatgcttcagcctcaacctgcagttcgccctcgaattgatgatatcataattcacgtggacaagttggtctcgaagttttctaattgatatacagaaagtactactcagtatagctgttcgtgtctttacctccagcagcaaacaatctaccggcaatcattttacattccttttgtactttaaaatataatagaaaaatattgagcccattgcagttatttctttctattttttgggtagttttggcagttctgcattggtttatgttaatttgttcagtcctaactgtttgaattcattcttgtaaaatttattagtttcatcctcccttggcatccataggttttatcaatttgattgaatagtataaactcaataattatgatatcaacccctctttttttttttttataccatgaaattttacatttgacactttgtttaaacattctctctgaggttgcagtgtaataaaaagtttctattacagagtatacaatattcaaaataacatatgtagtaaagctaaggagttaaattgcctggaaaatggggtacaaaggcagggaagtaactcatccgagaatcaaaggctggcacttagcatcataatacttcaattattgtggtcatcaatcatcatgttcttcatcttcattgtctgcattgaaaaacaggcgcatatcaaattacttttcattattcgacatgtctatctttattgcatattatgttgggtccttagctaatgaaatgtgagacagattaggactaggtcattaccagatcgaacgtcgtcttccagcttacttgtcttgattttccttacaagcatccgaagcatgagtagccaccaataaatatgacaaaggagcaaaccgaagagcagggtgttaaataggtagtaatagacaccatgtaccataataatatcctcacccaagactgaaacagcttcatatctgccgcaaaacaatcgaagcaaaggttatttcaatctcatcatgtaacacactgcaccagaaaaagaatatggaatagctttgctctttcccagatttcaaaacaatggtatttgtgtttggtagggtggattgaagaagggatggactaggggtgtgtgaaattgggtaattcatccttagttctatttgtttggtaggtaagaagagtggcaaaagaaagaaatggctatagattgtcaatcctttgggcccacaaaaaacaatccctctatatctgggtggattgatacaaaaataaactgttgattcatcactccttcaatccctctatatatggaggtatgggttgggtgtgtacctcaaagctttttctttccctcctattataccaaacaactttgaggtacacacccaatccatcccccacccatttttacatccttcctaccaaacaaacatctatgtttaatcttagcatttcatgactaaagagagaaaagaaaaaaccataaaagttttacatgccaatttaagttttgcatctgtttcgtaatgcggttacattacatgaaaaagacaaacagtaaacaaataaaaatgaagaaaatcagctagaatgtagagcaggatgttgaaactaaggaaattgatttgatttgattttttaataaataaaccatcttcgtagtcttctatcatctctaggaaatagaagcataacataagtaacatgcaatttcaaatcaatgaataatttagcaaatgtaactcaattcttgtaaagtgaactcaccttgtactccaaagtatccagaatggatagtaaataatgcgcagtagggtaaatgagagaatgaaaagaacaaggaaaacgctggcaaacccttcatagtgactatactttgccatctttgcaatctctaaaaccacatcagttccttcgtggatagctaaaatgagtgaaccaactctagcaaaccttaagaagaaagacaataaaatagaggaagtatatcttgtttagcatggcttggagtcagtcaagtttctttgtttgacataatgaatggaatctaaactacaatttgaactgaaacatcctcaaacataccttaacatgtaagaaaacaaaattaaggtgactgatgccaagtgatgagccattgtgacgtaaaagtcggatcgccttgtttcccagaacaccagagcaaaggtagagtaaatgtagaatccaccagcatacatatacagccccttcaatttcattctgccaatcaagaaaattaagaggaatagtcattgattgtaaagaaccacaatcacaagcacaagtaattcaagtacttgtttgtcacataagtaaaagaggaatttggttcaatatgtcaaggaacgaacttcatttttaggtctggccaagtctgatttccaggaccttcccaaaagtatctggtattagtgaaccagggttcattataggtgacataaagagcgaaaagctctgatgaaaagtaatatagacatttccatgcagactctttgaacttgtttattttctttctcctccactgtttctccaagttcagctcataatgtttccttccaaaaatcaagcgcctagctattccctacagaaaacatcaccccatttgattcaaattaagacaacagtaccatctggaggagaaaagaaacatcttaaaaaaaataaatttttcattattgtttcaaatcatcgatacccaaaattgaaatgagtgtttgttatggaagatatgataagtaaaagacactttgatcatcgcaatgcttaaaataatttatagagcaaactaaggtatggttttgcataattaaaatctttttaaagtttttctttgcatatgttctaagcacaaggcttatttatacgttttataaatttacccttacgaataatgacaagatagcctcctcattcaggaagattttaaacaattcaggacaattcaaatgggaccccattctccattttactagtcatccataatgtagataaatttactcgtacactaaacgaagaacgcgaaacgagaagatagagaataaaaaacttgttcatatgttaaaaaaaaaccatgttgaaatacccgtaactggaaaaacttgatccttaaaataactaatattgagaaactcttcacaacaaataaatacagaataaaaaccaacccaatccctatttacctattccatataaatatatataatatattcatgggatttctcgactatatatatatgtaaattgtagaactaaaaaccagtaaaaaaaacagggccataacaaataaaacttaacaataaaataaaattaaaatgtattagtttgttgttgggcacataagtccaagctggagagagaaaatatgactcccaagtttccaacaacaaaagcggttacatttaacattgaaagcttctattcagtggtttgaaactattacattactttacatggttcaaagtttagttattattagaaaaacaaaaaaaaaggttttctcaagtttttacttttattttaatacatagaactattataagctctaaaactccagtaccaccacaatagaaagttcatttcttttctaagagagaaaaaaagagcaaaaagatttaagaaaaagaaagtgaacctcaaagacaaatctgtcgaggaaaagccgaacagaagggaaaagcacagcgaaaaagagaagaaagatgaagtcttgagctactgggtatgattccatatcccaattatcgatccaaccagaacaagagattccagactcacccattttttccttttgagagaaaaggaaaaatgatcagtaatggcagattgatggtttggttatttgttttgaactttcaatgaagaccataataaaataatggtagaagctgaagctgaagccggtctggctgctctgactcgcttttgtcaaagtacaatttttttttttttaaaaaaaatcaactaagctcgtaagagtatatcgatccacatttgcgatgcaggtatactatgttttatattaagtattatattatgagttctgaaggaaataaatgaatcaaaaataaataatatttaatttagagagatttaaataataaatttaaatt

SEQ ID NO: 43042 - DNA, 6723 bp, Cannabis sativa
ccagtctgtttttcttgattagctacagtaagtttgttctggagatgatgatgtgttttccgagaaggtggaaatttaaaataagatgacactaatttatattttgaaattgcatttcaggccctcctacttgtcagtccttggagtttgttggatcaatgatagaaggtcagcaactgagctttgttgcatcttacagtggagggtgagacttgtactcttttctttttcattatacttgatgctataaattttggattttttcttacctaatccaattatggtttatggtttagggagagaggatcttgtttctatgattggtttagagttaaaagtaatggtgccaaggagaaactgagtactctaggtgagttctatttaggatagaatgcatgtgcacacccatacaggattacaatattaaaacagttaaaacttttctttttatcagagtatctggatttgactcttaatgatgtgggaacatgtgttgaacttgtgtacactcccatgcgtgacgatggaatgaaagggaatcctagaagcattttatctgatgtgattgcccctggtaagtcaaatgttaattgtgggaattcaactgagcttcccttgtggttatgtatttaaaatagattattatacttattattcgatgattgcacagtgctcttttgaacagctagtgaaattggctatgctagatggcacattaattcaacttggaccttatgttaatcatgtatgcatattaaacaaacaaaaattggtactatacgttgtattctgtgtgagaaggaaaagtagcttgcagaggatcacaaaaagttgcagggttgtatttgcagatatagttaaacttacatattctatttgcaaaaatgtttttaccaaaaaaaaatgaaaggtggcattcaactgtactaaaatcctcaaaatgaacttagggaaagagtactctacggaatataaaattcttaatatgtgacattaggcttttataggacaataattttcaatcaccttttacatgataattaccttgagaaggtgaaggtcgttgccaaatttactctctgttcagagtttcacgcttctctttttctataaaagattgttagacagctttcttgtatatggtagtttttagtgccacacattgttcgaagcaatacaggtggaagtttgaatttgaatgataatatatgtggtttccatcatgcaattgctgaacatgcttcatgcatattctatacttaggatgaaccaaccatcatgtcaaggatagaagaatgaagttaattttgctttattcattatataagatttatgttgctaaagttattgaatgtccattcaagcaaaccctgatccattagttcatcctttcttggtacagcggatcctgtgggaagggagcttgtaatccctgattgttgcgagaatgaggaaatagttccccaaaagacatactttggtggacaggaaggtgttggagaatatatttggtatagaacaaagagtaagcttgatgaaactgctctaatggaaatatctgatgcatctgaagatgtggttatatgcggcaaaacactgtaagttctcataatttgtcacatattctggataattcagttctgctctttatacttaatataagtgtctgacggatgtgcatatgtgacagaatgtacacaccattacttgaagatgtggggcattatttgtctttttattggttacccactcgttctgacggaaaatgtggaaatcctttagtggcaatttctgactgtcctgttgaaccaggtatgatgaatgccacaatcttctgttataacgtaaggttacttctgttgaatcattgatactcagtgatgtgaggacctactgcagaactttaattctccattgtgatcagcattatttgattagtattttctttctcttgtacaatgtctagcattcattttttctacgccatgaatttcatttacttcactgaagtggtatgtattgtgcatgtttctcattttatgcttctattggtttatttacattggccaaagtaattccgagtgatataccttattatttgatatgaaacttcctgttcgacacattgtagtcttttaaatctgctatttgactgactgatttggcaaattgttgcagctttacctgtagtgtctaatgttcgcgctgtagagttgtcttcgggtatttattatggagaaggggaatattttggtggatatgaggggtcaagtctttttagttggtacagagaaactaatgatggaactatcattcttattaatggagccatttctagaacctatgaagttaccgatgatgactacaacaaccgactattatttgggtagtattctttttcttatgctaactgctctctctctctctctctctctctcccctaatatgagtagtagaaaaatataattgaatcaggtttcacttcttgtgaataagttagctaaataatctcatgagctcacacaatgagacctcaaaatgataaacctgatatacctagtttgcccatttctttagttacatggacaatttagtgatgttaaggaatgacatgcatctatcacttggatttgagaatcattagtaaatgtttctaaccatttttctcacaggtatacacctgttcgttctgattctgttgcgggagaactaaatttgtctgacccaactggaattattcttccaggtaagagatttcctgtctgatcatactaagaactttgtctaggcaactttgatcaaatgtcagactagcttagttgctgtcattttttttattgtgggtgttgctagtgctcatattctttaacatcagacattaatgctcgcatatagaactttaaattgcttttggatttgacattccacagaacttccaaaagtagaggagcttgtcctgactggaaaggcgattgaaggtgatgtgctaactgcggttgaagtgatcccaaagagtgacacgcaacagcatgtgtggagcaagtacaaaaaagatgttagataccaatggtatgtaccatgtccatctaaaggctccttggcatcatcaccattgttgacttttttgtgatttgcaatttgaaaatggcacgcacatacatatgtgtgtatacttcataaatattgcactatagggaagttcctcaaacttatgcaaatataactgtttacttattttgctgcactgcaggttttatttatccgaatcaggagagaagaaagactttgaaccattaactgcacaacgttcttgctcgtacaagttgcggtttgaagacattggacggtgcttgaaatgtgaatgcattgtgactgatgtgtttggaagatcaagtgagcctgtgtatgctgaaacagcacctatcctaccaggtactcttttaaagctaaagtaacttgaacagttaagcaagttgctttcctattttctctgatgaaagaaaaggttgagaagagtgatctagtgttgtttttaatgcatcacacatggaacttatctttaatttaaaaaagaacagaaaaactagctaaaaagtcttcatttggtcatatgctgcctggtgcatcacatttctttctcaaaatgctcaataacgtttatcgatggttttaccgattcttgtattttattatttatttatacaggatattcattagattatggagtctagtctctctctctctctctattatacacacacacaaatgttatggatccattagtttgaaaaacaaagtcttgctgttttgcttactttcttacatggttggttttcgaaaattatcttctgttttgtggatacttttttccttaaaaaatcccttgtgatttatttgggcagggattcctagaatagataagttggaaattgaaggtaggggtttccataccaatctatatgctcttcgtggtgtttacagtggaggaaaggaaggaaaaagtaaaatccagtggctaaggtctatggttggaagtcctgatttgatctctataccaggtagagtttaaaccctctactatttctcatattaatgacatttaattgtcatttatgccccttatttctcaaatatctatcatttagaatgtgatgaaaaggggaagaatattatgtctaggtaaggagctaatggggattaccatctatataaataatatatagattttttcatatattcaatgcaaaattatgttgcaggagaggtaggaaggatgtatgaagcaaatgttgatgacgtggggtacaggctggtggtcgtctatactcctgtgagagaggatggagtggagggacaacctatctctgcctcaacagatcccattgctgttggtaattagatttatctcactatgattttttcttttgctggagttagaaattagcatcttcagcaccccttccgtttacggatattatttggtttatttcatagtttgaaaaatactgttgcacttttcttgctttctttgtaatctgtcattgatatcaaaaccttattgcaactcttgtcttgcttttgggaggtttgatgctttcctaccatcttttaccgatttaataatataaatatggtccaaccaatctatcaaaagccttctcaaatttacattgtctgctttgatttctcacagagcctgatgttcttaaagaagtgaagcagaagattgaacttggatctgtgaagtttgaggtaattccacaaaactaaaagcatttgttataaagattctccttcatagactcacaagcttatatttattgatacaggcattgtgtgataaggatcgatctccgaaaaaggttgattattacatgatattcttgcctatttcctaatcactcttttctttttcttttgataaatttaagtgtaaatggtctaaattctttagtgctctctattgcaggttccggtagtgagcaaccttgagagaagaattcttgaagtcaacaaaaaaaggattaaggttgtgaaaccaggttctaaaacgtcttttccagcaacagaaattcggggtacttatgcacctccatttcatgtaagtttatgctgaaactcttgacacttcccatttgctgtagatatagtctttccttccaaacagccatgtggactttggatttccttgagttttctctataatatctgattgaacaggtggagctgttccgaagtgatcaacaccggcttaaaatcgtagttgacagtgagaacgaggttgacctgatggtgcaaactcgacacctccgagatgttatagttctcgtgataagaggccttgctcaacgattcaacagtacatccctcaatactctactcaagatagatacatagtaaaaaacatcaatcaagactgtccattttatttcatgatttttcaatctttcttgtccatggaaagttctgtcattattctcattgttttcgataacacgatcactattggtattggcgttttcaacctgttgtgtaaaaaaaagagatattgtaatgtatagtagttaggcttcttgtgtcaaattagtgtaaattatgatatttttgttactacagcactcaaatttgcaggtggggtggtgtacggtattctttgtgttcagataattttgttgtgtattctccacccatgtaaaaaactacaacttttatttgtttatttatttcaaccttaaaagttttcttattaccatagtttaaaaaatcattagaaaaaaacaatactttttgtatttctaaaatatgttctataattatgtaaaattcttgaatgtttttcttccagaataaatagtgtgatcaaaatctgttgtaaatcaaatttaagtcgtattatcagttaaatttattaaagaagtgtattatgacgtgcggaaaggtggaaagtagtagggatgtaaacgcgacgggtgcggggattgctcccacaccccatacctccttaaatttaatttactctcatatctgtgtcaatacctgtttaaattaaagtggggtggggtggggattatccgacgggagatggattctcatcaaatacccattacatatatatatatatatttttttaaaaaatgatgtctcaatgagaataaaaaaaataatcataaaaatttagtaaaacaataaacttaagtggaatagtgtgtatagtaaaaaaaaagagtataatcataatcaataaaaagcataaagttaaagtataaagataaagttaagttattttaattgtaatagttataattttaaaacttaaatatatacaaatatcatattggagcgggtatctaatctcccgcccctgttccgttttcgactcgaatatgaatctttaaacctatactcgccctcgcccccgaaagttaacccccgtacctgccccatactcgaactcgtgagtataattgccatccatagaaagtagtatgtttttggatcatttattataatttttctttcacacaacaacccttttattcataataaacttaaagttaggatcatgtgagcaacaccaaagtattatcttactagaagcacattttaaaaactatatattattattattattatttcaatcagataacttctaaatttgttgtaaatactaaattaaattataaaagagtgttgctttatttctttgttgcaaaagtgctttat

SEQ ID NO: 43043 - DNA, 5059 bp, Cannabis sativa
tctgttaaaccaaaaaatgccgttaaataggcacttttaatatataaagatagggcaataatataaaaataataataatagttttcttttttgtaagaaccgtatccaaacacagtagaactccccttcttattccctccttgagttaggaaaacaaaaagagaagaaatgaacacttcttcttcttcatactgctttaccatgtggggcttatcctatgctacccgtccttatcctgcaccaactctgaaaacctcagtatccatgttcactgctcctcgttcaagctctcaactctcagtccctcaaattactcaccattatcatcttaatcacagcccttttgttccagaggtgagtatttctcacttcctggcaaaacatagaattttttattttcctcagaaagttcggattttgtttggcaaaactttctgtaaagggtcttcattcatttatgtgtgcaggttattgaagctgcggactccttatattcagagttcagagcagtggatgatttggttgcttgcaataccagccgtgttcttaaagctttcaaaaatgcccgagttgggtcccatgtaagtctacagtttaaagttcaatgatgttttctcattgaaatttacatacttgagagtgagggaaaaaaaaatccgtgattttgatgtttaggatgagtgattcagtaaaatgtagtgaaagaaccatgcttgatgaaattagcacaagcaattatatgtactattcattatgcaatcatgtaatgttttattgttcatgggataaataatgcattgcccttttctgtatggttgtctaatgtcattggattcatgccctttcttcattttggaatttaggtttttagtcttaccattgctgtgtatatagaagttgtaactgattctgtctggtttttcaatggaccatcttgtcctatcatttaaaatcagcactttgccggatgtactggctatggtcatgatgaagctgggggacgtgaagcacttgaccaagtatttgctgaaatcgttggggctgaatctgccatagttcgctctcaggtctgccatttatttctttgcttgtgtttatttagatgggtatttcgtacattcaattgctcatcatccgtgtgccagtttttctcaggaacacatgctataacttgtgcattgtttgctattttaaggccgggggatgaggtgagctatcgattgaatgttttataggaagtttaaaatatttcttccaatcttttattttacaattcagtctagactgaattatttatcagcttttggcagttgcaggtgctccttatgataccttagaggaagttattggaaaaagagactcccatgggatggggtccctgaaagattttggagtaacataccgagaagttcctgtgagtaactactctaaaaaatgtagaagtctcattcctactttatgaaatgctctcatgttgattattttcagctagctgaggatggtggacttgattgggataaacttagcagggctttgaaacctgagactaaatgtgcactcatacaaagatctcgtggttattcttggagacggagtttaagtgtgagtgagataggtagagcaataaagataatcaaggtaagcttctcaggacaacaagcactgtgtttgtgcctagttatttgcaacaatatttttccagttctttaatatcgaatagttactgttttcgtgttttactcgcatttaacagatgcagaaccctaattgcttggtcatggtggacaattgttacggtgaatttgttgaaaatattgagcctccatatgtggtatgtggtatgtgacatactttttcgtccctttctttcaatatttttgagaatgatcataaaattaccaatatcatgtgcagggtgcagatttaattgctggaagtttaattaaaaatccaggtggaaccatagcaccatgtggtggatatgttgcagggaaggagatattggttaaagcagcagcatctcgtttgtctgcaccagggctcggagtagattgtggctcaactcctggtgatattatgcggtcttttttccagggattgtttctttcacctcagatggttggagaagcaatcaaggtactagaatttgcagcatccttgtccattacttaaaattaaacacactactcgactttgatttttttcttgtgacattagggaaccctgcttatagctgaagtaatggcatcaaaagggtataaagtagagcctcttcctcgtgttactcgtcatgatactgtacaggtgagttttatttattatgtatatatcctatgaactcttaaaagttaattttagctaaattgtttacatgtattaacacattactgtacaatgtttcatatcttataaactcttaaaaaatcctgttctttttcaaattgaagatgtagtaatctagttctggggaacactttgcatgcatctaaaaattaatatttaatatgatctaatcaaagctaatacagaactctctagattttttgcctccacttgacccaagcatgatgcagacacaagaaaaaagctcattttatgatacctttcaggccgtacaactcagaagccgtgagcgtctcctttctttttgtgaggctgtacaaagaatctccccagtaggttcattcactaaaccagtggctggtacaactcctggatatgcctccgaggtctgaccatatgcaagctttaaatcaagttatatgttatgatacgaatagatcttttggtgctatttctttctatcaatttgttctcttcatcaccttcttagctaatatgtcacaggtcatttttgctgatggaactttcattgatggtagtacaagtgagctttcatgtgacggaccattaagagaaccctatgctgtatattgccaggtatgtcgtggatgcttgttcttctccatttttccattcatcctgatttgaatcatagaatattctttgatttgaaagttgtgtcaaatgtaaaggatataaaagtatccagttgtaatttatcacttgttttttccccagactgaatcacaagtttacttaaactttccattgcagggtggcacccattggactcagtggggactagtccttgaagaggttttaaaatccatatgaaagaaatctgataaatgacaatgaggataatgatgttgcttcggttaagacattgctgatgacaaatgtgtacttctaccataatacaggtaaagccatattgtgtgcagttaaattatcttattctatgttgtgacatgtagatttcttatttcgtctgaaattaaattaatgtgatgtatccttagatttaattattatcgatccacattggtacattggtaatacattgagtttctccattgctgtttgtattattttgcatggaatgttgactgtttatattgttaaatcaagccagcaaggctctgctgttcttgcagcccgagacaggtttgtggttttactgttgagaaggaagttgaagcttgtaaaataacatactgaagccaagcttacaatgaagacgaagacattcatatattcatttgtgggttcatgtgactttttgtattgaaataaaacagcgtggattgacttcgacaatacaaatcttataatcaatttttttttttcaaatttttttaaggtttacgacagtaacacttattcttctttttcattatcctggaaaaatattttacattaattagattatagtacatgtagtcggattaagttaatagatgagaaaaactcttttattttactgcattgtataaacgcagaaatgtcaaaagtgtttttaggttattacattgagatgtatatatagggcaaaggagaaggcagcccatgaagtaaagtgggccgaaaatagtggctcaagatgaaatatataagttttttaagttcatcttggttacaatagtgtgaaaatagcctgggaaaagaggcttggtaaggatgtcaacaatgttatttttggtggtgacatgaattagctttagtgtgcactcttggatcttctctcggataacatggcagccaatcttgatgtattttgtgcgttcctcgaatacgggatttttggagatgtagatggcggcagtgttgtcacaataaaggatggcgggatctttgtgatggatagtcttgaaggagtaacaatagccaggtgatctcacaaggggcatgagccatggctcggtattctgcttcagcggaagaacgagaaatggtggactgcttttttcgatttccaagagataagtgatctgcaaaggaagacacagtaacccgaaacggatcttctagtgtcactgcaggaagctcaattagcatctgaaatttttttgagatgaaagtctatgtgtttgatatataagttttcagcacataagcagataagttagtggaagatgctgagtaaaaaaatagcccttggctagagaacccttaagatattgtagtattctatgagcagcagtgaggtggggagtcctcggattggatagaaattgacttagtttgtttacggcaaaagagatatcagaccgtataatggttaagtgaaaaagtttaccaatgaggctgcggtagatttttggattttctaatggttttccaacatcggatgagagccgaatgtcggattccattggtgtgggagcagtagaagctcgtaaaaaatgtgtgtcagtcaaaagttgaagggtgaaaggtcgttgagagacaaatatcccaaaggaagaacgaccaatctcgaatcccaagaaaaacgtaaaggacccaggtccttaagctgaaacacagagttaagttgctgtttaaaagatgtaacaacatcatcattattagaggtaatcacaatgtcacaacatttaagggcgagaaaaatgcctttatcatttctgatgaacaaggtgtggcctgagagagactgagtgaaaccagtagatagaaggtaattgctgagttttgtgtaccattgtctagaggc

SEQ ID NO: 43044 - DNA, 3930 bp, Cannabis sativa
ccccagccaccattgtcgttggacaaagcaaggtttggggggcagaaattggtggccgtaacgatgaggctgccggggagacaccatcttgggtcattgttacatttcatctcgtaacaagccccacagcttagcccattgttgaacagagctgtgcttagtgctgcagtgcttgtcccgtacccttggctgtacaaatttccatagccacaagcacctcctataaaacaaataaaaaaacccaatctatacattaattagtttaatttaatttgagtcattgtaatctatagtaaaatttaatgtaaatgaaatgtaacttacccattgtgccagaagcatctcctcctccataaaatgtggcatgaccagattgccatcctcctccatagtcaccgtaagtgcctctaaggcaaaggttaaggaccataaataaaagagaaagggcagagaaagtagcaatggctgccattgtgtaattatttaatgtgattttctttttcttatttctttggttttggttaaagaagataagaggtgttgtgagctagtgtggtaagtaaaaggggcataaagggttcccttatatagggatgagaggtaagatggtttgggaaagagtttgggttttatgtggggtagtgtcttagaaaatgacaagttaccggtgttagagagccgaaaaccaaagccacaaaaaaggatttcgtattttcaggtcatttgcaagtatcaatgttgcacatgcaaatgttccaaaacgtctaccaactgctaagcccaatgaccctacttgcacatgcaccatcaaccgttttcttcgtgctctttctctaataccttatattattatactttataataaggaaatgaataaaaaacaatatttaagttgatactgaaatgcggcttattagttagacgtatggaaaaatgtcgttttttcttcttaattagcccaaagtttcgcatattagattacaatttaatgcctttaattaagggagggtggtccttggttttttattttacttttcaaagagtgtatataggtctaatttggtgtcctgtcgaagatttgtacctaacctatgcaacacaattatactcagcgaagacttattataggtataggtacatttttccatatgaattaactagtacacattattagtagtaaaaaaaaaaaactctcatgtatatataatagtcttttaactctataaactgaaccaatatacaatagtattctatgtttgccatctaaaatagtatatagtcttttataaagcagattcactttatcttctttattcattcattaaaaccctatagaaataagtaccgtgatcatatttttgtttgtataacaagtcttgtccatatatataaaataattcacatccaacgacaattaattatataataattaaaatgatgagtcatattagattaatcaggtagatatgcagaatcaaatgtcggttactattaaacaaaggtttagaaaaaagaaattaaataataattagtatataaaaatcaatgcagtgattgtcaactagaaataattaagaagaagaagaaggtgtgcgtgtggcttagtgttttccatgattggtaagtgattagagtacgtggatgtataatttttttatactaaagaatcttatttatttctaattacaattttgttggtacatgattttatttaatttaataagttgaaagcttttggggattggatatgtcattgaaagagtttggaggtgtttagtaatgggcctaccatgttaggagcacatgcaaagtcccggccttagcggtccatgatattcatgcatcaatatcaaaaagaaaaaaaatatggttattttcatctctatttatattacaaatttatatgtgaatacttaattatatatagatatactatagttgcttttatactacaccccatcaaaaagatgtatcgatggaactcttaactgtttcagtatctataaaaatataagatattttgcaaaattttaaaaaatttgaaaaaaatttgcaatataaaaaattaatgtttaaactgtctatttcacacgcgtataaaataaaaagttactcgtgtaaaaaactctttgaacactgtttttgacgtgttaaatttttttgaaatttctcatgaaatgtcttacataactataatgtatacgaccataaaaaaaaatcagactacgtaattttttgaataccgcaataaattagggtgcatcaatacacctattttaaaggagtgtattgtaaaattttacattctatatatatagataatataataataattaaaaaagcaaaaccttaatttcatcttggtgtgcggtggtaaatgaatcatgcaaataagcatcttttttcgttgatcactattatcaattagaatttcgttccaaaacaaatctacaaatttgtctcttccttatgagagcttttgggtagaaggatttatagaatcaacaatatctttattattattattatttgcaaataaacatatttctttttctgtttttgtattttagtatgtattaaaatcaattgggtacggcatttgcattataaataaaaatttctcctaataaacagggttgagttaaacccctcgagatcgtaaactgagtaaattgatgccaatgaaaatgtcagtgcttatacatgatcagatctaagaataagaaaggctatttgtattttataatagtgtaaaataaaaacaacagtgtgatttgcctgcaccgaaattagggtttgaaagtcaaattttatggcttatgtacgtcaagcaacataaaatttattgtcaactaaatttttttaatacaaagaagaaatgatgatctcgatcgactaataatgaaatgaaatgaaagagtagatgatgactttactgtttggttcaaacatatacacaacaaattaaatcaaaagctaattaaaaaaaatcatacaataaacaaaacagtcagctcatttatttctatgtttccatttggcattacaagtgtcaccattccttttcaacagttcaacattttatatttatttatttaatatttagatgcacaactagtaatatagatagggcttagggaagtggattttaaattttgatgggaatatgttatttttgtgtggtagggactattactaaataatgaaaatggctttcacaaggggttgtccagtggggtggggcaaatatagagaaagacctattaagaaaggacagtagaacatgaaatggacaaatggtaaaacggtctcgaaagggtcagtttcaagtgggcagtttataacatggtgtggtcacgtatatatatatttatatatatattatgtattatttgtattgtaacccttcttacacatgatgagttctccaaacatggttctatccacatcccccaaccattgtatttatttatttatttatttttgaaatgaaccattgcatttattaatggagatgaattaagtgtttgttctaatttttttttgaatgaaattcatctttattaaatttgaacttcagtaactacattaggaagcaactcagttgtgacatctcccaaactgaaaacacaatcacgataagaactagaagctcttacaaaagcatgagcaactaagttcgctgaccgtttaacgaaaaaaaatagaaacatttctcatagtagcaagcattttcttacaatctttaataaccaaaccaaataaaaaaatcatatcaattgaactgcgagtagcttgaactactactaggctgtcagatttcaagacaacatgatgccaagagagggtctttaaccaactaagagcttccctcacacccattgcttcggctaaagaaggatccacattgccttgtttaaggacggtacg

SEQ ID NO: 43045 - DNA, 2865 bp, Cannabis sativa
  modified_base (2391)..(2396): a, c, t, g, unknown or other
aatgttagttatttttaatagaaataaattttatattcttaatatttttaataataaaatattaagaatataaattaaattgacaaattattgaattaaacttaaattaattaaacctaaatatatattagtctaaattataaactttaatatagttagttaatagtttgaattcgataaaattaataattaaaaagtaatagtaatgataatgttatatcaatatgacgaattgtaatcgtaacaatgttgtaatattaaataataaacgaatattttattatttaatatattgtggatatgattatttattttaaatttaaaaatatgttctctatgtataacatgtctgcagcacgtggaagttcttctaaaaaaaaggtgtaggaagtaaatataagggtgcaaatgttgaggaagcgatttctgaaggaaaggagctcaaactacatattacacttcctgaggagatggtcactccatgcgttcaacaacatgtgtaaacatccctatgaataagttcgcatggaaaactgtttctaaagcttaaattaattcaatgcggacaaacttgaggtatttaatatattattcttagacttataatttagtatattatttttaaatttatagttaatgtatcaattttaatgtgtaacttttttgcagataatttatgtgcccacgagataatcaggttttcgtgaaaaagtttgtgtgattaaaactatgcatactccaatactaatagcaaccccacaaccatcacctctcatccaaccaagttctaaacaaaaattccaaccttttttctttccctcccaagccacaattggaagaaaaagttccaaccccgatggcccgaaccccataattctaaataagataacttaaaattggaaacaaggaacaccaacaagaacaagcaagaccacaatccaattgctctcaaacattatcaagacccccctctaccattcgtccaaataaaaaaatacttcataaaaaatatcatgaatcccacaatgatccttaaaactgtgaaatcaacgatacacttttaggagggccccctccttctcttgattcaacaaaatgacattttaagtcccccataagataccaagaaagagacaacaacgaagctatatgacgaagcatctcccaagtatccttacgtcaataaaagtttaggttaccataaacacatgtaaactaccagtgtcaaaatgcaatctacatgactctgggaacatcgaaaaagatcaacatttacctcagagtcccacagaaggataaggcccccactcttcccacaataatcccacatgaaaaccattaaaaaattccaacttctcacgaacttgaccagcacgaataccattaagaattgtttccatcaaaaacacaatgttatgttgtgagctatggactagcccacgtaaactattgaatgcaccaagactgtccaacccccgagcatttcaggataagattttcatgactagcggcgagatttctctgcaaccttggtcgatggggccatgatagaatcaccacccaaaacttttcaaatttttccatccttattccttaccctcaacattatcaccaccacactgtttcttggactcatcatcaagacaactcttattatttttctattttatgcacaaactattacagtgtttgtaaaatataaaaaaaatgttaaattttatttagtgtggcttacaaaatataatataactttataatcgtcagtgagactatgttgtattactttgtgtaatataaaataagaaatattttctgtaaatttaaatatctattattttattaaaagtaactaaaatttattttaatcaaccttacaaaaaatatatatttaattaatttaattataataaagtaattaaaaattatatttatttaggtaatttgtttttcaaattttataaaaattattttattcatgtcaatatatttaactaaaataaaataaaaatgcttaatcctaaaatcatatcaagtagctcctctcaatatagcactctaattttgagcttaataattcttttatcaactcggtttattagataacgtgggttcaaaatttgctgtgaaaggcttttgaaggatttcataaattcatattaagttgagaaacaactaggtaactacgtttacttttaatactataatataatcgtagatgacaattaactgaattttgcagcaaatttagaaaaaaattattcaagaactcgtttggtacgctgtattgtaatgtattgtattagattatgttgtattgtattgtattagtattatttaatacaatacaatatttggtattaatttgtattaattgattgtgtaaagttatannnnnnttttaatacactcgatcccaacaccaactaagggtccgggtcccgggtaccgagtccgggttcgggtccacgtcccaggtccgggtccgggtcagagattagtgttgaccctaaatcctttgtaaatattataatacaagcttatatggaccatttattatgtattaaataatacaacatacattgtgtattaaaaaatttagtagtaataattaatacaatacattacttattctaaacatagtgtaatttatcatttaatacaatacgacatttatacggcgtaccaaacgagccccaagtgactataaaaaagtgtctacgcgttaaaagtcttgaattcgaatcccaaaatatatattataatagggaaatttgattttctatgcattttttatacctaaattagttccccaaactaatagttatagctattgaaaaaatggatatacttttccctaaaccctaa

SEQ ID NO: 43046 - DNA, 5728 bp, Cannabis sativa
taaaaggaaatgtcactaagtacaaatttgtaatttcgctgtgtttactagagaggttcatgttttttattttttgaaaaggaagaggttcgtgttggaaaccgttaattatcaggataagctaaaaattaatttctggactcttgatcagagacgagggggataagtggaagcagttgcccccactaaaattcttgatttataattttacacacaaatcgtaatattatttatttatttattgagaccataaaagaatatattttcaacaatatccttgctaggatttttttttttttttttgccttcactaaattgtcttcctctattttaccccccactgcaaatagggctgacacatctcttcatatgactctttcaacaaatatctttaaccaatcaatcaaccaagattaaaatgaaagaggaagaagaataagagaaagagaaaggagaaaagaaaaacagacatgacactttcattatgaagagagcaactgtaaaagaaagagacacaaaaagataacgataaacttagtgtaacagactttaccccagaaagattgagatgcattagccatgaggagagcttcaaaactgcactatcatcagcaaaagtttgagaagacttcaaactagttatgtcggtcttaataccagtatcaacattaagaagttccttcgaccacagttgatttcgaagaaaagaaactgcccatgctgcatatttttgcagttcatggtcatcagaattctgtgcaatgagaaatatctcttgcatcaatgatgtcaaatgtggctcgcatacagaacttgaaagtagaggaccaatgagatggttggacacctgtttcatgatcaataacttctgaccattaattcaaaagaacaataaagcaagaaaactgaatcaaagaaaagaaaaaaccccattaaggcaacataataggttaccttcttttcagaactgtgttgtagcaacatggattggggacgcatctgaaataaggttccagcatctgcacccatcgcattaacaattccaatcatggcacccaggtggaccaaggcagggtaagtgtcggaataacagcttctgaataaatctagcagaacttttacggactgaatttcaatagagttcactccttcattcaatatgcaggaaacaaggcttcctgctcctatgcaagatgccatcaacaagctctgatggaaaatgcttgatctcttgacagagagtaattctgaaataagttctttataaccgttcaatagttggtctacttcattcacatccatcagttccatcctcagaaagaaagccactatagagggtaaggctaaacatgatcctactgatagaagtgtctcaaagctctcagagtaagagccagaataatcaaccaacgaagttacatgtggaatccatgacattattaagctctttatcttaagaacagcatcatgcaatccagccctgtacacagcaccaattgagcttgccaggccaaggacaactccagaaacaccccatatatcttcgtccaagtcatcacagttctcatgtgacagttcagcattcaaatttgtatgtagaccatatttgctcgatgggaagtatgcagagagactttctataatattagagggaaactgagtgaactgacatattgtgaacaataaggtgctaactatctttccaagtaagtctgcttctgacatcttgtttggttcttcatccaagtctgagtaatcagttgcttcagcccttgtaagaagatcttggcatgaaaatcccaagccaactccacaggctcctttgacaagagtacttttggtattacacaaaacctgaaagcacatacttgagtaagaaacatgttgatctagaaccaagagaataaacagaagttgaacagtttgcaattcaataatcatattgacaaattatgacatagaaaagcatattcatatagatatgcaaataacaactctaaaatcaactggaaaccaattttagaatttaaaacaagctacatgtaataatatctaattagcttaagtatctatccatttccgcataacctgtatttcagagtcaaaagatcgtcttacttcacatctagcagattagtacagtaactttgctagtgtaagtttttgagagagaaacaagcaaaacaagtgggagaaaaaggaatatccagcatggatagcattacaatgagaagaaaataaaaattaaacgaaaacaaagtgacttctcacaaaatggagataagagaaatttcaagtgttaaaggttgtttggcattgacaaaagtaacaaaaaattacaagatttatgttaacttgtaatatgccttgcactatatgcacccataattgcctactgaaggtaagaagcataaatgtaatgattaaacaagtatgcaagtatgactattgaacttatcaaatatatcatttcatatagaaaattaggaaaataaaaaagcccacgcactatttactagactcataataggaagtaatcaaagtagattagtatacctcaagaagtccatttatgttttgaaatttctgcttgtgatcagttacatgcaggcaactagtgattaatccaagagaaattgcagatgaccattggcggtgctcatgctcatcctggaacaaccaactcaaaaggaaatttgatgcagctgatttgacagtatggacagatggaggcaaaacctaacaaaagcaataaaaatttggaatgaacaaagcatgtcaaccacgaaattactatctgctaagtgggtcttactttgactcaaatcaaaattaagggactttgtctcagtaaagattaatgagcttttgacagcctcaattgaagattctatttctaaatatactttataagcaattaatttccaacaaatttagtctagaaagcattggaaaaccacacaaaaatcttaccctgcaaagtgcaccaatagcaagagcaatgttttcagaagatctaggaatagcatcttttgcaatatgtataattctctgcatgatggcaagatgggaaagaaaagaaaagagtaacattataatttcataagtatcattgttgtgaaaataaaatgcatgaaggaaaattcaaatgtaagtttctctctcttcaacagatattggaccttcagaatgtcatttgcagcttttgtagttttctctaagctgattgatggagctttagcatcaacatataaaatatcagctcttagccagcgttgcataaatgctttccatgattgaagtgaaagaagagcaacataaatgtttcttgaaagtggaagagatgcagctaattcaagaagtgtcttctcatatgcagcatgcacatcatctagtccctgaacataaattaatgttagaacaaaaaccataaaatacattatattatattatacatatagccacaattattcacctttgatgtcctttgggaattcatatctttaggagtaactgaaagacataacagagctgcaccagctaactctccagcattagttcctttccctgcagaaataatttcaattgtgaaacagaaaaactaaatgaaatatttgtttaagtcacatggaagaaaaaaaaacatcaatataacaagagggctaccatcagtcgtgagagttatagatgcgcgataaatgtaaaaaatgttgatatcattagtccactaaagttgtgcataaattaatacatggagagttatcatttttggattaacattcattttaggtatattatttacagaaaaaaaaaaatcaagataccacttttgaccttttccaagaaagtccaactaattgctaaccggtaagctcatatgtaatgttgtataataatgataattacgataatgtaacaaaattaattacagtatctacagtatacccaactatcaatacctgatggaaatatcgcctgaggaaatacatccagcagcttctcaattttacttcttgctactcctttttccttgcgtactcgtctccttgttctgaagcatacagatgtaaaggttttcagaactggactttaccaaaaaaaaaagttcaccaagctaatgaaatagagtatatagagtctgtgtgtgtgtgtgttgtatatattgcttacatatgctcatttgttatgatcttgacttggagttcttccatggccctaagtacatgcagatttgtttcagaaaacagaacctctgagtacactttcttgaaatctggaattttttgctcaaggagtgatacctgggaaatcatgcataaaatagaattatctaaaggaaagtacataattttgatacagactattagctagaaaatctaggtactccactctggaaacacagcttatgttccttaatactgagaaggattatcaagggaatacatatggaagtatcacaaaattcacctcatactgagccaaggcttctagggcagagactctcgccttttcccactgaaattcctcctgatcaggggaagtagaggtgcttataccccacaaaatgtgcaaaacttcctgtgatggttcatgatatgcttcagcatccattgcaccccatcttagaagaaggcaaatgctgccaataatcataagaatcaaaacttgttaaagaaaaacaatatacaatccttgtaattattatttgctttctttcaatggatattggaagtcatattaaaatcaaaatgagatattattttgttagcaactacccagtgttgatccttttatggcttcactagatcaaagggattgtttatggggcttggctataataagctaacttttttatttgtatcattgtgttgctgaaataaacaagaaataacaaagcaaaaactgcttgaagcaacaattttcttaaaaaaatactatgtccaatcctttcctgaattcacatgagccataggaaactctagcacattgctaggtatgtccctgaagagtcatatttaagcaattaacacattacaatcaagtacatattttcacaactacggtgttcggctatgaatttctactatgagtcgaacacctcaatattccatgagaatgataactaacatatggtaaggaaggtggtagccatatgaacccttagtctagagttaacacttcaaatgtagagatgttacctttgtgcaagaattgaatttctggagtagtcaagcacatgctttgaaatgacgtcccaggctgtataaaaatctgaatagcagtatgtaagaaaaggattctcataacactatttgtaaactaagaaaacctcctccagttattataaatttaaaaagaaaaaaaatataaattgggccttttactaaaagtaatttttcaaagaattctaggttcccaatctctttttctttctttaatcacacacacacacacaacaacaataacataaatctagatcaagttttgggaagaaatatgaggacggaaacatgtgtagaccaacatgcattaatatatatataagcacacataaaaggtcacagaaaatccagcttaccaactacatcagcttcacaaagatgagcaaggctttgaaatccaagagcttggattatagggtccctgctctcaatacaagcctgtcaatacaatcccacaaagacaaaaggaacataccttagatttttctccatgaaacaaaactaca

SEQ ID NO: 43047 - DNA, 3432 bp, Cannabis sativa
ttttttttttccttgaataggttataactacttaagtgaagtatgtatgtacctgagccgaataagaaagccaagagaagtgcccctgtcgacttaatcacacgacgcatatcagctctgtacaacaacaatggaacagccgttggaagtagaaaactccatgacaatcgaaaatgcaggagcttctaatgatagaacccctaaattggttgcaccaagtccaaggtgctcaccaatgctccacttaatgcactcccaatccttctcttctgctccgatcttgaatcccataataaataaatattcttcttcaagatcaatataacttgctaattcaaaatatgcataaaagccagttgttcacacccaagatttcagaaaaagttaagacctttaaacacttctttttcactctgctaaaataagattgtaaaattgctctccatttggatgctgaaaaaatccagaagcaacacaaattaccaaaaactgccacaacacaaaaaaatcagttgatgagtaactttgtttaccagagaccaaaatgagaggaacattgcattgtgaactaacagtgacacctccaactggattgttcttactctttttctgggtaccattaccaattcttacagaaaaagtacaaacagaaggaaagttttgatttttattattaaaacaagctgatgagctttgcaggatactagcgccatcgataaagaatgagaactctttacaatgaaaagcatcggcaatcatgatcgtttctactcacaggcactgacacaattccttcctcctaaaatcgattcagttgcatttaatttaatcgtttcgatgttaaagtatgaaaataactttaactttaaaaataaaaaatgtaagcactaacaagtaaggattagatccgaaggcaaagttccccgactctacacaaagttacgcagaaagtaacaaatttgaagatggttgtatgaattagattttgattagaaacctgaaagcaaaactacatgacaatcagcttaacgaaaaccttcttgggtaatgttttgttatcagaaaattctaaactgatcaaacttacatcatatgtaatgaatacagttttagtttcagttacacctacaaatttatgttttatctaagaaatactgtcttcacgcttctgcttctttgcagtagggccttcttcctccaaggttttcagcttgttcttaattgcagctattttagcactccgactcaactgtcctgagttactaccagatgttctggctttgtttgtctcactgactccttttgaagaatgttcggctgattcaactgtgtatttattactggcaaggtggacaattaatgggcggccacaagctaatcttccatgcattttctccttggctagtcttgcttcctgcatgctcactttaatgatggaaatcaggaaatgcttataaaccaaaatcagaaagaccacaagtaacttacctctttggtactatactcgacgaaagcaaaaccccgaggttctccacgcttagggccacgagtatgccatataaaatcctcggatacaatttttccaaaaggagagaacattttaattagagccgccctgaaaaaaaacaggcagcaatatgacattaatcaagataagatattcatcatctaagaaacaactcaaaatccatgcggtttactcactctgttattcttaggtcaaggttaccaatgtaaagcttgctttcgctcttctcatcaataaatccattgggatcctgcaacaaaacgaatcatgttatttgacttgatttataatgtattgattaatgaaacataatggtgacttagagtcttaaaagttcatagcatgattaagaacatctaattgatatgctgcatagtgaaaacaatttaacaattcccacacaaatccagtgcaaagaaaaacaaaatgtcgacattgcccattcaagggtgccaaaactttaaaagaactaatagataattaccctaaaggaaacatgatctaaattccattccctagatagaggtagacaattaaatcatgctacctttttcttcttctttttttcttttgcttaagggaaccccttaaaggggaccgtagaacatgctacctttagagacgaggatgagggaacatataacctcagctaacacttgaaaatatgtacaaatgaccaatatatgtatggccccatgcttggaactgatgcttattatacacatagcagaaagcatacactggatttcttattgaacaaagataacccataaaaatgagtccaaagaagatagaaccccatgagaattggacttgtcttcactacaaatcccattctaaaatggctattttattttagtttgcaagtgtatacaaagtcattcaaaccacaatctccaacacaataaaatttttgttacgtgccatacccaaaatgaagatttctcagtctcgtttgcaaaatagttttaagcagtttaggataaatataacaataaaaaataaaataataaaagttccatatgatcaaatataccatggcccaagagcatataaatccttatagaaaggccagcatcactgtccgtactgacctgtaattctacaccaaaaagaaaaggaaagaacgataagaacatcaaaatcctgaataggtactcttgatctatatatgctgataaacgtactacgaaaccgattggaaaaccctagatgctaaaccccaaggaatggaagatgggttttacttactcgcaccaataactcggcgatgcacctgatacggagatcgaattgcttgccgtgccccgacccaattaggcgaaaagactcaaaaaagcttcgacacacagaaatgccacgttccaaattcaaagacttctttttcttgatattttttcgtttttcttgaaagggagagatttgttctttctttctttctttctattaaactagttaatgttaatggtagtgcataatataaatattgtgagaaataaatcctgattttaatttagctaatgtacatggacactgctgtaaaaaaattatcaataatttagataatgtcccttttgtaaaaataaacaatagtaaatgttttctctctcttttttttttttttatcaatatatttcaatttctatgtttaaataattttttttttgggtaagtctataatacattttctaaaaaagtgtttgtttactgaaatttttcagaaactgaatatttaaaagctaaagaaataataacttgcaaaagtaaagagatgatttttttacgtggttcgggtgtttataaaccttagcccacgagtcattctattagcctttgaggatggtattgatgtgtttacaatacttttgcaggaaactctaagtttctattgaagaagaaaaaaa

SEQ ID NO: 43048 - DNA, 9765 bp, Cannabis sativa
  modified_base (8853)..(8855): a, c, t, g, unknown or other
aaaaaaaagatatattgtattaggaaagctcaaaatcccaaacaaaagtattcagtactctttcttttctctttctttttttcctgttttgcatgcgccaaaacaaaactcattactggtaaatgattcatcatattgcgacaagaaaagaaataaaaaataaaaaaccgacctcttacagaaccttgtgaacaaatataccactctcccaaccttttttctctacatgaagaaaaataatgagacaaattggattaaaaaaaaaaaccgaaatatgaaataacctcaaatttatgtttgctatgttttctttcttttagtttaaattttcccaccaaaggaagcttattgtgtagcaaagaccaaatatctcaaacttctgagcttctgaagagccacctcagaccttctcacaactatatcaaaagaatgaaaatcttatgccattacttgcagcaaacaagttgtactcttcaacagtggttttgttcttattgcaagctggattattctcaccattatctgttggagctttggaagaaaaatcaccaacaatctcttcttttgaaggcacggggatcgagttacatcctgtcgaaagtgccacaggcccgccgaaatggaacaaagaaaagctattgtcgattgtatgcaattttccagaatcatcgctttgacatatttctccactcagtgcgtgtgttgcatgagctccaactgaactcgtgcagtcttcagttgatgcatttgatgcttcctgcactgcatgtggcttagaaatctgggtcggctcctctgaattgatcacattggctttggcaattggctgataaaatggcaccgggccaggggcaaacaaaggagtaggtagatgctgcacaggactatactgcatgcaaaaccgtgaatttccattcatactgtaaccaagaggcccggcatacatatagtgattggggtgggagaaaggcataatcccattgttgggagccacaggccatgaaactggattttgatggtagtaacccactgttgaaggagcctgaaacactgggaaatgtatattattttggttatgcattggagacaccacattttgatgttgagaagccatactaacagtagataaaccattatcaaaagcatgagcaatttttggtggagtcccaaaaatgttatttcctgtcccagtctgtgaattcacatatgttctggctcccaattgatctcctccatctgccttctgatttgtctccatcctgactacatggccattagagacatcattttgaatggaaatcgaagtttcctttccttcggattgctggctggaatcttctgaatctgaagttgatgaggaatcatggttcccagtacttgaagaagctgtattgctgtcaccctcacttagacataatgaacaattatcggaactagaactgatattcgcaacaggatctgcagtcctgtgtgttgtagggttataagaattcagtggagaatgatcctgagacaatctgatttcttcacgagaaacttcctttgtgttgtcaaaatcctgtttttcatcttggcagcctgtataactatcagcggtagagttagttgattcctttgaatcattaccctcttcatcaattttgcatgaatttatgctaaattcagctgaacatgtaacaacaccagatgatcttatgaggctattattaggttctgatccctcagtctttaaagcagatgatttcaaggtaacatctgaatccgaattacttcggacatatttcttttgagattccaagggttcccaaactttcttggaatgaagtaaatctctactggagggattattcacagagctgaatttgcttttgggtcttccacaactatcacgtgtgtgatctatttggttgtatttgctgccacgataaaattgcttggacatatctaaagtagactctgacttgctccctgattttgtctcccggccaactttgcttgcagaaacatgtggctcaacctttgctctatattcagtattttggttacagctgcaggaatggtagtcatatctctcaactgttcttccattgccggagcagtgaaacttctcactaaacttagtaccacaatgtcgactaattggctttgttccatttgcccttaattgcctattagataaattgatggcccttggagtctctaagttatcaccataacatcttgaatcagatctatttggcacaggagcattctcttgaacaactgcaaatcggcgtctgtcagaccatttcaaagattgatctgtttgaccttctttccaaaacttcgatcttcgataggaaaactttgattgttcaacagtaaaagaaccatactcatctttcaaattaagatcctcatcatgataatcatttgaaaatagctcatcttgaatatcgggagatcctggcctggatggaacattatcacatgcttcaccaattgaattgctgcagctaacggaattatgtgcctcctcatcaactaataatgaatcttcttttggaacatcaggatgatcagaagatagatttagttcagaaaagcttttgtccttatccttttcttttccttttagcctttccttcctacgaagctttttctccctttcttttgttcttctcctctctttacgttcttcttcttcgcgcttttctttctcttcttcttcaagaagtttcatctgtaagaaaaattatgaagtcatcatcagaagggattttcctcaagtactagtttggtctcttaaacttatataacccagcatgtaacatttaacttgacatttcccgacctgcttctctaatgtaataatttctttgcacgcaacatgaactcgttcttccaacagctttagtgctagacaaacaaagatactatgtgcattttggcgtgctgttccttctctaaaggctttctcaacctgaaaaataataaacaaacagcagaacaaatcagcaatagattttctcgccaacaaacatttacaaattttaaaatacactggcacaagcacattacacaaaacaacaatccctcccatttttcagatagagtaaaaaagagaataaagcaacaatcagtagactgatcatacctgttccttgaaaataactgttgcagcatctagcagaaattctcgagcaagttctggactcttcgcatgtttttgggggcgagaacactctccatccagctcatttccatccttgtccatggaatcatcatcctaaaaaattatatataaattatataacataagatatagcctcccataatattaattgtataaatacttgaaaattatgacaagaatctctattgtcaaaaaagaaagcaaatggacagtaaaaatgagcttaaactacctcttcttcttctgcttcttcagcatgctcaaaaaatcttctaatgctttctcctctcgttattgttacaaagccatccccaactacaagcctgcagtggacgcattgtccaccttttaatgcatgagcctttacagaaagctcagtgcagcggccatctagtttccaagccctcaaggtgatgaagcatgcactaacaccaccaagatctagaccatctaccttaacactcccattcatgccaacattttcaaactcaagaatatcacattttccttcccctgttccaacggcccactcaaaatgatggtatgtcccaacagtgtcagcgaaagtatgtcgccaatcagcttggactgtgtcatcggacacctgcaaaatcgacaaattaacacctaatgacacgcgaattgcatcatctaatatgtgtaagagaaaatatgcattcaatacaatgaggtctagttttcaaaattgttgttgccatcaatttgttctttcaccaacaatttacaacgaacaactcataagagcaatctagaagtaataaattaaggaaaagaacaaagccacacctcatattgaaaggctgtatcagcaacacagaaccaactagtgcaccgaggttctttccgcatgcgcttcagttccttcagttctttgaactcacgaataacatttcttctgcaatctctacaaaatctcttgctgtcaaacctgttgcaagtaacccaaattcttaagaaaacagaatcatcaaacacagcactcttaccaacaaagagcacaaataacaacaattcaatggaataatgaaccaatggatatgaagccgtcatgctaatttcaagaaaacattattagatcagtgtagataaaaggagagctttttttatctttatctctctcacattcattccctcccatttcaatgattgcatacaagccaacaatattaacttatagggccaagcattacttccaatttccgacaaatagctccttagtaagtaataggatcaagatttattgtctaccatatcactccttaaaccagaataaacgagcagcacaccaatttccctaaaggataatgttttattctctagcccaataactgcgcccacaatacagccaatatgaagccttgaaagtgagtctccctaagggaaccttaataggagcattgcataacattttgttatccatgacatctacaatctgaaatatggatcaactatgttaaaattttctgtcctcaataacatgacaaaacgattaacaatgaaaagcaaaaacccaacacaaggaagtggttttacatcagatatgaaaaagggttggatagattcattgatattcactgggtttacagatgactttcagtgatattcactgggttggatagattaatttatttacacaaggctttggtgcacttaccaaaaactgccaacttagaagcaggttcagtatgcatgaatgttaacacatgtatctgtgttaagggatcccctcaactgaattcagcatctaaagttaaaccagttcaaatattttatcacctaacgattatcgaccccattattttaccctaatgagaaggatgatattaactacttctaatggtttgctggcaaacataatcatttctatgcagcagaatactaatccaattcagagcttaagcacatcacatgcttacaaattttagtttcaagctgtatgaacttgaaaacttcttcagtttaatgtagaaagtaaagtttcaagcctgttaaaaaccctttaaaaggaacacaggcaaaagaggacatggcaatgcttcacgctagagtatattatcctttctattggtcagttttctcaggctaccattcatgatataattattaacattatgtttccactactaacagtggctcgactcttgacagttgtcatactttcttccattgaatattgacatccatatgaaaaggatatgtgaataactaaacacctgtacatgagcctctcaataaaatcttcttccttcattcttaaaagagattgacgagtttcttctccaagtgctgaccaaaaatcaaccaatgtgtcacatgatagtctagcagtgtgcagtgcacatgtttcccttgttccatgtcctcttccataacctaccagtccttggcttatccatcctcgaccacccccaccacaagcgtcaggatacagtaactccctttctcgttccctagcgcgtgcactgtcaaatacctggttaaagcaaagtatcagcaattaaatgttaagacatattacatacatttaaagatgttttacaaaatcatcaacatttacattttggagccccttgagagacttcgaatacaaatagcaatccataagtgtgagtgagttgtcctttgttgtgatcaggcctccccaagggtggacagaaggatcttgaatttcttcttgatttatgatcattgattcaccatcattttgatttgtcgaggctcctgatctgttggaggggagatgcccatttgctccctcctgttgcaaagatttcccatacataacaatctgcaaaaacccttcgagcaataacccattgcatcgagagcaatacatgttcttacgtgcttgttcaaagagggtctgtttgtcaatcctcaaaagctcctgccgatcttgtggagatagctcattccagaactacaatacaacacaacaaagttgagtgacttagcgatgcatttcattctgaactgaaatgtgaaataaagatgcaatatacatctagcattaccttacatacaaaagaaggttttcactctaatataacatcagtaagccatcaactaaaaaaaaggcctaacttggtttaactacacaataacgacatgatgacaatcctcagcttcaaaattgttgatgccactatcttcctagaagttagtatatgcaaataaccgaaaaatgtatgcaattaccacattcataaaataatgtcactgataggctacactatattgatcataaacgtcttctaagcaaattttatggacttcgtgtacacctttatattgatataaagactcatacacaaatcacaatgtgatcactaaccaacaaccaaacgtgttgaaacctcacaagaacacactgcaaataaattgaacaagatccaatacaaattaaatagctatcaatacttaaagaacccaattccgaaagagtgatctacatcagttccaaacaatcctaaaaccattagaagcgctatagaatgaatccagtaccttctggagctgattgcaactaacatcgtcgcggtgcttcgaccaaaaactattgggcgaagaaagcgagtacatctgcgatgacccattactgaattggtcatttctttgcgctaaaccgggcattttgttcaaactctcatagagaaaaaatataaaaaataaaaaatcattcgctagaaatggtgcccattctcaaccaaggtccgataccgttcgaatccgatgaaaaacaaatcatctcaataaatccaatacaataaacccagaccaaatagaaaaagtgaacgaatagataactttcggatcgaaaaaaccaagaaaagcgaaggttttgggtggatccaaatggattgaattggaggtgaatccaattccaattagatagccagattgggggtgcttggaggataggaaaattaaaaaaataaaaaaaaataaaaaagaattcaagaattagaaaatggaaggggtttttggttgaagacgatgagatttggttctgcgtatatatataaatgcctaagaaaaaagaagaagaagaaagaggctttcttttttcctctgtaattatatattggtatatagctataacaaatagagaattataggggagggtggggtttgcattccacggttaaaaagctaactaagaagaaaatctatagagagagaaaacaaaacaaacaaatagatagagaatcattaaaagaaaaaaaaaattatatatattgctactttgtgtcattgcaaatttaaatgggtaatcaacctttacaatttttgtttagtaaaaaaaaaagtaataaagttataattaatggaaagaaaaaaaaaatattgacactaattttattttacgtggtgggacagagtcacacaatattaacaatgcagcaattcactatcgacagtgaaactcctcgaaccaggctagctcattgtctaaccgaaaagtatgttttatcaaactatgagctgcagaatttttatcacgagtcacatgggacaaaactacccttgaaaatatagacaataaagttataatatcttcagtcagcaccccattgaaaaaatatactttcccattattaatattgacactattagtagaggagttttgctaatatttcttatgagttatggtcaatctcaattagataataatatcatcaaattggactattagctattgaaattcaaacaaggcataaaattgtcaatgtatttgattgactcgtaagatgtatttgtacatctttttatacatatagtatacttttcaagttaaatgtatagacatgaatacacctaactagagaagttagttcccaaactatatttccttttcctttcctttttcttataattctcattttttttttattggtttaggctttaatttttccaatgtaaatgatctgcctacccaactaaaaagagagagagaatcaaacaattcaattatattttgtggaagaaggtaaacaattttataaataataataaaagtgtctatgttgcatatcatatttacatgttttcatcttttttttttctttttcaacggtttatatataggtgagtatctatgagcttaccttattctgattttcttcaaaagtaaataaatgataaatagtttcctaagttgtttattttgaaagggggaagtctaaaagcacttattttgttatcacaaaatgagaaatgaaaaatgaatgattatatgtagttcaatatatgttataaaactgtgagaagagatgacaacattatgtgattgtttatcaacaacattatgttgtgattgttttttataaacaatcacataatgttgtcatctcttctcacatatttagaacatatatgacatgtcatgcaacatttctttaacaaccaaaatgaattataacgagctacttcaggctagcttaagtgaccataagtgggtgtgtgtgtcttggaggtcctgtgttcgagtctcagataaaacatgtttataatatataaatgcttaaataaaaaaaaaaattataacgagtttggtaacaattttttaattaaatttttatttttttaattaaaaaataaaaatattttccataaatatattttataaaacagttttcactttttaattttttaannnagaattaaaattttaaaaattttgaaaacaaaataaaatcactctcaaaattgttttaaataattttttttcttaatcaatattttagactccgacctcaacttggaccttgggacccagaccccggccccagccccagtcccggacagaccgcgtccctgactctagacccggacctagacccgacttaaataaatcaaaaaataaaaataaaaatgaaagttatcgaacacacttttattttctatttttaaaattagaaaataaaagtatttatagaacacatttttattttttaaaaatacaaaatttattttggtggcatttggtaacacttttgtttttaaattttttaatcacaaaaataaaagtaatttttttttaaaaaaaaatattttaaaatatgttttataaccacgcttgtttttcaattttaaaaataaaaaaaaaataaaagtgtatcctgtaaattttattttcatttgttgattttatttaagtcgggtccgagatcgagaccgggggcgagtccaagtctggagctgggtctatgttcgatttccaaggtttaagttgagattggagtccaaaatattgattaaaaaaaattgtttcaaaaaattttgatagtgatttttttttgtttttaaaatttaaattcttaattataaaagtaaaaagtaaaaacagttcatttttacttttctaattttaaaaagaaaaagactgattaaaaaagtgttaccaagacacctaaaatttttgtgattaaaagaaaaaaaaaagtgttatcaaacatccaaattaagatgttttttttgttttttttttttttgtgggggtgacccaattcatgaattattatggttctttagcattaatattgtaatattggattggatttccttaa

SEQ ID NO: 43049 - DNA, 2552 bp, Cannabis sativa
ctatcaatactaatcatacaaagattaactttgttggcttccaatgactaatacctatttagagatagaaacaaaattttcttattttgagatgaattttttgtcatattggttttagttggtctcgttttttctctttaatcgattgggtcatgctgttatataattgtttttctttttcttttgtatatttttttggctaggaatggagtttagtatttcataaaatgagtaacaatacgtgcccttccaaaaatattacagacaagtgcgaaagacaaattttgttgttagttgaacttatcaaattattacgtggtgtagtgaccaaatcattggttcacttccaaaaataataataattggtgtaaaatgtgttgcattggtgtatactttgtgtgggcatatcatttattatccttttagaaagtcttatatgtttgacaattttaaacaacttgttaaataaatgtaaattattaaatggaaggaagcgaagaaatataaacaagaaatcaataaatctgcatctatctgctactgctatccgcttttatcaaactaaagttaatgaagtgcgtaataaaggaaagaataataagttggtgagcacttgagctttctgataaattatccttccattatagtgattacacacgtggacaatggaaatcgtgtattcatccaaattcaaacacacgccctgtaatcctatcgtatcaataaattattaggaattatccaaaacttcattcaaaccttccttttcaattttgtcaaaataaatttcagcaaaaaaaactgaaaataaataaatataaaaggccacgtgttgaaagttgacgcagaacacaacatttcccaacccgaccaaaggtctctaactccaccgcgttgcttctctgctaggccagatcgactgaacctttacctatccattattcttttttttttcaaaaattaaaataaaagaaacaaaaactcttttttttaaaaaaacaaataataataacaacaaaaactcattttgtttgaggaattgtaaatttgtaatttttttttttaataaataatttaaaattattattttggtcggcgaggactggaaatatgcagttcaaatcttggggcgtctgataatttgtctggtggttttgagagaagaaaaattaatacacagaagaagaagaagaataccggttttgggattgtttgaaatcttagggttttttatttcttactctttgatagtttctaatgctattttctgggagttccttttcacaatgcctaaagcttcttcaacgcctcgaagctctgcttatctcagtgctcttacccaggaaatccataagaagcttcagagggttcgtattgtcactaatttcggttcacctttttttttctttttaaaaataataaatgttgtgtttcagattgttttgtatgatatgcttaattaattgggttgagcagcctgaaattattgattatctctgaacaagggtgtgtaatctgagattttaagacaatttaacgaacgtctggcgatgattaatattgtaattgaatttgggagttgctggcttaagtttttttttttttttttgaataaatgttatatagttttttgggtaattgagtgattgagtgttttaatttgttgcaggcattagcttcgccgtctcaaaggcccaacttgttgcaggagttgtttgccgacatagctctagaagttgatgaccgagccagaggttagataagatttgtcaaaatctcgtactgctttttatatatgatctgcacagtacttcagactatagtagcaactcattatttggaatatgatgatgaaaatggaagttatgataactcgttctatgatgataagcgtttttaattcttggtaagagtgtggtctaggtattggaatcacgtttgttaatgaacatttccgaagagttagatcttgtcatacataaacacttactattcctctgataaaccgctgtttaagctgtcatacaaagctttaaaagcggtgttctcttaacttcttgtttttggtgttaaaaattaaatacagatgtgattcttcgcaaggaggaagatcttatttctcctgctgatgattatgttgatggtccattgtgcttttatgatgtacttgctgattattatattcgggttcttgagagtggaaaatccatcctggatttgattgtacaattatggagccagtcctttgcttctcacatctttgctctcctgttccacaagtgggtatgtgagctcgtgacttcatattgcctttgcagttattgttttgactcagaaatgttatgttattttagttataatgtttgctatagcatagaatagatcttgctgttgcccaagggaaatttttgcatcaagtgataattttgttgctgagaaaaagggtgccctttggatgcatacttctcattggaattgttgcattaagcattgactacttactgcagatgctatatttgtgaagtaattgatcttgctacttttttggttcc

SEQ ID NO: 43050 - DNA, 3005 bp, Cannabis sativa
ggtatctggccgagtggtgtccaccaccacggccaaaaaccctagacaaccgccacaataagtataaatcaagcaataaaaccagccaataatctatgtaacaaaattcaccacgtgagaacaaagtttgacctcttaagctcaaccttgaacaaacctcacgaccagccacaaacccaactcaaatcaacttaaacaacttcaatttaacttcagaatacaaaatcaaacaccataaaatatcaaagcaccctaatcccaaaatcaactaataaaatctcaacttataacctaagaaaccataaaggaagagctagggaatttaccttggactaaaacctacaaggccttgctaaaaatcttggattgagctgccaaaatccatgaatggctgctggttatccaaagagacgagaggaagagaaagcttgatgggagagagttttggataatttctaacttagaataaataaaataaaacctttgtttatctattaaagtcctccaaatgcatcatctaattacatctgctagatatcactaaaggacaaaaagacaactcatggaaaaaggccaaattgcccgttgcatgagccaaaaacatctttgccctctaagggtattttggtcaaacctaatacttcgaataattcccaacatttccaatgtctagctaagttgccccactactacaaaaatactaaaatgtaattctattggccaaacgccgcgttctaatgttaccgggcacaaaacatgcaaaacatgaaaaacgtgaaatttcatatatggcataaataatgcgccctgaattcaaataaatctccatataaatttgtaaatcataattagaaatctaatttcataattaagccttaattatttgataattccaaattaaactaagcggtctttacacggttatattttaaatcgatccatgtaaataactatcaacctatattcctataaataggggcaaattctacagaaaaagggacgaagaattttagagaggaaaagatatattatctatcattgtatcctatattcaaaaatatcataaataagatagactcgtagagtatgcaaatttaactggaaaaccacgttaaaacatctagtgttatatatacatttattatttctgtgaaatatttattacgtaaaggcttattacttttactcatcaaaaatctgcataatgaacagtttttattcattatgttaaagaactgaaactatttttatttatatttgaaacatctacttctggtggtttttccaatgactttttcggtgattttttaagcgacggtgactttttcagcgacttttccaatgaaaataactttttcggcactagtgacttttccaacaaaacttattatattgttttacaaatatgggatttctatctttttttacaaaaatataaaataaaaaatttcatatatatgtaaaaaaaataaaaaaaaataaaataaaaaaaaaacccataactctatagtattatatatttataccatataaaaaataaattcttataattttcttatatattatgtaatttttaaattatttttccacaaattcaaattggccaatagctggtttcctcaatctgtgttgacggttgttgtgtgcttaattttgagttcaaaggatgaataaattataaatgctcatacccttcatacaaaaataaataaataagatgaaagaaagaaagattgttggccactcttatatgacaaagaaatgcattgtgtgagattagaatgataatctgaattctaatattaatttcatcatcctataataaattgcgtaggtttttgtctaagttagtgggtattttttagttctctataggcatatctaagagactacttgaccaagtatgtcaccaatttacatataggctatattattaagtagcaattattggacacttataatacttaacaacttcaataagtggtgctctaaaattaattagagatattttttaaaatttattttcttaaattgtatacttaattacaacaataacactgtaacactcaaaaagtactatactcatcttttaacaattctcatatagtttaccaaatgaatgttcgaagaatatgaatatgtagagaacatatattgagacaaatttctagatttgtatgactccagatttctgtataccaatgagaactagtcatttctgtcaaactatatttttgttgtttttccaattatgaccccgtgccatgagcttcacattgccgcgcgcgcagtctaagttggccaatcaatattaatttcatcaccgaacattgcaaaccattgacaatattacaaaatatccatgcctcaaattaagaatgatcaaagggaatttttcatctacactacacttagttttagttcgaattgtctcataaaacttaattctatatgttttaaagtcaaatagtatgtcaatatagtaatctagattctagacacacatatatttataaatgaacgatagtttgtaatattgtggcttaggaacagggtcggcattgaaatttagtgggccacagaacaaaaaatatttttagaccttcatttagaaaaaatgtagtatttttcaaaactgataaaaaaaataatgtgtaattataaaagaaaataaattttttttggcccctgagctaggtgggccctaggcgcagacttagcccgcctatgctcagggccggccctgcttaagaataaagtaattttccgttgtgtaattggaaaagaacaaaaaaaaaaaaaaaagcacacacgaatataaaaatcttggattgtatgtaatttataaatttaatataagaattaaattaaaaatttaattttagagtataccagttgaattatacattgttagacatttatttgtatagactaaaacatacatgattatgaataaagtgcggaattaataaatcatatatgcactataatttaaggatcgaaat

SEQ ID NO: 43051 - DNA, 1848 bp, Cannabis sativa
cgttttactgagagcgatgctcctattgctcttcaagcctttgtattagcggatgtttctgtctaataaaaattattttcattcaaaaaaaagtaaagtgataaatgatagttaataaatggatataaatgaaataaaaaattatataataaatcaaaattttgaaaaaaattataaaaatacattaatatacataatatatttttataattaaaaatatatttttataattaaaaattttagatcgtaaaattataaataaaacataaaagaagggtatttttataaattttcatcaaatatttttactctttttgcgtgaatgaataatagaataaaatattttttatttttctataataatttataattttacttttagtattttaatccttaaagtaaaaaaaataaaagatatttaatttacattcatttatcaattatcatttacattgtcaatggtttcatgatatataaaagtgaataaaatatgataaaaagactacattactctgaatattatattttaaaatgtgttattgatgagtcatatattataagaaatacaattttatagtgtaaaaaatttaagaaacaacactactaattgttctataatataataaaaatatattttatataatatatagttatgccaccactaaattttaataatactttaattctaacaaaagctagctaataatgatatatgtagggcaagaccagaattcaattaaaatgatttggtttgggttggatttaagattaacatgaactcacttcataaccctcctccaccccctttttcttttcaaaataacaataataataataataaaatttccattaaaaaaataataatacaacaaaaatatcattgttgttagtattattaattattcatgaataattgagatgtcattgtgatttttgagaagtatattattatgcaagttttattcgttgtaacttgtaagaacctataaaatcttttaatcaatcatgttatgagtatttcgaaaatagagaatgaaaatttatagtgaatttacacattctttttttattgcttgagacctatttagtaaactttctttaatttaactgttttttatttttttttttattttgagttgtgataagaaatagattttataattataattattgtggatatttataccatatttgtgtaagattatatttgtaaaggtctaataaataatagcaaaggagtgaggggagagagaaaaaagatgtatcaatagtcacgcatctataatttgttagaatatctccaataaagtgttataaaaatagtgtgtaattatatattgttataaatattattaattatgcggatgtccaaattttttatttattaccattaatgtaatcgatatttcttttttcttagttttcatttttcttagtttcttaatatttaactgtgtatgtgtataaataagagatcttattggaataaaacattaaaaaaattctatctcttctctatttttttcttctctaaattataatattacataatactaatatttcataatacatatgtattttttgcttattttcataaaattaaacttcaataatagtgtataatatggtgtaaaatttaacatatgttaaagttgtaccaaatttgacacaaaatataagatctactaaattttacactataataaatgttactttttttatttactcatttgccacttatagtacctttaatgattttttacattttatttatatatttaattagatttttatacacttttaattaaaatttaatgtatttgtaattttattttttgcccttaataa

SEQ ID NO: 43052 - DNA, 1209 bp, Cannabis sativa
atgaattgaggaatgattaatattcttatgaatgtatattatgaactctaattttgaaaagaattaagttgataataactagatgttggttcttattattatatcaatattaccacagtaattacagatctacaaactaaaaaagaataattaaagacataaaagaagatgcataaagcatatgaaagtatatagtaccacaagttcagcaacgtccaaggctggatttccagcttcgagagcttcaacgccgatctgaaggcagaggcggagactgtccactcgtggctgcagatgctccggcggatagtccagaggaattccaccaccgccgccatgaagtgctaaagcccaccccatttcttttcttctctgtcaattattaatttaattaattgtcactttcatttagaagtagaagagcatgcaagttaatcagtatgatgaaacgactattaatatgacatatatatatgtataatatattatatgaggggaagggaggaaggctcgtcttaggtcttggtcataacaaaataataatatcacatgatgattttgatttttgagtcttcgtcttgctcttaataataataaaacagacctcaccgactgacctcatcatattctcttacatcattttaataacaataaaacagacctcacccactgacaccatatgagagcagttttatttgcacagcaaaatttgaatttgtatgcataagttatgtgtctaattaaaatgtggagagttttatctgtattctaaaaatttaaaaatacatgttattttaatatatatttttgattatattattttcttttaattcatatttttaaacaataaattatattttaaatattatcataaaaaaaattaaaaaaaaaaattatataaaattcaattaaaaaattatccatgattataaaagaaaatatgaaataaatattaaaactaacataaaataatgtaagaattttttaaaaaaatcttcaaagtaattttttaaaattatattaagcttaacttttttaaaatattaaagggtacttattatttttggggtggaaatagaattttccttaaaatatatcccttattagagcatattcaatgaaaatatatatacaatacaaatacacaaaatatacaaatagtatatacacaatatatatacacataacatatatataaacacatattca

SEQ ID NO: 43053 - DNA, 1244 bp, Cannabis sativa
gtggtgataacagcgagcttatcaaataaaactatattaatttttaatccttttgatacaaaggatacattttcttaaaaattaattattatttatgaaaattttagagaaaaagagaagtggaagaaaaataatgaatatctaaaaaaatttgattttattgaatacaattggaattacaccttacaaatcttgattaacacggacagatttccaatgctcattccgactataaatgtccaaaaaagaattaaagcgaccagacaatatgtctttccgaacgtaaatctgaaatagcgtactttatttatattgtggttaatcttcagctgattgagaagaatatcatccccagttcttctgattttacgaaacaaattttcaatctgagcccgaagactattccaaatggttgtaccataccaaatctctgttaagatagcaaaaacacccagtccgtttattaatataataacaaactgagttattatattaatgagaccgtatctgcagttaatggaaaacatatttgagctcaaaagtgtgaacataaatccttcgataatcattataatccgaaaaaattctccaatttcgccttcacactttttgagttggagaagttgggcttcttcttgttttactaattcgaatacctaccataaattgataaaagagttagaaaactatatatatttttttcgtcaacaataacaaataaaaattatagtgataaaagaaaacaatttcaataataataatggtggaagtctctttgaatgttgtggttggcctcacttctcccaaaatcatgaagattttgggttcaattcatggccaagaagttgtggttctcgtcgatagtggtgccacccacaactttatcactacagaattggctcggaagttggagcttcccctttccaccacagaggcgtatggggtacaaatgggaagtgggcaagcagtcagaggggaagggatttgtcgagcggtaccgctgatgctacaagagttggaaattgttgaagattttcttccactgcagttgggtagtactgatgttatacttggtgtgcaatggcttgagaccttaggggggactactcaccattggaaggagcataccatgaagctaaaggtggggggtcaaccaatcatcttgatcctctactccataaggcccgggttcgctaaaaagtatgatttgtttgctacaacatgagaaacaaggagtatgggtg

SEQ ID NO: 43054 - DNA, 4346 bp, Cannabis sativa
tgctgggtccgatggagcccgatgatgttgagtgatttttttttaaaaaaattgtgttgggtgcgatggttttgatggtgggtctgatggggcccgatgcccttgtgttgttctttttttttttttttaatgtgttgggtcaaatgggcccgatggtgggggcggtcggatgcgtgggcggtgggggcagtcgggtgtgggcagcttgcgtggacgagtgtgggcggtcttcgtctgtgtccggtgtgcgtgcggttgagggtatgcgagacagacagagtaagagagaaatagaggggaaagagagaggggagtcagatttgaatgaagggggtaatgtgggaattaagtaaatgttgtcctattttaccaatataaggtattttaagtttaagggaaaatttttcccttaatgtaaggataaaaaatcaaattttccatttagttttccatccattttcattagttaaatgtcaagttagaatgtccatgtgtatactcatataataatgataaattattatttttgaattctgaaataaattttttaaatgcttttttataaattttaaataataaaattaggtgtaccacatgtacgagagtgtagacataaacaatctatgttagcataaaaattgctaacagtttagtaattcaaagaattttacccctaaaaattatacttagaaagttaattgcaagtgaattggaagttcaggggtaaaattccttttgtgctatgacacaaacattttattttttataagagcctattctttcttggtaaagcttagaaattaaaaacatacaaatttattaatattattataggtaaataccccggtatgatgagggatttttggtggggctatgagcagagtaaccgtggcctttacctgaaagcgtgggaccacctgtgccttcctaaagcgagaggtggtcttggattccgaaaggcttcgaaattaaactatgctttcttgacaaaatggggatgggcccttcttaccgaggatcagtcgctttgctgcagggtgttgagagccaaatacctgaaaagtaaacctttttcgaatgctacgtataataatgctgattcttggttttggaaaaatgtggtcaagactaaagctatcctcagaaaaggcgcttgcaagctcatctcaaatggggaaaacacgaacgtttggttggatccctgggtggttcatgggacggatttctacccgaaacccatctcttcctttcctaggagagtagcgaaggttttagagctgttgttgagtaatgggggctgtgacatctccttgctaaggtctatgttcgactcggccacgattacgaacatcttgaaacggggtagacctagcggccaggggagagataagtggattcggactaaagagagttgtggtaaattcactaccaagtctgattatctgatacaggcgtatgatagagcccctacctgtgtggtagctccagccctatggaaaaaactttggaattctaaagttcttgaaaggcataaaatcctttggtggattatcctctctaatgctctgccggtcagaaataccctggctaggagaatccatattgatgacgagacttgcccgttgtgtgggttgaccacctcttcctctattgcaattttgcctaccacatcacatttggaggtcctccccttggggggtatacccgttaaacggttctggtggtagggtctgggattgggttaaattcatttgaaacttaaagttaaatggggatgatgcgaaaaagctatttctctgtgcttcaatcaccgtggacatgatttggaagacccgcaatgataaggtacataactcgactcaggatactattgtgaatgtaattaactctatcttccattgttatacagtttatgcctcctacctgttccccccggtgcttcttgtggttacgcctacttggacgcctccgccggaggattggatcaaaatcaactgtgatgttaaagttggtggagactccatgtgcattgcggccctggccagggatcactcaggagcggttgtgtgggttgctacgtcttgtcttaacttcagtgaccctctgatcggtgaggcggccacgtgtcatcttgcgttggacacggcgaggctcaggaaacatgactatgtctttgtggagagtgattcagaagtggttatcaaagcgctgaagggaatgcactatatttggaatattgataattatgtatctttgtgtaatcaactctctaagtattttctttcttgtaacttttcttttatgtctcgtgtttgtaattttgttgctcattatgtggctagatgggagttcgcccagaactttacaggtattatggagtcttcctccatacatgtttctatcatttgtaatgaccgcgaggtctaattttctttatctatggaacactttattttcaaaatatatatatatatatatatatatatcttgaatgagtaattggtagatgtgtttaaaattttaaaattttcaattaccctttattttaaatattttatttgtttatattgttttatattaaataatttaatttattaaagaataacaaaacaaaattaattaataacataaacaaattatgaattaaagaaaatctctcgcatatctatgtctaaactaaagttgatataatttttttttatttaaaaaaataattatatttatttatattatatttgggtgcagtttgaagtttaaagttaaacttcaagatagttaaaatataaactccaagttcaaagtctcaaattttcttgattctaccagataatttaattcgattcatgagcaatcaacaataattcaatgtactagtgaaatgaaacttttaatactttgtacaaatgaaattgacaaaataaatgtagataaatcccaaattttcaatattctaattctactcaatagtaatttattgtccctacaaatgggcttcaaggcagtaacacaaagaaaaacaaaaatataatttcaaattagagaatattttttaatgagatgaaaaagtgaagaaagaaaaggctaaatgattagagggtacatgagaaaagaggaaaaggcctcaacttgctcgtactcataaaaaatactagactaacattaatatatttaacaaagaaaaaaaaaaccttgaactttggccatataagatcagggccgatcctgaaatttagtagacattaggaaaaaaaaatatttttggatcctcattagaaaaaaatataatattttttaaaagtgataaaaaaaatgtgtaattttaaaaggtgataaattttttttgggcccctgagttaggtaggccctaggcacaggcttagtccgcctatgctcaaggctaaccctgcataagaccgaaaaagaagatgagttctcgagttgtggagaacccaggttttatggctcttgtcgtacaatgaaggttaattagttattcacgaacccaagtaagaaattctcgcgaacctaatatgtacttagaaattttaaaattttaaacccacaagatactaaatatctaatttttgtaaataagagatactaattgattgttattaaaataaagagtatgtattttgacaaaatccggattattaaatgaatatttaccttatgttatactatattatcgatttcacaacaaatctaactattcattcaatgtacattttgttattggaaattgtgttaccataccttaaaagtagtgtaattatgtaatatagacttaaatatttgggacttaattacaaatatagtcccacatggaaatcataccgaaacacaacatatttatttttttttataagaaacaataaactaattattaaaaccaaaaactacaaatatcttataatataattgaagaaaaatctgctaactaataataaattactataaaaaaaatctcaaatttgctaccaagtataaaattatatatatttaaatttaaattgtatgtttcctattttacttaagatagtattttcattatatatatagacttagcgttgttgaaaaaaataaaaataacgtgagtgttgtagatacatacttgcttaagctttgtaaaaaaagtgtgaatttgtagaaaatgattaagaagaagagtggaagagaaaaagaagaaaaaaattgttaaaaaggatacaaagaagaaatggaagatagggatggatgaggggtaggttgttgggagttagaacttctagctcttgttttcgaagcgattatccccggcaaagctgattctagaccactacaattcaaagactactcatcacttt

SEQ ID NO: 43055 - DNA, 3026 bp, Cannabis sativa
ggcacaaaacccaacaggttgtggggctgggatgccgcctctgcaaagttgtcaaagccactagatgtatccacaacagaatcagaagcattttggtttgaattatcattagtagacaaatctaatgttgaaatggtaggtttgggccccttacatcgcttgagtgtctttctcagagataagtttttaggttgtctcttacacactcggtttggggagagattttccttgttggtagcatcttcagcagtcatgcaaatgatggattctgtcatatgagaactgctatgctggagtggaactgttatggattgatgactaatagtcttaaattttgtgtctggtggataagttgctacataaccaatggcatgaccaacagttggcatatcaatgttggaaaaattagattcgtttggagaagatgaaattgtcatagcagtatgggaaattattgttgcagcaagctttttagcagcatactgagccaaatctattgtattgtgaagggctccatgttgtatgaaataatgatcatgttgaggctagaattttgcagacaaaccaggcgttaaacatggatccttagtggccgacctattatttgttaaacatgaatgattcaagtttgctggtgcaaaaactatggatccttgtccatccaggtgcacatttctttgatgaagtctaagttccatgacaagttgttctgcagccattgttgatgattgaccctggtagtcttgtgcagtgtctgaagcctcttcaaagagcagtttccttggttgtggctagtttctaagtggaggagaaggtattgtactgttgagggtgtttattgccaatcgagtaaggaggggccatgcatttccttttgaaaaatctgttcgatatcgatcataggcagaagttggtaaagcaaccccttttaattctggtcgatatgctagtttaggtttaataccattgtccacaagttccataaaggttgcacatttatgaaaagggtgacccaagcatccacattccatacaccattttgggagtcttttataacaaaaatcaacccaaaatttatctttgatttactgtaatcatatgtttccaccccttatcaaaggcttagtaacatcaatcttcactctaatgcgtaacaaaaggcccccatccttcacttagtgagtccataaatacttctaaaaatttaccaagaatatcgcctaaagcttttgccaatcctctagttttacttacaaatggtaacctatagacttgtacccaaaatggtaaatatttgagatcaatatgcataatattttgtaagacagttagcttatagagaataatgtggtggttttggaaatgtcatggctcttgagtgaggaccctctctttgtctccttcacagccaaaagagagcgtatagggatcaagttgttttcagcaattcggacaggaaaatgcccaccccaatgagccttcatctatttttgaagtattgttagatagacaagttttctggtgagaatacgagcaaacagagtatgatcattggtagagtttaattcatgggcattgtaatctccaacagggaggactacttcatcttcatcttcaaggttaataatacctttcatcttgcttgctagaggatccatggtgatagtgatagatcaacgataaggcatttaatggaaaaactagagcaattgtggggatctacaatagggaaagtaaaaaactgctaaagtaactaaaaacttagaaccataatggaagaaaactgccttagagtaaacacgacagacacttttttattatatatctcaagatttaagtttttgaataacatttttaaattaataaataatttaaataccgttaatattatgatttattataaataaaatattatgatacatctttactctgtgagatttttttttcaattaagttatttttatattattagtaataatatatattataactaaattttatgtagttgttgtacataaatgacatagcgaacaaaaataaataacatagagataaaatatatagaaatgttcattttagttaataaaacatacaataaaatttaatatttactaattaataaatatatttctttcataaacaattatattttgtataattaacattaaatagatataataaaaaattatttttgttttaattttataataatatataagattcttgtacttaaccaaataatgtaattcaattaacgggaatataattacatattaccttacttaaacacacatttccctacaattatattctccttcatagtattccctataatcaaattattttaagcacctcgtaccaaatgcttattttttggggtgtaaatataacttcctttttctatttcaaactaaatactacaatttctgtttttataagaaaaaaattgtatacaataatgaaaaaaagtcacacatccaaagttaatgaagatatttcctcaaaaaagtatcaaataaattaataattttatatttaattaaattaaagtttataaataagacaagttgagtagcatggtgttggaaggtcatcctttgtaaaagaagtgcatggtttgagtatgaccaaacacaatgtatattttaatatacatatacaatatgttttttaatgggtaatcaattttaggaaagctcgagggggccgaggccaacaccaaagagcgatgcaaggccattgccaaacgcttcatctaccgagcttggatggcaaatctagagatagacttgagcttcgtgggaaagggcatggaggaagtccttaactactgcgagcaagctaaaaaggcagaggaggaggccaaggaagcgggaggagaagaagaagaaccatccaagtctcctactatgtaggcttggtttttaaatatttatatttttttttattttaagaaaatggtcatatgaccgagacaatggtttgccctttgtggaccttttttgcaaagacaaatttgcatcatt

SEQ ID NO: 43056 - DNA, 2297 bp, Cannabis sativa
  modified_base (1759)..(1772): a, c, t, g, unknown or other
taggaacaggattactgatctgcttatgacgagtaaagcatgaacaaacatatatgaaggaagcccaagctcatttcaccaacattcatcagacatacagaagaaattaagaactaatacaacaacatcttgactggtctctgaattggaatgagacgatacaatatctgtgattgcctttctgacaagaggaataatattctggcgacttgaattactctttagatggtggattgtgatcaaaagtctatcttgacaatggagcagggtaaaaccaggtgccctgttccgggacctgggattaacacccaactcagccattttcattttagctttactatatagtttcccaatctcgtatacatatcaacacacagggaagtaaaaatttaaactaggaattaatagcttactaatcacgaaatgcattatttcacctgattgtccaataatgtcaagatcattttatgtaaatgtattgcactttactttttgttattttaatcagatgttcattgagtctttccactctaaaagtaaataatttgatttttacatggggacagaaaacaggagaaaggacacagaccatgatcaaaaaagcttagaaaagtattgtaaacgatttttttaaaaaaaaagaaaagttagagaactatacctgttatcaggaaaatttgatcccgaaattcccaactatggttccaaagcaatgaacccaataatggaggagaaaataaaaaagggctatttgcatagtaaacccaaatcttgaaactttacaagactgaaactccggacaacaaaacttttcaagaaattccaaccatttcaattacgtaaaattatgtttaaactgttctaaacaaatcaatatgtattcaagttaacaaaaaactgaaatatacattcagcaaagtgcaagaaagattaaagaaaatatccccaaattatcttgataacaatctttacactagacatatatcttcttacacaaaagttaagccattaaactccagacgtgtagatcaacgccgagcatcgtaatcgacgatctccgaatcgttgagcgcgagtgagttctggacaatcgatcgtccaattgagttgatccactcctccttctccttctcggtatcagcgaggaagtacatgggctcaagtgagttccctgatcccgagagctcaaaagcgcagggcttatggacgatatcctcagcgcccttcacagtctgacaggttcccatgcttataacgccgcgaggaaccgaggccgaggttacgttggagtctttgaaccagaggagcttgccttgcttgaggacgaaccatcggcggcgccaggtcttgatgtactcgccttgttttgtcaaccacccggtacgctccgggcgggaccagaattcgacgccgctgtactcttccgtgctcgggtcttgaccagtcacagatctccatagtccctccatagccggagaagtggagctctggtatgaaattcaagaaaaaagagagtgattttagagagagagagagagaagtgtgagattgggttgagctgttcttgtcctgagctgattaattcgcagtcggaaatcggcaaacggcttataatgcggcgtcgtttcttatttatttatttatttatttttatttcaagtatttttttcactgatacataaattttatatttttccttgcacataataaatagaaatatgtattttcggttaaaatttttattttttaattttttaannnnnnnnnnnnnntaaaatttttgtttttaaaaataattaaaggtaatttttatttttttttctttaacaataaacaaatttttgttgaaaaaaatcaattgaaaagatggaaaattttccatccaaaataactcaccatctacgtgcatgcacagttaatttatgagcagttttattagttaattgacgaatataaatcaaagacatattaagaaaattagacaataaacaaaaaatatcatttaaaaaataagcaagatcattacaaagagaaaatctgttagcaaaagtacaaattacaacaagacaatcaaattcaataaatggagaggaagtcctattccaagtgaacagtccaatgccgctaagagttaatgcttctacttaaataattgtaaagttgattacaattctaacatagaacataataaggctcactccaaagtataataataataataataataatagtaaaattgaaaaggctatcttaaacttaaggaataccttcgctttaatctttttttttttaaaaaa

SEQ ID NO: 43057 - DNA, 3415 bp, Cannabis sativa
  modified_base (87)..(93): a, c, t, g, unknown or other
tctccttttatggagccatatgtaccaactctctccctataatttaggggtgtttgcggtgggggtggtgcggtttttgactatttnnnnnnnccaacccgcacatgcggttttttaaatttcccaaaccgcacccgcactgcaaaattaacagtagaatgacctagcctattgtgccataaggcatacgaggaattgagctgctattcaaaagaagccttaagtatttatgggggattttaattgtgttaagaatgttgaatagagttagagttgggaaagaaactaattaaagatttcaagcagtttaagagctttattaatgatatctgcgttaatgatgtcaagtatgatagttatttctatacttggaacaacaaataagatggtttgaatagggtctatgccaagttagattgagtcttaggaaacattttgtggatggacatgttttttacagttgaggtgaattttctccctgaaggtgattttaaccatagttttgcccccttactgttcactctttgcaaaataatggttgaaagcctttttcggtattatgatatgtggagcataagctccatatttcaaagtagagtgaatatggtctggtcagtaaaaagtatgggagctcccatgtatgtttctgtcaggaattgaagctggttaaataaattttgaaaagagttgtataaagaggagtttagtgatattgttgagaggaaaaaaaaaggattttgtgatgcttcaaggatgccaattagtgcttcaaaaggatccttctaatctggttttaatcgcagttgagattgaagctagggaagcttttaaaaaaggttattgactctcatttatcatttttaaagaaaaaagcaaaaattgcttgggcaaatggtggagatagttacacaaatttatatcatagaagtctgaacctagaagaatgcaaaattctgtctatgccatttatgatgagtgtggaaatcaggttgatgatcctcctgaagtattacttcctttatggagtattataatcatttattgagatctaaaagggcacaaagaagaagtgtgatgactattgtaatgaacaaggggcctgtactttctactgagcatatcgatttcctctctcaaccttatactaaagaagaagtcaaagcttcccccttccccattcctaatgagaaagcctctggattgaatggttttactagtggtttctttaagaaaacttgggaaattgttggtgaagacttcattattatagagctttctactttggagtggggtaagcttctaaagagatcaatactactaccttaactctcattcctaaaattaattgtctcaataatgtttgtgattatagactcgttacttgttgcaatgtggtttataaaataatcactaaggttctttgtgctagattgaggatttttttaccaaacatgattgtcgataatcaatgcagctttgttcataagaggtacattggatataacattattatttgtcaagacttagtcacacagtttggtaggaagcataacaatccctcttacataattacgttgcatcttaagaaagtttataaaacagttgagtggaatttcatcaaagagatgttgaaggctcttcattttcctgaggcggctttcattaatattgttatggattgtgtaagaactcttcacttctatttgttcataaatggtgctttccatggtttattccttactaagagggtcttagacaaggagattccatatattggtatgaaatatttatccagacttttgactaaagttccaaatagaagggattttagctaccacccgaggtgtaggaattttcggttgaactatctttgttttgttgatgatgttctccttttctctaaaggggatacccaatcaattatgctgttattaaaagctttcaagagattttcaaacactgttgggcttcatgccaactcaaataagacaacaatatattgctcaggaatcaattttatgtccaatttatcctcgatagctcagtgttttctcttagcaatcttccctttaaatatttgggcatttctacttgtgttggtcgtatttcctaatttgattgtgattctataattgagaaaattggcaaaaattattagatggtcgtatttatgttggaagatccattttgattaattttgtctttatttctacccatacttattgggttcatctaataattttgccaaagtatatttttggtaaaattaatagtatttgtagtactttttgtggaaagaaaattttgattcacctagtccaggatatatggtttggaagagtgttacccacaacagcctctgtcgcgcttcgaaaaatagttatcaccactaagatctaatttttaccgttagatcatcatcaacggtcaaaaacatcttatttgtattttccctttatttttgtgggtatccttcatatataaaaggagagtttttcaagttcaaaaaactacccaaaaagttagagcttcttcctctagtttctctttctaaaaattagaacttctgacacttagtattattctgtaattgccatctcgtgagaaataaaaacttgaagtagacatagctctattactgtcgcgatgcagagagtgaactactataaatttattgtgtctctcttataattacttaactacttaattattctcaacaatccaaggaacagatgtgacttagaagtctagtttaaatttttgagtcaacataatacaaatccttattatctagagtggtgccttaaatggatgaaaagatgcaggaagtccctaaatatgctcttgtatactttgtttgggatgttgaaataatactttgtgaaatgatcatgtatatagtatgtacagtaaacttttttgtaaatagaattaaataagacatttattttaaattttctcattttaaaatagagaaaacaagtatagagaatattatttggatggagggattgagaacaaccttttttttttttttgaataaaaatcataagatttattaattaataaaatcgttcaaaacaccaacaaagatgatttgtagaattgtgttaagcatgagaaatttcgggcaaaacttttctatgcttctcttgttgataattaggaagttgggtatgctaaggctatttggcacagacttatcattccaaagcacaggtttatctattggcaagcttgtaatttgcaacttctaaccagggacaatttggagagaatctttcctattcaatccaatctctgcccggtttgtgatcaggaaaaggagacccataaccatctttttatggactgccacttcacaaagttggtgctgcgagatgttagcaactggtttggggctttcaattggcca

SEQ ID NO: 43058 - DNA, 4183 bp, Cannabis sativa
aaaaaaacgttcttactctactctttttctttctttaatttttttcatagtttaaatctttttaagtttttttatcagcgaaaacattgttcaaatgattaatataaaagaattctacaatgtaggccttaatacccattctgttttgacattcaagagaatttttaagtctaattttctttttcataatcgtgtacattgtaattattttagacatcttacagaatttagaaaaaattaatacgctaaaaagaaaaaattctcatgaatggtaaaaaagatacggtgcatcggtgcacctttttatgggggtgcatggtagaaaataattgggtataaaaaaatgctatgtaggtgccaatctgggggaatacttcttgtgctggaacacacttggatgatgctagtaaggcattttgtagttgaacaactctccctcagtccctcccaagaggaggaaagagcactaatcataattgctgctatgctatgctatgctagtcaccctatcatcattcttccatgaagcatcactacaaattaccttgtcaattccacagttgatcaccatctgcaaatctggtttgaattgtcttaaagacatcatggacatacaactataacataaacatttccagagtgattcagcaaacccaaaaacagtttccccaatccccatgtgaaccaaatagctctagtataagggcactgagctttccaagatcaataataagattttgatatcattactcagaacataatttgtcatcacatgaacaaaatccaatcattctattaatggacaatatgtgcctatttgtaacatttgaaatttaattcaacacacttgataatcatataaagccaaagattacacaagtatacagtaattaaagtatttataatcagaaatgggaacataacagttaacattcactgtttttcttcttttttactttttcaaacaaaataaatcactatttaactctggtacaacttcaataataagttatacaaacactgagcaagaactaaaaacatgctcaatttctcaagagaagagaccaaatatcaaaataatccaccaacttgataaggcaaagaccctttcaaaattcaattccaatccacctcccttcacacagcagcattcaacccaaatgacttaacaatgttactaaccctttctgcgaaagttttggaggttatctttttgcccggcacatgaaatgggtttgaaactgcatctacataagcagcatgaaatctcctaaaaaactgtttgaacaaaaacaaaagtttggaacaagttagaggtcatattccagagtgataaatttatgctctgatatacaaactgcggtaacataagacagtaattgcaccgaaactgtttgaacacattgaggagctttttaaaccatgactctgctaagcgaagcttccattcagttccaaagaaaatataaatgtaactacaggcttttatatcagcacctatacctaatctttagcaaggctcaaggattcaataaatatgtgtctgacgatttagccacaatcggcatagcagagagggacaaaagcctaagattacacatggcagaggcgtttatataagtcatgttcaaatcaaagatcttatatttagaatcacctaatgacaaattgtaaactaaagctaacagaagttgccatcgatattttaagtaatcctatatgtaaactaactcaatgagccgtgactagttggaattattctcttaatgaactgcactgtcccaatcggtgttgtctatgaagagtatgcaattaaagtcaagagtgtaatcttcaaaataatgaattacaattgagagtagagctcacatttctaacatctggatctctaacatctaaatctgtcgtcaccaagatgaacttgacctttgtgttagttaagtagccatacctggaatcagatagaataaaagttaggataaagcagacctaaaaaaaagggtttccaatagcataattgaaaaaaatacataaagtacttacactttgtaattctcagtaggataaagcagacctaaaaatgtctcgttcaatgctgatccagactttttgggattgttcactacacccatacacataattatatcatacatcaatcaagccaaaaaaaaatatgtttccagcaaaaaaaccgtaaaaaaatgtaagttccacttccactaacaagtccactctcaacacttaaaactacataagttagccaaagatcaaaatgatgagagcattcccaacccaataaaatctgagattttaaacaaaattgcgaaacacagattccgaatttccattccaatactttacactcctattaacctgaggcaaaaatccaaattcaatgacaaagcaagaacgtttctataaccctaaactaaattcatatgctaagcagtgaccaaaaccattggaaggatcaaaaccatgagagcattccaagttcgaacacaaaaaaatctaaatttagaacaatctcaaaacccgatttcatatacaaagaaatattcaaaacccagatcctaaaaacgcacacgaacaacatcacatgtctaaaaataaagaaagatagaaaaagagtacccacctcgctcatcaacgacatcgagggaacaatggacgatatgatgaagcttcagagcgtcatcggcatcggtgaagctctgtatgtagagtggattgttctacacgaattcaaattttcaacttgatgagttaaaatcatacttaggagaatagaaattagtgaaaacaaaggccaatcagaagagagctgcacctggtggcctacgacggcgacgcagacgatcatcttctccggcttcggttctttgcaatttgattttgattcaattcaaagagatcggaatgaaaagaagtaattataaaatagtctgttttcgattttacacctaatttcaatagctacattatacttttttttattattattttttaaattaaaaaaaaatatattttctaaatgtatgttcaataattttttttaaaaaaattttaaataaaatttaaaaattttgaaaataataaaaaaaaagtagctgtcaaaattttttcccaacctagactttaaacccggacttgacccaacgtcgaacccgaccttgatctcggcctcaaacccgaacccaatcctagacccgacttaaataaaattaacaaatgtaaataaaatgaaatttagagaacatatttttattttttgtttttaaaattgaaaaaataaaagtagttattaaacacatttttgcttttttaaaaacaaaatcttacttttatgtttgtgattaaaaaatttaaaaaataaaaatgttacaaaacggcatatttattacatttgcatccttgatggattataattttttataactaatatttattaatttttaaaattaatttttttattttagaataaattaaaattatttattttattttagaataatttgaggcacaaataattaagtttaactcctgtttacgtataaatatttaaatttaaatttagacgatagtaataattaaattatatttcttgaacttcaccgttaagtgtgaagttaatggtcacgttatagttcttgattgctccatattattaaatttttattttttatttaaaaattcaattgaatatacctacagaagtttcaaaaatacaacttcgatactattaccgtcaaaattaaacttattatttatttgtaaccgagaattagacttaaataattataccataaattattctttttattttaggtacagtggcgacaaaatttgtaatcaagtattaaaatattttatggcaatactctttacttttttttttacaaactctttaaatgtgattaaaatgacacataaaaaataatttctattagatataaaataatttaaaaattacttaaaaaatctaaaagttaaaacaaacaaaaaataataaagaaaattcaaatattaaaatgagtgatatttgtgataatttttattgatttaagaataaaaattaaatattaaattaaaatgaatgacatttgtgatagagtagagtttttttgcggctaaactctctcaattataattccacttgtacttaactctccaagctcaaatt

SEQ ID NO: 43059 - DNA, 7257 bp, Cannabis sativa
agtgagattttggaagtaaaatggtaaaaaagaaagtaaagagtggagaatggaaagtagaaagaaaggcgtgggagcacgaggcatccacataaccacctcagctgactcgttacatccacacagtttcgggtagaggacgccgcattcccacgccatatcttggtccttgtcacaacaaaagaaccccaccacctcatcatcctgccacgtggcatctctttctttgttgtgctgtccaattactaaagtcacttcattctcattcttcattcgtgtctcctggggtccaccatagtcaaataacactcactttgattatgtaaaatttctttaacaacaacaaaaacaataacttgcaacattggctggttttcctcgaacttgctaaaccttaataaatgtcatgaaaaaatagtgttgtctagttaattctcatgtcagtataatttaattagaaatagtttttagttcattaataactaattgatgccaaaataaaatatcatctcaaatttaattgggcttgaaaatttgagctcatattacttgtttgggaaatttattggatattgattggccgaaagataagaaccatataaatatattttgtacttggtagcttttagtgatatttatttgattcgttgtgtgcaccaaggtgtatgttactttaagtttatagtttagcaaaaaaaaaattctttttttctttctttatttttttatgcatttataataatttgagatccaaaagatttttattagtaataaaaatttaactttaacataaaaaaaaaacttaactatttgttctaaatgatctgtggaattggaatatttatttttgtttttttaatagagttaatgtggtggcacgagctaaaaggtaacataaaaaataaaactccaaaaatactaattttaataatcacacacccaaaaaaaacatatttatttatttatggattaaaactttaaaatttttaaaggcatttgcaaaggtttcttctcacttgtgaggcataactagtgggacccttctcatcttttacataagccaagtgttaaaatttaaaaagcagtcattataatttttaaataaaaaattaaacaataatttatacgtgtcattatatgattcgtgattcttttgacttgttttaccttttatatatttttatttttatttttattttcttaattaaaattataaattcatatttaaaaacaaaatcccacaaccaaaaggatagagtggagccatttcttatgtgtctggtactgtttattttttcgatactatttcacatttaacttttgtaaggtggtagttttcaaaaaaaaaaaaaaaatacttttgtaaggtggctgcttaataataataaaaaaaaatatcaaaaactaatttatcaagtaaaaaaaatatgcaaataatatattttaaaaaaaaaatgattcggagaagccgaaattggaaactcaaaaaaaaaaaaaaaatccatttaaacagtatatgtttttttaaaaaaattatttttaatgaaaaaccagtaaatatcttttttattatttaaacaggagaggaaggaatgggatgggattatgggactgtcccttgccttgggtagttttcagaaaatccttttctcaacgataaagttcgatacttggagagtagaagaagctgagagaaaaggaatttgagataaaaccagaaggaaaacgagaaagaagaatcaaccaaacacaaaacccaaatatataaacctatatatatcctcaattcacccaaagatttattttttctttttctgaaccgaggtagtggttggagctctgttttgatttaatcatggcgtctcaaggccaagagcatgcccagccgttgttgctcggttccgaggaggacgaggccgcctatgactcagacgaaaaggtacttattattgggatcgacgaagtctcggccgatgatgattctggcgtgcctccgttttcgtggaaaaagctctggcttttcaccggtcccggatttttgatgagcatcgcttttcttgatcctggaaacttggagggtgatcttcaggctggagccattgctgggtactcgctcttgtggctgctgttgtgggccacggctatggggctgttggttcagttattggcggctcggctcggcgtcgccactggaagacacttgtccgagctttgtagggaggagtacccgaggtgggcttcgctggtgctttgggttatggctgagctggctttgattggggctgacatacaagaggtcattgggagtgctattgccattaagatactcagtaatgggtatttaccactttgggccggggtcattatcactgcttcagattggtaatttctctattcacttttttttttttattgggggattctgcaaagtgatgatttttactttgaactttctgtcatggattttttttaaacaattaggccttttttgagtaaaaatggaaaaaatgccaaaaaaaatacaagggttgttcttaaaagattaaaaaactgtatgttttagagattctgtgtttgatgcaaaatatttacaaagtaattaaagttactgttttgttgatttaatacatatcttatatagaccatgcctgattagtctgtctgattaagaagtaaattcaatatatctgtttagttttatgcattgtctttacttggtcctgctctggacatgtgtaattaattccttctagcattaattttgtacttaatttcattcagttttatctttctcttcctggagaactatggtgtgaggaaattggaggcagtttttgcagttcttattgcaaccatggcagtgtcatttgcatggatgtttggagaaacaaagcccagtggttcagaacttcttatcggtaacatattatactctactccaaaattttcaatcttattactatccttttacttattttttttaacaacaatgctgtattactattggggccaaaaacttaacaatgctgtataaaactctcacgcttatgtatgtctaaatttctaatgcagtgtaaatgtgatctgttttttataggtattttgattccaaagcttagttcgaaaactataaagcaagctgttggggttgtaggttgtgtcattatgcctcacaatgtatttttgcactctgctcttgttcagtcaagagaaattgatcacagcaagaaagggagagtccaagaagctctaaattactatagcatagagtccactatagctcttgtgatatccttcattatcaatctatttgtgacgactgtatttgccaaaggattttatggaacagaactagccagtagtattgggcttggtaatgcaggacagtaccttcaagacaagtatggtggagggatgtttcccattttgtacatctgggctattgggttattagctgctggacaaagtagtaccattactggtacttatgctggacagtttatcatgggaggtttcctaaacttgagattgaagaaatggctaagggcattaattactagaagttttgcaattattccaactatgatagttgctctcatctttgattcctctgaggatacattggatattctcaatgagtggcttaatgttcttcaatcagttcagatcccatttgcacttattcccctactttatttggtctcaaaggagcaaatcatgggcagtttcaaaattggccctttactcaaggtatgttactatcttctgcttttcatgttagcagtaaagcctaagataatgatgacctctgactgtcatttattacagtacaacagtgtttattttgttagataatggaaggtgccaagagatttccaagttcgataactatatatgcctgttaaaattaaaaacttaagaatgtattattaactataggactaaaaaagaaaacaaggaactcaaacaggtgtgtatttggtatattggcctttgtcaacctttcaagttaaattaatcttaccatgtgggatcataagaagttctttcttgtcttggcgttgtgttctatcacataatcacttaagatggcttgtctactctcatattatagtgtactgaatatctctgatgagagttatattagggatggtaaattaacatcaagtagaaagtgattagtctgaggaacgaagttttttacagttcactgcagtaagaaaggatatataatgagatgttgatatagtcactagctttctttctttttgtttgatttgtagagttcacctaattgttctaaactttgaagattttgttggctagagaaatgctgctttataaattttctaatgtatgctgcatgattatttcggttctctaaaattttattttctatgcagactgtggcatggactgtggctgccctggtgatacttatcaacgggtatctattgatcgagttcttctcttcagaagttaatggagtgctttttggcactgctgtcggcgcattcacaactgcgtacgttgtgttcattgtttacctcatttacagaggcttttcgatgtcaggcttgaaagaccttgtgcagcccaagaggatcacagattcaggaaactgattaataatcaactcaaattaccagtttcaatcaccttaccatttaagcatttagaaaatgccaaaccggttcaagggctgatgaaactccatactctcggaacttttcttctgaagtctgatacagcatcagccttagtatttaaacacacctcattggatggatcactttggtgtagaaaatttaagactactgtccaatggtgatttctgtatcttagagcttatttgtagttcttttgtttcattgtacacaaaacattaaattaagaaaagaaaaggaaattaagcaaggctaggcctaggagatacatctcaatcagtatgcagttgaaaattttcattagcttaacggtgtagcttgaatatattattagcttttagtagccaacttggtcaagtaggcatttgataatatgaagtgggtattgtgtattttcctcttttggcagcaatatataaagtggaattattttcatcaacacatatgcgtattcaatttctttctatagtgctctttttaactgttgctctatacttttgttacttttttttgagacacttgattgatttaagtggtagataattcattttcccataatttattttggcttgggtttgctagatgatgatgatgatgataaaagtaggaagcaacagccatgaacttaaaatggcccaaggcagcctaatgatggttatattctattattccaaagaatctgtagagcagttggcatattttggaaggagttttcgtactttattatttatttatttatttttgaaagtaatgattaatttcattgataactaaataatattatattgactaaaggactatatatcatcacaagaaaaaataataaacaatcatttaatcaaacaaagtgtttatttatcttaagaataagcacaactaatttatgtgcagtcatattggtcgactgatatacattgatcaatgacacttctagaaatatagataatatacttgctacattctccaacaatgatcctagatcactgaaaaaagaatatctcctaataaaactagacacaattgttatggggtcagaattaacaatatgcaaaagaaaaattctatccaacgttactaaaattgtcagtcaatatgcttgaattactacaaagctccatcttcctcctaagtgaacattcgatgtttattccactccttctaaatattccgattgaaaataagatgttccaaactgtataaaatacaaagaaaattaacaactaataaagattactaacaactatttttaatgagactgaaagtgtcatatcatactaaaaaaaaaaaaaaaaacttatttgataaaaatattgttctctaacaaagcaaccatatcattagaagtcatcaaaactctaaaattgtcattccaataacttcataactttcaataagggataactttattactctaataaccaattccaaaaatactctacttaccaaaaataaatagataataatatttttaaaataataataataatttttatgaataaaatataaaataaaaataataaatagaaaacttccctgatttgtaattttagtaatgaatccattgtaaattcaaatttaaattgacttacaagaaccataaaaaatagaaaaattttataatgcacccatttaaaaggaatgcaccgatatatttctatctatttcagtatccgaaataatttttagttaacacgccaaattttaagacatcctgcaaaattttaaaaaattcgaaaaaaatttaacacgctaaaaaaattgtgttcaaacagtgtgttgcacacgtgactattttattttgtacgcgtgtaaaatagactatttaaacattgttttctatattgtaatttatttcgaattttttaaaattttgtgggatatcttaaatagttataacgtacgtacatgaatatgaaaacaaattagattaaaaaattcttctggatgtcgaaacaagtagatggtgcatcaatacatcccttttaaggaagtgcattgtagaatcacccttaaaaatatatacacgaaaaactatgaacaaaacctatatagtatttcataaatatcgtaattatctacatacattgattttattcatttatttatgagaaattggcggctaaaccacctgaattttacgttttgtaacacttaaacacataaattcaatttttgatggcaaaacctactgaacccccattcagttttgctctgtatctttcggtccaaaaatcatagttaaatgccatcgtggactgtccacgtgtacacacttgttcacatgacaaatttttagtggtccacgtaatattaattattaaaatattataaaaaaataatttaaaaattataaaaataaataaattataaacaatcattttattttctttcttcttttttttttccttttccttttcttttcttcttctttttaacaaaaaaaaccctagcaaaccctagcacccaacccccctccaacgatcaccctgacctcccttttcttttcttgtgcggcgtcagagccaccaacaaactaggagacccaaaaccctgacctccctcctctccccaatctctcgagctcaccctc

SEQ ID NO: 43060 - DNA, 2690 bp, Cannabis sativa
taattacacagtgtaattacattcaattctcatgggcggccatgagaattggagagtgtaattgaaacccctcaattacttcctattacacagttagattgtaattacctggtcagaaaaatatgataaattgtgtaattatctctaattatacataaatttaattatatagttgctttccaatggataggcaagataaagaaacacaggattcgcatagtctgtgtgcagctgtgttacattaaaaaataaataaataaaaactttcggtgggtaggaagtgaagaaaggaagtaacggtacagtggcttagctttcaagcaattataaaataaaataaattcgttttttaaaaaatgataataaaataaaattagaaaccgtgttacttgtcgaccagctattgtttttaagtaactaccgactcttttgatttccgaaaatataattcaacccaatttagaagaccacgttctatcaaccgtccacatgttttaaatcttagccgttcatttaaacatccttttgctataaatagaccctggtttctttctcattcctcatccccattgaagtttccagaatggggtcttctctctctacccctacctccatgggtgcaagagctctctggtatttatgttctgttgttagcgttttttattcgaagatttggtattgattgcatatcgcgactttgttcttctatcgatatacgtgcggtttgttcgaatcggttagtgatctctctcgaaattgatttatgcagaggatcattgatttacgcttgggattctgattagatcggtttggtttggaatttcgattaatatttcttattcgattcgattcattcttcttatttagggattcttttggtttattcagcttatggtggccttgggctttgttttggtttcatctgtgttgaaatatgcagattatggccacaaccatcgaggtgattttcacataactgaaatatttctttcgattacttcgttgatggttagcttcgattgttgaggctgggactgggagtggctcggtggattgcccctgtttcgtggtgtcccaggttctttttggttaattgatgttctctaaaagcatattgcctattcagattgtgaaatttcttgatttattaaatcaaatcccttcttccagcttgctggagaggtttggcaagaaaggctcaagttatgccaactcctcgtcttatctaacgtttggctctgttacccttatttctgagagcgtttatcatgttgaacttctgaaatcgtttaaactttttttctgaatttccggtttcgatcgttgactttcttctttcaaggacgggcggatggtttggtatgcttacgtacacacatttataaatgtatatgtttcaattgataaaactgcggcaattcatccaaatgggtttgacatagtatcaccatccttgcttttatatctccttttcttcattgtgctttgttttgaatctctttctgcctccttttttgagggtcttggtatgtttcctcttttaggcgatcgagagaatgggtcaaggtcttttgcgtcgttgcactatggagggggtgtaacatgattatttgatttatttcaattcttatttattcatcctcctttcatgtgttttttctgctatgctgtccatcttatcatatgcatgttcactaatttcaggttcttgacttgcgtaaggcttcaatattctttaatcgggtctatataaacaagaatttaaccttggaagggagttattcctggactagtgtttcctcttaaatgggtttttattttctagaacttaagcttctgtctttgtgagatttttgttcatgtcttccgttttgggcattcaatgaattttcagggctcttctgtcactcgagaattactaatcatggatgccttaattgtcatgcggcaagtcttcgatgtcctccgcgtctccattcccattactgcgggtttgatttgtttcatcacctttttatatcgtgataagaatctatttccacagatgattctcagagcatcatctttattctgcactttgggaatttgtattagtatttatatacctcttgtagaggttcagaggttttttgcaagtgcaattacttttgtttgttgtgtttgtaacgaatagttggttgtagccttgttggattctatgtgatatttgcagatccccctatgcttagaattctgtgtggggtctggatctacatttgcgaccaggacttgttgggctttctcattaaaaggacagatatttagtttttgacgtcgaggtaggtataagtttagatatttggttcagattattatgcatggtttatgtttcttagctctgatggatgcagcagaggatcgctagtaacttacgcttcgtacttttcccgtgtatttatatttggaaattttgatcaatacatgaccagcagagcatggtttatgtttatttttatatgctcaattttattttgacttcctttcccccttgatgatggtattttctcacctaaatgcgtcgtatataggtactccaagtattttctgaatactccatttaatgtgatagtggtgctactggaggtttggcaattcattcatcttaacttggggttgcaatcttttgcgctatggaagtcttcagttgaatt

SEQ ID NO: 43061 - DNA, 3121 bp, Cannabis sativa
tgagtttataataacatataataaattttgagaaatttataacatatattattaatatttatacatatttccaacaaaaaaaatataaactcaaacaaataataaaatatgtttagagtaatgaataatattctataaatgtggaacatgaataataaattttaaaaaaaatttaaaatgaagaaagagtttagaccatctactctaatgtgattttattacggttttttaaatattttaaatcttttttattttaaagaaattgttgtgagtgctctaaaagtaataaaaattctaagttttgagtttataataacatataataattttagagaaatttatacaatacatctaaaaatatattattttatattcttacagacttttttttacttatatttttttattttttttttcaaataaaaatattgctttcatatagcaaacgtcaaataataatattattttaaaacaacttcgtatttttgtaaaaaaaaaattatgttgcatttccataataacaacgaaacaataatttttcaaaaacaacattctgtattttcgtaaaaaaataataattatgtattttaataaacaataattttttaattttttgtgtattaatttaattaaatgttggtccgtatattttttgttgaataaacatttaaaggttcatttgttatgtcacactacacactagtactatattaaattatattctatgtaatatttttacgtaaaacatgtatgatattaatttttatggacatataaatatataatatttttgtacaaattctaaattaaacttactattatataaaattttatgatctctaacctaatttaatacaatacaatagcacttaacataccaaacaaactctaattgagctaatagagaagggcaataacaaaattacaattttactaacaataagtaattaaattattttattatgatttcaaggctcaataaaggtgtggatgatatatataggtactcaaccaactattatggagttgtatatatgataggtatggtggatttaaggaaactcataactaactataataacatataattaaagaactaataatgccacatacctatattttttctttttattcgaggaccaatattattgatagatatataaatacatatctttattatatattaataagataatatatatctaaaaaaatgcatgtaattagtaaactttgtaataggaataagtaagacccacccacccttttaattatcatgttgaaagaacaaagaaactgataaaaacaaatattcaaccccataacttgatcatgttgatattatttgaatacatttcgatatataataatgcacatacaatttagggccaagtccaactataatttcgaaaaattaataatgttgaagagtttggacaaaaatgatgatgggagtgagagtgttaatattattaacgtattgtggcatgcatagaggtgtgtggagtgaggagtagtccccatgtttccatgattgaattcaatatagagaatagagagatatgctccatagtccttttttgtggtcccaatatattaaccatgccattgccatgactaccttgtccaaattctctctttgatttgataatgactgccatactattttatgttaggggtaatattaataagatgagtgtttcatattttcattctacaaggaatcaaagcccaatacaatcacacatggataagctataaaatagcaaagaacgagcaataaccctaaagatcccaattccctcctccacattgaagaaccctagcaaagctcaagcctcccccgttaggagatcggcaccattgagcactacccccaactaatctgctcaagattcatccataaaaatcgagctccactacaccacaccccacattaattcgacaccatagagcccaagcaatccacctgagagcttgcgcaggtgttagggcaccaccagcctcaaaaaagagattggtggcgcccaacgacccaaaaaaaaaaacttaagattttttattttgggagggggagaggtgcgagagtaagtgagagaatatttagtattgttaaacaactacattaattgctaaatgtctcacaataattttgtactaatgatatgttttcaccttatttgaataaggtatattttgttctaaggaaaagaaaaaacaacaacagtaattaattaaaataaattaagtatatatatgtttgtcttctaagatgctcattaattattttaatttatcagcatatattagcccaaataactatatatacaaactttatccaaatctgttgagtctctaattttctctcccaaaagaatgttattaatttgcataataacattataaattagtatattttactcttaataaatattttgttttaaaacaaagatagcaagatgcatgactatgtgatctctttaaaattcttatttttggtggtatgggaccaaataaaacacacaaaagttggattcttggaatattttgtttttttttctctttaaaacaaaggtttatttttttaagtagctagaaagtaacacgcaaaattacaataaatatgtgcatgttattctttatcaaaacaaattggactctaacttacatgtacaatttatgtatatcctatattttatataaaaatacaacacttagatgttatctaaaacaacatcccttttttattgttagattataattaactaattaagggtaagtttatagtgcacttcttcgaatgtgtgttttgatagatttatttgtttcgttatataaaagagttttttaatttaatttttttataaacgtgtatgctataattatttgatataattatttgagatcatcatatgtaaaatctttaaaaattttgagtaatttacaatattgaaaataaaatttatatattttattgtatacacaactatttttcttatacacgtggcaaataactatttaaactttatttttagcgcggtaactatttagaattttctacaaatttgcaaatagtcttaaatagctacaatatatactacaatcatgataaataaagtagttt

SEQ ID NO: 43062 - DNA, 5105 bp, Cannabis sativa
  modified_base (64)..(74): a, c, t, g, unknown or other
accatgtaacattaaatgttatttatgatctatattaatgagtaaatctgattatattgaaatnnnnnnnnnnnagggcataaaacccaacactgtatagttcagctactttattatttggtttagctatttctgattgttgtactttaatgtctaatcttaacaatattttttgtgtttttgtcaaacgatctgcgaacaagacagccaattatttggcgactaccgcttgttcttccccaggttgtagctatggtgggaggcttgtccctactacttttcaagttattttaatagatgatttgtccaatcatgaataagatgcatttttttttttaaaaaaaatattattattattatttttgactcaattattattattattattttactagatattataatttggttaaatgtaattcaaatacaaaacaactatcaacaaaagaagagtgttctttaatgagttgggtgtgctatttaaggatgtcatagttttattgtttaaattttcggggataattttatcgcatgtggcgcatggtttggtaaaagtatgcccgcccttcgatagacgataggttatcctggttcgagaaggcggcaccgctgattatgaattattgctttgttaatctgatgtgattttaaaaaaaaaaattaaaaaaaaaaaaaaaagaatttcggcgctgagaaaatcagaacaactcaaaatactttaataataaaaataaataagaaaaagaaacactgatctcagtattttcctctctctttttctgtttgtttcccaagaaaaaaaataaaataagaaaattacagaacacaacaaattttctaccattacctttctctttctttctttattatatatattttttatatctataggtgtgtgttactgtatatagcgatagtccatcgtgtctgactactctctgtgtgtttttctctctctttctcaacaatggctcatctcttcagagacctctcactgggccattccaagagagaagcttcttcatcatcatcaatctccttcactaaaccctccattaccgtcaccaagaatttagtggtggccgatctcccttcgccgctcggagacctttcggaatcggttcaactcaccgattccgaccttcgactcacagcttacgagatctttgtcgccgcttgccgtacttcttccggtaaacctcttactttcgttccgaatcagtctaattccgattcgccgagtcaacacagcaactcgccgaactctccagctttacagcggtctctcacttctgccgctgctagtaaggttaagaaggcgtttggtcttaaatcacctagctccaatggctctaagaagagtcctggtgtttctggttcgagtcctggttcgggtcaggggaagtcgaagaaggcattaactgttggtgagctgatgaggatccaaatgaaggtttctgaagccatggattctcgagttaggagagctctgctcaggattgcggctagccaggtctgtcgacaaatatatatatatatatatatggattctattttctctgataatgcgaatgtattgatctgagattcaaattggccttggggtttttctgggtgtgtttagtgtttgtaatttagttctagcttctattttggggttttgaagatgggaaaattctttaattggattgatttgtggttcaattccgaagattgtttgatgaattgactgtggtttttaagttttatcaacttcattagttatacacactgttttagtttctaaaccttgttcgatctgatgcttggaattgctacttttcgaatgcatttacgaaaaatcatccaaaattgaagacgaaaaacttttgttattagtccagactgatgggatttggtcttactatgtttaattagttgccttatgatttctgttaatacacttgtttgggtgtaaagggttggtaaatattagaactttgagtaggaaaaggtggttggttcattcttttctttttttagtattttcctttgaatgttagatttatttcaaagtatatgttttgtttctttgattttcttggttcaattgcaaaacttttttgatggattgactgtgatttttgagtttttttttatcaacttcattagttatatatattgttttagtttctaaacctagttttggaattgtcaatttttgaatgcacttagagaaaagtgtccaaaattgaagtagaaaaacttttgttattagtccagattgatgggatttgatcttcatttgttatttctcttaatgcacacattagggtgtaaagggttgttggtaaatgttggaactttgagtaggaaaaggtggctggttcttttctttttttaagtagtttcctttgaatatcgaagtacatgctttgttcttttggttatggattgaagtatattttgaacttatcattcattgtctctcatattctttagtgtatccgacaggttggaaggagaattgaatcagtagtagtaccattggagcttttacagcaactcaaactcatggattttactgattcacaagaatatgatgcgtggcaaaaacgaaccctgaaaattctcgaggctggactccttttgcatcctcgcttgccactagatagggtacagagtccggtgcagagactacgacaaattattcacggggcattagaaagacccattgaaactgggaggaataatgaatctttgcaggttcttcgaagtgctgtcatgactcttgcttccagatcaattgatggttctcttaccgagtcttgtcattgggcagatgggtttccactgaatctcaggctctacgaaatgcttctaaatgcttgctttgatgttaatgatgaaacatccatacttgaggaggtggatgaactaatggaacatattaaaaagacttggggaatccttgggattaaccaggttctccataatatttgcttcacttgggttttatttcatcggtttgttgcaactggccaagttgaaatggatctcatatatgcagctgatagtcagctagaagaggttgctaaagatgcaaagacaactaaggatgcagattactccaaggttttgagttctacattgacttcaataatgggttgggcagagaagaggcttcttgcatatcatgagacttttgatagtggcaatattgaatccatgcaagggattgtttctttgggggttgcagcagctaagattatagttgaagatatatctaatgagtatcgaaggagaaggaagagtgaagttaatgtggctcgagacaggatcgacacatacatcagatcatctctacgaactgcttttgctcaggtaagtcctacgctatctgtcactggcccttttcattaagtgtgtgaattgttataataagaccagactttgtcattagtagtattgcatatttatgcagccctggagttattgggtattgatttttggaagaagtaaatagatatatgtgtttatcagcctggcttacttttttcttttttcggaattgataaatgtgtatcatttcctcatccatgtcatcaaacattttctttaaaatctattggactttgcaaagtagcaattagttacaggagtgttaaaattagcctgttatccctttcagaagtgggaaagaactcaattttcatacttaaatagagtacatttaaaaaaagaagagaaaagaaaaaggtatttgacttatgaactgaaacataaccaacattccactgtagatagttttcctttcctgtctgaaatgtgctgtaacttgcgtaggtggacatggataaagacaatctttaattaaatggactttctaaaataaaacccttgttagtttgcagcgacttccactgcttgtgtacattgcttaggtttcacacataaatgatttgtgttttgttgtgatacagagaatggagatggcagactcaagcaggagagcatccaaaaatcagccaaatcctcttccaatccttgccattcttgctaaagatgttggtgagctagcactgaaggagaagcgaatgttcagtccgattctgaaaagatggcatccttttgcagcaggtgtggctgttgccacccttcacgtttgctacgcaaatgagattaaacagttcatatcaggtataacagaattgacaccggatgctgtgcaagtattgagagctgcagataagctggagaaagatcttgttctgatagcagttgaagattcagtagacagtgatgacggtgggaaggcaataattcgtgagatgcctccttttgaggccgaagctgcaattgccaatttggtgaaaatatggatcaagaccagagtggatagactgaaagaatgggttgacagaaatctacagcaagaggtattgtaaaaactaattaattaagaaagcttccagatgatgattaggatgagtccaatgcgttaccattagtttttatgcttttttcaattgcaaatcaatcaaacataattcttagaatagtggaaattattacaactgaaagatgtgaggtgaatactgaatatacaatatgtgctttttgtttatattgtcctatatgcaaagtttatctctcccaatctcaaactaactctttaatcccagtaaattttcttgtttatgcatatcagacacattagtatacttgtatttcatatgctttggacctgaatttcaatttaattgataactacaagttctaatgattgcatgtcttttggggtaatttttttgtttgttgtgctaagctttttgttggcattgttataggtgtggagtcccctagataatgaaggatatgctccctcagctgtggaagttttgcgaatcttcgatgaaactttggaagcatattttcggcttccaatacctatgcatccggcattgcttcccgacttgatgacaggccttgacagatgccttcaatattacataacgaaggcaaaatctggctgtggtatagatcatgagacaaacacatcgcatcattatctgtatacatattaaggtttgtactttgataattgatattgtttcttctgattt

SEQ ID NO: 43063 - DNA, 3880 bp, Cannabis sativa
agccgtcagatgagggagttatttgatctgacgactgagatttatctagaggtaattagagttagaaattagaaacaaccctgacactcatttaatgtaccttgagatccatctaatgtaccacagaatatattccgtgaaagtatatcacaggacaaaatcatattaaagatcattagatcaatctaactattaacctaacaattgtaggggtgaacaaaatacattctcaaacaagacaaaatctaatgagagctctccattttttttttcttaatttttacaaagaaaatatatttttttatatatttaaataaaaaaaatcctttgttcttctacaccaaacaagttatttgcaacattaatgtgagacccataccaagaccatttttaatcattcaaccaacattacaatcctcactttctcaacttcaagccccaacaaaaattcagattaaaaacccataaaatgatcacaaaattgaatcccaaaatcaccaaaagaaacacatagttactatttgtgaaaaaaacaccaaaaaaaacgaaaacaaaaaagaaaatctcatccgcagaaaaaaaaacctattagtgaatcagagccaatttccccaatcaaatggttaatatttcatcttacgtggacgttccagattattcgcttcacactctggcgatccgctttattcaactacagccaatcagaacacgccacgtcatttcgacacagatcgaactctcgctataaaagcccaacgtccaaatttttaacggcgtcagaaaacacattctctctgttctcaagaagataatttcacactttcactctgttttttcgcgatgacaaccgccaccgaatcccaagctccggccgtcgaagttgctccggttctggcaccggaagtagtgtctaagaaggcagcaaagcctgcgaaggagaagaaggccaaaatcccgaaggaaaagaagcctaaacagtcaaagatcgcttctcaccctccatattttcaggtattgaaattcgattgcgattatcgttagttcttttccgattaagtaaatgatccgatcattgattgtaaatttacattttcgcagatgatcaaggaagctgtattggctctgaacgagaaaagcggttcgagtccttacgcgatcgctaaatacatggaggaaaagcacaaatcggttcttccagcgaatttcaaaaagatgttaggtcttcaactgaagaattccatttccaaaggtaaactgatcaaaatcaaggcatcgtacaaattatctgaggcaggaaagaaggagaagaaggtagtaactaaggtttcgaaagtaaaaactgggaaaaagatcaccaaacaagccaagacaaaatcagttactgctccaaaagccaaagcaacgaagaaacctaaagctgagaaagtcaagaaagttacgaagaaggcgaagaaatcaacccctgtgaaacccaaacaacctaaatcgatcaaatctccggctgcgaagagggctaagaagaccactgcttgaatatatgtaattactaagtaaaaaagaataatatgaatgtttagcattttcgtttgatgtaaattaagtatttagggtttttcttttttgttcttagtttctgtattagatttggaatgttaataaaaatttaggtttgttaatcttgttatcattgtttgttttggtgtgattaatttgcttaaacatccaaattcgggtctccatgcattgcgttttagttcttcaatgcatggtgtgatatgatcatagtttttccgtgagtggttacgtgtcagaattttacactctctcgaatattctttcgagatattttatttttgtctgcaatttttgatgtgtgggcccggttagtttgatcaagcctacttaaactcatattaagataattatataaattattattttgataaaaaaaattacgtgaaaaataactagagtatattggagtgaaatgagtaaaattagtaaagtgtttaaaatatcaattattttaaaaaaaaggatagaaataaaaatttacaaaaaaaatgtaaagtctaattttatatttttgtaattttttttttcattattttttttatttatttattttttttttttaaaaaaaattattcctattacttaattttaatacgtttggagggttttagtttgggccaggaaaaaaagcaggtttgggcctgttttgggcaaagccgagctatagttgcattactttgcactaaagaggatttacacgtaaattttcacaaactattatttatggtaaattaatatacaaataacaaaacacccaacattaaaatgtttaaaattttggaaaaactgtatttttatataaatatatagtttttgttggttttgtgtagttatgagagaatccctgtcatcaacataagttaaataattatgagaaaaagtaaagattaattaatactatggaatacactaattcttttttttttttttttttgtattgaatagattataaaattatgaaggaaaatccagaaaataagatctgtgaaaaaaattgtattttgcagttatgaaaaaggtaaaataaatcatataattttcactatgggaaaagaaagagaggcaatttaaatttactgtcccttggagtgttttgctgtacaataatttcatgaataagggcccaaaaatgatttgtaatctttattgtcgtggtaaattgcagcaacaacagtagatgagtcagagttaataaagataagagtagatgagtctgaactattctcctcaaaagctgatcgtaagtaacaaagcaaaagagtacaccataacaattaatatacaacattggttgataatatttaaaaatgtgtattgaaatctattatatttattaatgataaagctggaatttaaaatttagatttattgatgtgtgaaatttgatatagaaattagtacactaatagcaaattaacttttgtgaaatttactgaaatatagtattagattactattatagtaaatcacttttaagactagctcaagtgaccgtaagtggttggttaatttggtggtgagtctgtgggggttactgggatcgaatcccatggaaagctgagctcattaaaggacgaaaggttactagttactagttgaaatgtggttactagattaataatactatgttagtaactattgggctgttaattggtaacgggtttctatgatgttatttttatattctgaaaaaaaaaaatcaaattacaatcaaaaactgatttttaggttttgattattttatgaaatcgggtttcacaaaatgaaaagatcaattaaccatttgcaattcataaaattaaccatgtttattcgaccttgactgttggattaatcttttttttttttttaatagaaggagataactttattaacttagaatggccaaatcagccaaaacagtgtccttggaaacagaacttaaattggaaactgaaaaattacaatctgaccataaacaagtattgtgaacaaacaatgagcgacattattaacagatcgtttgacaaaacaaaaatcaacattatgaaagactttagtaaaactttgcaatcttcaattaacaaaccaaaaattgaaggcaaagaaacagcagcctcggcaacagttggttgaacatcaccaaacttgagttcagagaaggattttattaaaagaccattattctgagcaatacaaacaactaggggtgttcgtccgattcaatctgcactttttgggtcaaacaacatccaatccgcactaagtgcggatttcatattttggatccaatccgatccgcataacagtttaaatccaatccaat

SEQ ID NO: 43064 - DNA, 4416 bp, Cannabis sativa
aaaaaaattcataaatattaaataatttaatattaaaaagtaacccatccaaaataaccgactgcacttttgcagactagattagatcggatttgagtattgtgcggattgaatctaaaaaatgaaatccgcacttagtgcaaatcgaatgcactataacaaaatagtgcaaattggattggatgaacacccctaagttaaaccttataataaaagaccccaaaacagtaaatatctataattatttctatatcaaaaaaatgttctaaaactgtttctttcttcttctctctctaatcttctatgaggagaagaaaaggggcatgaagcccgctacatcgactagtgaagaaaaaaaatatgtgacccctaaaataaataaataaactacaaataaaaattatagtactggattcctaacacttttcattgaccaatttcacagctttcttcgtagttagtgccaaatcaacagctactccaatatagctgtgtggggttagcttcaataactctgtctttgcttgattaggtaactccaaaccttcaataaactctcttatactttccttgttaactgatcgccctctagtaagttccttaagcttttcatagggttccagaacaccgtatcttatcttcgcattatctaataaaaaaaattgcatttcaagagtaaatcctgacatatttcattcgaataatagaaaaaacatcaatcaacaattcttttcatagttacttcacacaataaccttgtttacataatgttttgcaaaatggtcttcaagacacccaacatcctgttggagattctctgacacccaatagataattccagaccacctatcgaaaattctcaacaccccgtctagattccacaaagagaccattttgcaaaacactataacattatgaaatggtcaattttcactacttgttctacagaaagctcctaacatcaaaactagtatggtacccagtaacacccttgatgggtactttgtttagattccaaaaagaggccattttgcaaaaacattatcaaaagaaagtcattttacaaagtggcatcataaaatggtcaattttgactaattactcaaatcccaaaaggccacctaacatcaaaactagtacggttcccacagtaaccttaatggggctaatcattaataataaccctagaatatttaatagatggaagttaaaccattagagatgaagaaacaaaattattacaaataaacaaaagatgtacttatagtttggatgggttctgcaagcacctcccaacaattgtctaagttctcactcaagtgagcaccattcacctaaattgcaagaaaatttatcagatttatattccccgtgtagatgcaattttgtcagtttttctttggttgaaaaagcataaaaatggagccttcacagtttgttgattataatacagtatgcaaaagccaagtccctaaatttggtaacctcaagtgacagtgtattagagtatggtgaaaagatgagttcactttacttagttactccaaatcaatcatcacagaaatattattatagctaagcatttaaatcatttcgatgacgattaaatcaacactaacattgtagaagttagtacatacctgaagttttgtaattcgttgcagcgtgcttttataggcaagaagtgagtgtcccaatccaacacccatatttctcatagttgttgaatcagttaagtcacgctgcaaagtacgacaatatagtagagaaattagtacagccaaaattaaatcaagtctaccaccaaccagtataagacccaaaataacagttccacataaattacaaattgctcctcccttccaccttgttgtacttagcaaatttttaatgaatttaaattcatacatccaccatcagtgtttcaaattaccacttgctattaaaaaaaagtcattgctagtagtgaataataatgtactaaaactatcaaaagagcaagaagataaaccttgttttatgaacactaaaaggaaagaaagagtttaaaacagaaattggagtcactttacctgaaaccgagagatgggaaactttgtactcaagtgagacattgttccattagctacaccaagattgccttcactattttcaatatcaattgggttcactttgtgaggcatagttatctgctcaagatttgaatacaaaaaataaattttcttgacagcgaaaaaacaatttgttggttgatgtacatttacataaaaatactcacctgtttaaagtaaccccatgatatgtaaccccatatatctcggtcgtaatcaatcaatatatattgttcagtcggtaaattgcatgaaacaattttgccatgtaatcgtgtgacttaatctgcaaaggcaaaaaattaaatgaatatacatcagagcattctaaacatgcattataacaccaacacaacctttaatgcataaaacttaagtatttaacatttctactaatatccacaatctatgaacactacaaattgttaataaatttaaaattagctcaaaaagtgaaaagaaacaaacctgactaatatacgcattaaaactcaatccaagagacgttacaaactcctcatcaatctgaggccaatgaatagcatgatacgcaacaagatgggcattgtaattaccaacagcaccagcgaacttccccattatctcaacctgagaaatatcccttttttctctacttaacctaacagcaaatatggccatttctttctccaaagttgttggtgaagctggctatagtttgcaaaagaaaaggtgttgatattaaccatacaataagatatgacataagtaagaaaaatgcatcgacaagtatttgtcatacttcacattcacagatataaccctataaaactttcaaagtagcaagtgaataatcagtttaatactttaaagaaatagcttttacctgcccgtgggtgcgagaaagcatggaaatatgggcattgtccttggccatttgacctattgcctctattaaatcatcaataacaggtaatatggtattgtccaaagcttccttcaacatcaatgcatgagcaagatttttgatatcaaaagtgaaaaaattcaagcaccttcaaggcgaaaatcaatagttagataatatcaaaaacattcaaaatcatatttatataaatacaacaatagtttttttgataaaaaagctagttcagtgctagtagtagaatctactaaagaatcccaaacctttgcaatctcgggatgtgactggcatttctatttcaaaaaatattccactgctttgacatcatggtttgtcattctctcagtcttttttatctccaaagcatcatctacagtaaatccatcaataattccttgcaaaaaagacctagcatcattactaaagctagggacgtcttccactcctggaatttgtgaaagttttatcaaccattggacctgagataagagtgctaccataatttaaatgaaattccaatataaacccacataggaaagatgatcaagtatgaaattcactaatcaacagagcaattaaccagaactaaatatatttctacactataagcatcagagagcgtaaaactaagctaatattcaataaaagctaactgaacaaaccagtaaccaataaggcttatcaacaaacacttctatattttagcaacaatggtttctttcctaacttttcttgaatgaaattccatgaaacttataaaagagcaaagttgagaaactcaaacctcaaccagaatcctgtagtaaataagagcatattcgctcatataaggagccaagtccttgactttaccccaatactgaccatccaaaggcgatagagctgtcaaagtcgaatactccaagtctctggacatgttctttacagtctgaatcattaaaataaccaaaacccacaccagaaaaaaaaaattatatagaaaatacgaaaaattaatatacaaacacaaatgtaaataaaaaaaaaaaaaaaaaccttttgggtggcgatggctttgaaacgaaaagggttctgactccgagctaaagacaaagaagaaggtttaaaagaaagaggaagaagaaagagggttgaagactcattgggccttggagtaaaaccagagaagagataagtattaaaagaaagagaagagcttcccaactccatggatggatggaattgcactagtttggaagaagattagtaattgtgctgaatgctctgcttttgatggtctctcaactggtttatacactaactttctcttttaaaatgaaacttttatatctcaataataccttttattattttatatttatttttaattaaaaataaaatatcataaaaaaaaattaaaaa

SEQ ID NO: 43065 - DNA, 5777 bp, Cannabis sativa
acttcatgaattttcatgaaactgtaatattgttctcatccagctatatggtggttaatttgatcgattcgatgctggagattcttactgtgtcttatttatgttgtcagatatttcttaatcttaatcatgacgagcatggggacaatgttatggaaacaaatgaccaagaaattgagacacaagaaccagtatgtagatgggattatggcaattgactctctctttcacactcttaatgtgcttctctttttgagtaatgttgagggtcatgagttgatattttggcttggaattcatctaatttctgttaattgtctttcccctgcactctctagcctatgttgatgcagatgcgcttgtttaacgaaggctacgctatgaaaggaacccttcttgtgaacaagaaggtatgttttacatattcgtattcatggaaataattctgtagttataaataatattgtagccttactatcaatactttgctaaagttcaatggttgtttggtttcttttcattagtaaatcaaaatgtggaaaaaaaatatttttttttccatttctgtttccttgtttgtttgatgtttatcatcttctttttgtttatgttatattctcctgatatctaaaatgaagttttttcttctatttaaaattttgtagcttgaacccaaaacaattgaggttcgatgttcgatggtaaaagttgagcaagatacagaacttcagaatattcatactaagaactcattggaagtaatcggaacaaggtatcaccaagactataacttcaacatgtttgtgtgaactgcattgtgtatgatctcatgttaaattgttcaataccatcaaccgtatgctgcataatgtcattttcattatttttaaaaaattgtctttgttttaaaatgttttgattgaggtgtctatcaagggttgtttttataacaacaaatcttgtttcctttgctaagaaatagtattactcttttgcttaattaccattttgaattagaaacttgtgaaatgaaatttaaatatgtgtgtgtgcctgtagaactagtataaactaatcaaattaagtaacattttatggttttcaacattacgcatagcaaagccgagtaacctttgaactataacctctgtcaaccgttataaatggaagacaagcaaagtagtaaaatacaatataacattgttttatatacattacaacagatgcatttgctctcttattttctcttaaaatgtaagtttatgatatgctttatcaatagctaaggaagataagatggatcatgtgtaccaactgatctgatttctatggtttaatttgagatctattaacttttttatgaccagtaatcgaccaaagaaagcttacttgtcaaggaatttgattgcacttttaagctacggaggggtcccagataaattcttcactggtttacttagaaaggctttgaaagaagctcatggtgctttcaggaataagtctgctgcaatgagaggtcttatacacacatatatattatatgcatatacatatatccacaaaaataagtgttctggtttcatttatttatttccaatatttcagttgctatgaaccatggggccatggacaaggattcaacagttgaaagaatgatttcttgcggtattcctcttgaagagccatatttgcaacatcgactatctatacttcttaaggagcaaaagatgagcctcagagggggaaagctttgtgctgatgactgttattatttaatgggaacagccgatcctactggcaaacttaaaagtgatgaagtttgcattgtgctgtaagttatataagactttccatgttactacatatatctatagcattagcagattttagctagttcatattaatacgttaaatccctaaatgtagagcggtcgtgtttgaaacagttatacgtacactcatgtttccatattaacttttgctctgttgataatatatgttcagtgacaatggacaagtttctggaaaggttttggtgtatcggaatcctggagttcactttggtgatgttcacgttctaaaggctacttatgtggaggaactggaatcttttgttggaaatgcgaagtatgccatattcttttccagaaatggaccaaggtcaattgctgatcagattgcagggggagattttgatggagatatgtattggatctcacgaaattccgaggtttggcatttgccttttaattctaagcagtagtcttatttcactaatctaaagtggatccagttttgttcttcatagtgtacacaagtgagaccactactttgtttattaatttcatagagtgaaatttcaaggcatttattggttgctcataatcatattacccctagctattgcaacattttaagccaagtgaaccttggagtccgaattcctcggtacggaaggttgaaggtaaaacacctgaggagtttgaagaggaagaattagaggacaagctttttgaattgtttttgaagactagatttcaaccaaggtatgcatttgtttgaatcatgtcatgttaatgcaattattttatattttcactgttttttctgtgtgctggttaattttagaaattctactgaaaatctgcatttattttccatgaacaatcatagatgatcacaattaattgattatgtattgttttctttttaatcaaacaattgaacgccaataaagttttattctttgttaaatacccaatcattctcactatgttcttaattaatgtaatgcacacaaaaatcctaccttttccatttgaaacaactttttcatgtcaattttttttctccgttttgctgctggagcaagatatcaatggttggtgtctcaaacttgtccaaactgatattgatacatcttaatcgattttcttattgtgttcatctatcatctcgtctcgtaagagggttatgatgattctaaattcggtggtagcctttttttttaaaattcagttatgcaatgggagaggcagcagacagcttgacagcattaatggatcgagttttgactctgggagatgactgtgctgaagagaaaaacattgtcaaggacaagataagcaagttagttgacatatattatgatgcattggatgcccctaagaaaggagcaaaggttagtttctcacttatttagcatttagtgattaattttgaccaaatggagataaacatcttttctcgttggtcattgttgactgatatttgctcattcaatctattcacatattttgtttacacttcctttttcctcttaactacgttttttaacaggttgaggttccaaaagatctgaaaacgaaagtctttcctcattatatggaaaagaaaaatagttacaagtctacgtccatcctgggaaaaatttacgatgaggtgatggaatatcaagcagaggatcattcaagcaaaggtctgtatgaatattgcaatagaaataactcaaatcctttcaagattgtggtggatcatttccttattatattttgtactagactatgaggttacaaacttactgtctgcattttcaatttctgttgagtgtggtaatcaaatcactcttaataaagctttttggaaaaaggagttaccaatcttcattacatttctgtcatgtagagatctggaaactggctcatttcgaagttgatgtccctcaagactgcttaaaccgatggaacttgcactacgaagaatacaggaaagaaatgaccaatgccatgaagatcgatgatcgtgatgtcaaaaaccagacttcaaatcagatcaaaagaaagtataagatggtaatttttttcaactattaaataaagttgcttttagtctttctgccctattaactaacttatgctatcctttctttagatactttatgaggctgaagaatttgaaaacagtaaaaggaatatagatgacatacacaatgaggcactggcgatataccatttgagttatgactacgccaaaagtaaaggtggtgccagttattgttcatttgcatggaacatagctggtccagctctcttcaaccttctcatctccaaacaaactggtgagagggtcatccattgccttccgtctattttacgtgagctaatttaatgattaaatatgggtaatttcattttaagtagaagtactaattatataggtgacttggttgtatgataatgtgtatggtttttccgtttaagcatgccatatcaattctcacgggccacttatgtttcaatgcttctaacttctctttcatttgtcaaatctagtcctaattttactatgcaattatcaagatgcaatgttttaatattcgaatttaacctctaactacctaaactaaactaacctcaaatggcatcagcgtatattctattatcaattccccaatccccatttaccaattttgctacaaagtatattccgtttggatataataggtcaatgatgatagtatgaaatatgaataatgagttgtggcatttataaactttagaataaggttcctcttaaggtaatttgaatattataaaaatgttaataacagatttggaccaagtaatccctagccatttttttttcctggcttctttaaagcaatgagaatgtgataagagaagtttgaaatacgaaggtctttctttacttctctcatatatcatactacaacaaatatcctagaagaacaatttatttttttgccgagcactcctaataatttctctatcttttaaaatactttaccataagatttattttttactttttttaaattttatctcacatatttatattacactatacatcaatttctctatatttttttacatatattttattaattaaaataataataaaaaaaagacaaaaaagagtaatgaaataataaaaaataattaaaagaatgggagaaaaagaaaaaataatacataatatttttagctcaccatttacctcacttgttagaggtgcaattttatcaaattctttaaaattttaactaaggtgctattttaactcatctattgagaatgctcttaggtccctaattttaaaattttgacattgaaatctataaaactccaaatagtttgcattgtgtcttgaattcatatcgatgagaaattaaagttatgaatctagttatttcagttatctttattaatgtttttttttaagtgatgatagattatgaaaaataacttaactcttttcagatcataaaggtcctaaactatatgtcatctattacatcttttagatagattaatatataatttttattaagaaataacctaaaggtcacacaggctatgtaaatactttcgtttcacattaaaacatatgtttattcaagtagagcattcttaatattcacttttcaaatttcatattaagattataaatcatgttaatggtgatcagtcaagaacatgtatcaaaacaaatatgaacaaattacaagaaagaagaaataacaaatcacattcactcgtggaataaatcattcaacattcatcatatccttaaattgagaaattagttcataacgtcaacattcaaattcatgtttaaactagaaatagaaattaagataaaaaattaaaagggaagagaaaagaactaggtggagaactcgatcggatcaccacgcttgctccaagagtcttattcttttgtttctagggttatatttctcaatattctctacaatt

SEQ ID NO: 43066 - DNA, 10038 bp, Cannabis sativa
agattttctatctatcttctacaacaagtcaagaacgcatgtattttctacaatggaaacccagaaattaaacatgcagagttaaaagaagaggagattgaaaacttactcattgttcgatgcctaagtgtagtccagacggagctgctcggatacctttggtggaaatcttgcgacagacttgaagtaaaaatccttttttgctctgagtttgtttagtagagaaatcagtaaaagtaaattatgaagaaaatcaagccttatttataggcaattcggtgaaaaggggtaatcatttcgaaatgcttcagatgcttcgattcccccctaaaagcaaatattgggaaatcaaaactaatcaagtgtaaccgtcaaagcatgaagggaaaaccgggtttcgaagcactaattaggtcagagcattaattagtcgaaaattgaagagatgcctagtccgcctcacatcgaatcgcgaacaaacacacctaacacgtgtcacacatcacatactggtgacacgtggaattgacttcacatatttgctcgaaagagatatgccaaacagaacaccgcacatatctgcacgggcgaagccttcctggccaggcagtggacagtacgaacagcatgccaacacttagcaacttcaacacttacatcgtgaatcactgaagcaatccttataactttgggatcatatcacagatctatggcaagctgtccaaatcacttaattagtgtattctgtatgtaatgtgtaatcttaccaattataaacattgtaaacagaaagaaaactttccctcaagcttatagccctataaatagtgatatattatcacttagcaaggggtcgaaaaacttatctaaaagtatatactcagagatatcattgtaagaactctaagagaagaatcactgcattctttgttcttaagtcaatacaaatcaaggggagtaggctattaccgaattgctcggggtcaaacctctttaaaaactctgtgtcctgcatttattttactatattacatctatattatatcacttgtcgcttacaattaagactcattgtcgttggctaaaagtgaggtcaacattagtatgcacagtcatctacaaattggtctcgaaagccattgttagttggttcaaaaaggttcttcaagttgccatttcccaaaatcaaagtgaattccttccaggtagattaattacagacaatgtgcttcttacttttgaattggttcattgcttaaaaaataaaaaataaaaagaggacgtttaggttatgcaactttaaagttggacatgagcaaagcttttaatagtgtgaaatggcactttttagaagcggttatgctaaagatgggatttgctactaaatgggttgagcttatcatgagatgtgtttcttcttcaaccctctgcttcaatattaacggagctcttaaaggatcagttgttccataaagaggtcttcgtcaaggtgatccactatcaccttatcttttcttgatatgttcagagcgactctcagccttactacattcagaagaaagtagtggacatcttaaagggttgtagatctcacggggagccccttcagtgtctcaccttttatttttagacgatagtctcttttttatcatgctactaaagatttttgacaattagtagagccttatcgatatatcatcatgcctctggtcaattgcttaatacgtggaaaattgttctgtccttctctcccaataccacttacgctttaaaggccagatttcaccaagtactaggtatgcctatctacgatcttcatgaaaaaaatcttggttgccatcttatgcagggcgagataaaaaagaactatttagtaacataaaggatcaaatttggaagcttacgaactcatggcacgctaaacttttctctataggaggccgagaagtcctcttgaaagcagttgtccaattaatccctacctacgctatgagctgctttagcttgccaaaaaaatctgcaattaattagaagctatgatggaaaattcttaatggggttcaacaccaacaaatcaaagattcattggaagaaatggaaatttttatgccaatccaaagcgaaagtaggtctgggttttcgatcttttattaattttaaccaagcacttctcgcaaagcaaccttggcatattcttgcggatcccaattctttattggctagagttctcaaagcatgataattcaaaaatggtaaattcattgatgcgaccaagggtgtcttaccatctcttacttggcaaagtatttctgacgggaaagagctattaactaaaggccttcgttgaaaaattagttacgggaataaagtcaggtgtgctattgatccttggctactaggtaatacgacttttaaaccattctctttttgtggcgattgtgactttactgttgaacactacattacacatgaaagacaatgggacatcagtttgctgaggagtcattttggtcagatcgatatagatagaattatatgtctattcccctcagttcttatccaagagaagattatcagcttttttggcaccattccgattttgggatatataatgttaaatcaggttaccacttagccgaatgcttggaaaggaaagatacttcttatacttttaactctccatgcaaatggtgggacagattctggtctctaaatgtgcctaaaaaattaaaatctttgcttggagagtcattaatgatgcaatactgacggctgttaatctattgcacaggacaatctctcatactgatgaatgctctttatgcaagggggtgggaatcagttggtcatgctttattttgatgcactagagctgaagctgtatggaagctaactctttttcgggtgtgtattccaaatatcagcaaccttaatggccatgatatctactcatatttcgttgaggctcataatgattctgatctggaaaaaaatcctttgcctcatgtggagtatatggacggaaagaactaaggaagttcatggcactaaaccaaaaccagctcctattatttgtacttttgccgaagcttacatcgaccaatttaggaatgctaaagcacctgctactccttcgaaggctttaaaggaaaaaaccagatgctccacttctgctactcctatcacgatgaacaccagcacttcacctcaaattagatggcttccaccggcaacaggctcttacaaaattaatgttgatgctgcgtatgatgcggcgggatcaatcattggtataggagctattgttagagattatgctagagatgtaattgcaactttctcgaaatctttaaggggctaatattctactaaagagatggaagccaatgccattatttacagtttaaaatgggctctttctaaccagttggctatctactctatcgaaacagattcccttcttgtggctaacacaattaacaaagtatcttcaacgagctatgtatctcattttcatgatttgatagatgatatttctcttttattatccttctttcttatagtaaaggtttctcatgttaaacgggaagctaataaaactgctcatggcttaactagatttgctcttcgattagataataattatatatgattgggggaaattccttctctaatctactctgttgttgttcttgattctattcaataataataaaagtttttcacaaaaaaaaaaaataaataacattttaactaccaaagcttacaagctcacgaaccaggcccaacttacaagctcacatgtctcaaccaatttttcttccacgtgagagtgacgcaaaatatagtattataaataaaattgaaaaatatattaaataatattataaacaatatctcatacaattattccactataactatagtaaaatcaattttttttgacaagttttaacttatcattggacaaatttcttagaagatgactagagacaagcactcagttattgattattttccaattatgtgctgtttttggattatttttttttttttaattctgagaaaaactagtttttggattaactcaaataaaattgatttcctcttgaagtgggtgcgacgtggacatggagaaaaggagccaagtggcggaaccccaaatgactcagtccacaccaaccaatgacgatagtgccaataattcaggtgatgacgtggataaatgtaggtgtgtaacgaaattattacaatgtgccacaaaattcaaaaaaggagacccattttcttccaccttttgtctgtccagtcgggtataaatatagtgtttgtgggcattgttggcctttcaactgcttttagagctttcaacaaagctttcatagtctggtcaattgtcaaaagcagaggaatgttcaaattgctctggattggactagaataatcatgatggaccatttcaaacggtgtaatgtaaataagaaaaaaaatggatgcaatcagcaaaaagagaaaaagttaccaaaagcaaagaaataataacaaaaaaaaaacttagatccacatttgacaacatctacaatctagattcttttacatattctacgccaatttgcaaagcacagaatgcactggaaggaaatagccaaaaggaaaaaaaaaaaaaaaaaacacctatatggatggtagttttcaattttcataaaccatcctaattgcacctgaaattggaaatgttagggtccaaagcatatggtatgtcacaactcacaaagtacttagcaaaattattataaatatgaagatacacaaattagacaatattttcttgacttaagaagggttaaactataatgtgatatgaaatttgtgtgcattagttggtgtatgtatgtgctgagaattatagaataaagaaatgatgtgcctcgtatattaagcaaagtgaaatgaaaatgactagaagccgccaccccttggaccagtcaacaaggagacaagttagtcattgcaggtgagtttcaccaaaccctaagaaaattattttcaactccaattttctcaattaatcataggatctgttgcttttgcttgcacctcggcataaaattatggcccatcattttctattcttatgttaattaaaataaataggcaccaagcttttattgagtcaaacatatatattttccctctttcttctactacccatcaaaggcaatgtcatagtcatatgctatgtgaacacatgcatttaaaagattaacaaaaaagaaaaataaagaatagaaaccatgatagtaacatttgaggaaataaaaatttatatacaagagttggaattgattgtttcatggacactatacaactctattcttcttccttctttgcttaaatgactacaacttcagttgaagtcattaacaaataaagggcttaaaaaagaaaaagctaaaaaaaagaaaaacaaaaaacaaaaaagagagatatttacaagcatcttttaactaaattttcctatctaagaaaagaaatggccgtgttcctaatgtcacaatttcagtaacatggtctagatttctgagcaagctatgcaaatcttaggggttgttatgtacaaggtgacctagctatgatcactgatcagtttctctatttttttaacttcaagaataggacctaactaaaccgaagttaacaaaagatctagacttgaacagacccccaaagaggaacctggtgggagattcttgagaaccagactttaattcttcagggttgcctttcacttttagtatagtttgtccaattacctgccgaatagaatctatggttttggaatcaacaggataccctgatgcatcaccaacatagaacgtgttcatggctttgcctcctttggttgtaacttccgctcgtgtaacggtgaggctattttcgcgaaagatgcgagtaacatcggacaatagcccaactctgtcagttgtacaaagttctagcttcaaaccctgaataagaaataaccaaaatcacaaaacatcaatacaaagaatcacaatgggcttttttcagaacaaaggtaaagaaatgatagctgtccaataagcttttccttttccgcagttctttacgtgatgtttcttgacaagaagaattatttatatgagctggaccaccaagggatgcttctaatgaaggtaaagtcattgggtttacaaacaaatcagcataacaaaagtggactggcctagcagtaatttagcttcctttacaaattatagtacgcaaacatacaggaccaaataattaaacaaaagatacctttacataatgggaacaattaacaatctatatgatcatatcagatacaaatattttgagggttagttaaaataagaatagagtatatcagcagatgatagtgcacatacctctgatactcttctctcaatggctgcttcaaggcaatgtatgactctttgtctctctgcatctgatttcacaggtgaaccatccacgtgcctaatgtagtattcctacagataaatccataaacgaatgagacgaaacactcatgaaaatctaaaaggcatatccaaagcattaaaatagagcatacctgatagcattcttgtccctccgcatcaatatttgcatgataaactacatacttcatatctgtcaaagtgcaaactgtatcgaatagaagtttgggtctatctttgctccgaattgtaacaactgaataatctttgtcacaccaattcacaacactgacattaggcctttgcttttcatccgagtattcattgttatctgatcgttcgtaatccctgtcagcaaacatcatctggtgaagccttctatcagtgtgggtgactccatgtgagaccacagtcttagctcccctggacttgttgcttcctttgagtacattgcatagtagtgccttaatcctagagagtctctctgggtcactaataggagaacccgtctcctcatcggtgacatgcataacagctgcagcccttgtgttgtgtgtccagacttcagcacccactacattgcacttgagatgagtaagaactgcgcttacttctgaaagaagccctggcctatcacttccagtaagttcaattgcagtgtgatccatagatggtgttacaccaactgatctcatagaagatataaagcaagattccggcccaagtgactgcaattcaattaagaaaaaaaggttttagtatagcactaaggttaagaaaaatagcagaaaggaaaaacaaacatgactcaccttttgtatgtagtccaaaaccccttcattagtaaccttgtttccatcttggtcagtgacattaaaaactggttccaaaacaaatcacaatcaatattttttttgaaggaaaagaaaaattaaaagattaaaacgcattaaagtttatggagtaagcttaccatccatgaaccaacatccatcagaagatatgtatgcttttgttatgataagattaaggtctgtaagtacttgaacaacttccagaagtattccatgttcatttgcactatcgacctacatcattgaaatgaaccaggaacaaaaatatcttgacttaattaaaacaatatagatatatatatatattatattataaatctcaagagctgcagagattgaaaaaaaaaaaagtcataccctaattaccgtagcattcttgcaagaatcattatcaattacaaccctgaaaggaaaagagaaaaaaaaaatggattgaggtctgaatctgaaaatagaaacaattcaagcaccttagcagagccaatgaagaagacgaggttatatacctgggtggattcatccttcttatgagtttctcatactcatcatccatatcatgcgagaagctcatgttgacctctgaaataggaaataaattaataaataaaagaacaaaagctcaccaatcagagaataaagccatttatactgaaccaccataaccaatgaatccaaagatacttataacgattagtaaaataattaaaagaatgcattaaatatcaacaagcaaatcattttcacacatcaaagaaggaaagggatagagatagaaagcgagagaagatagagaaaactgaagcgagcagataagggaaccaaccacaatacaagaccatttaaggcaagccaccaccaaaaggtggcgtccatgaatgttggaattgggcattaatgatgtgaaaagaaagaagaaggaaaaaaaaaaactcaacccatcaaagctctagccattataaacagagagaagcttcaaaataccagaaatgagagagaaaacaggcaagatttggcttgacaaaatatcacaagcacaaaaaaatggagtacagagcaggaaaccacgaatcaccatgacccaattccgaaatagcaggaataaaatggcaaacaaacaataagagaataatacgaaaagtcccagaacccagatacaaaaaacgaagaacagagcacgaggaaaactttttttgtaaaaaaaaaaaaaaaatacgtacccattatagctctgaagattcactaagaagaatcaggttatgtctaaaagagttttcttggttctatcaaacaaatgaagaggatgccgggtggtaagcttaagcctctccctttatatgcgcgtatacatacataaaatataggcacatacaccgaagagatctttaacctcacagtgtttacccttctcgttcttgatctgtctctcactaaaactcggccagaaaatataaatatatatataaagaaagagaccaaaaattacaataatatatttctaaaagaccccctcctccaatatcagagtcactccccgacacgatactccaaaaacctgcaagtttagaaagtaccccaaacactcacaaaccccaccctttcccttctttctctctctaccatgcaactttttatatattaccaccctctcttctctctctctctcgtgtaaatatataaaaatatttatatgtgtggcttctttcgccgtatctttcacagtactcaaaaaatataagaaatggaaataataaaaggtagagaaagagaggtaagcacaccaaaacagggggagaagagagagaaaggggttaggagactctacctcttaaaactaccacggcgtactttagcaacgacccgaaaggtcggcgaatgaaaaagggtgtacactaatgtgcgccgacagtagggttggatgatttcattttacacactggtccaatgtttgtggaattaaccaatgggtactgtcaacggtttttacctttggatttaataattaaaataaataaatagaaagctcatgcccttaccctgtgcggcctagacagttaacaactttctgtttgggtgaattcttttttaccttacctttttcttagccctactactttctatatacatgaccactttctaaatatatataatatactgtatttaattttgttattatataatatgtttctctttcttgttgagtaataagtttcatattttcttatttaatatggtaatgtttcatagtttcttaatttaacatcagttttaactttacttcaaaaaaaaaaaaaaaacatcagttttaactttctttttttttttgtttgtaaaaggtatttaacacattcaaaacgtcttttctgatatagaaatattctataaaaaaaaaaaatcagatacatatagaaataaattgttattctatatattaggtaagttaagattgttttggttagaggtaatgtaattggaatagaattgaaatgtatcaattttattaatatttttttttagttcattgtattttaaagtattagaatgttattttaataaaatgattactttactttgaaacagaaggaaagattattcaatgcaagttgaaaaaaaaaacaagtattattaattgtaaaaattaagtaatacatatttataggcaggcccggccctaggcatagacgggctaggcccgtgcctag

SEQ ID NO: 43067 - DNA, 2761 bp, Cannabis sativa
atatatttatatatatatatgttagttcaattgggttggttttaaataatggaatcgagtactacgttctgcgcctctgagtgagagagaagagaggcgttacttaaggagagtaggtggatgaatggtgttggcacttggcatttggcagtgggggcctgccaactcccaactcatttattacttatagctcatactatttctttctacactttcttcactccaatccaatccaccatacctttttcatttatatttttttgacttgaatattctatctgttgtttaatttgggtttgggcatgccagtagtggggttaattttcaacctcactgttgcattaattacgtgttgtgtggtgtagtggtaaagattgtttttattggcatcattcttcacttaagttaaaaggttcaaaacacaccacaactcttcttgaagggctagcaggtattatctgtgtgatgaaaatctttaaaaattgagataattacaaataacctaattaaagaaaactgaagtataaaactcttacagctaaaacatggtgctcagaatgatcaaattgactgaacagataggaaacgaagctgcactacatgaactcttttttcgagaaaaaatttattggtagataggcagcatcaacttttttttttccaaattccaagcttagctcggtcattttctatatgtactaaatatataaatgtacacatccaataatatctaattctaacctgtctatattcagctaggttataataatcataataacaatataaggtgggttgggttcagatcacaattcacacacaacgattcctttagattctgtggtcgggatccaaaattacatatgctcccaattataatactgaataaattttatctactcatatatatagaagatacttttacaaggcactttttaataaaatttattgatgcatcatttatttgctttactatttaagaaaattttttagtttatttttgttatggtcgccaatgttgtagttatttaaatattttgtaaaattttaaaaaatttaatacactaaaaataaagtttaaataatttattgtacatgaaactcttttattttgtaggcttgtttaaatcccatttttagtgttaaattttttgaaatttctaaatattttacaaaatatcttaaataattaaaaaaaaaattagactaaaaaaaattttctgaaacaccaccacatagataaaaatacataaaggtattgtaaaatttttcaacatatatttacaaacattttttactataaaaataaataaataaataaacaaactttcttcaccaaaagaaaaaagaaaataattttttactacttacagtgtggttccaacccatttgtcagccaattttccgctgtcaaataaagacgaaaaacaacattatttttcattggcatgtcttcttctgtagtgatatattaaaatttattttcaatttttttttttaaaaaaatgaacatcagaaacattatccattttcaaatttcatataataaaagtataatatagttattattaaatttaaaagtggcatattaaaattaattctctaaaaattattttaataatttgatacttaattatattaataataatataatattaaaaaaaatattaaacacaccatcacttataatctcttttagtaattctgtattataataagcgaagggttccattatggattaatttatttttattggattggaagtatatcgaggtaatcaatgagctaagaaggagggaaaaggtgtacgtacgattcacataaagacatccatggttgtaaaggtaatgctatatatcacaattcataaaatcacatgtacacagcctaataaagccgatacagagactcacaggcctacctatatatatatagctatacatttttgtttttcataaaaataaagatatatattctgaaaaaagaaaaaaaaggtaatttatatatgttattaatttgtatttgcaggtgctaaacatataataggcttatgtaagctaagtagtcgttattatgtcttaattaataaatgctttgtgcatgggtatcagaatacactttaataataattaataaaagttggaggaaaaagattgatcaatgatgatgatgatgatgtacatgattaggttagatacaaattaaagaaaataataataatgcatgcacgtgtaacgccagccaagtttaattgcgcacacatgcagttacttctgccacacacactgccctagctagctaagctagtaagtaatgactaaagacaataatagaagagaagaggaaaaccagcctccatgtttgtatgcattattattcttattttcacactatgttaggatgagagagagagagagacagggagagggagagagagacacagagagagagagagaggcaaggaatgaaatggtagaagtggaaaaatatgagaaaatagaacacgaagaaggatattaacaaattaaggaaaaaaaatgataaaagacactaatggtgtctagtttcttcctcagtgttacattgttattaatataattaaatatcaaattatatataacttaaggtaataattttttaaaaaaatattgctcattaataatgcgtaacaatagtgttagataccacttatacccagggccggccctgaaaatatatgggcctaagacaaattaaattttggggccctcaaaaatatataaaa

SEQ ID NO: 43068 - DNA, 2801 bp, Cannabis sativa
aaaaaaaaagagaaaaagaaaagagagaggaaggaacgttctcgttctcagtcagattgagaatacaagttggggtttgaccgagttattataacgacaatgatcgaaacctaatttggttagaattaaagtttgattaaatcacaaattaataacaaaagtgacagttatgaaatctcctaaggtaactactaagctaataatacccaaaactgtactaaagtaaaacgaaggtaccaaatatggacaacacagtcgataatagtttcacttgataatcgtttcaacttccaaagagaaactgaaaaaacagaaacatattaccggtttgaagctcttccatgcatatgaccagaagttgcacacctctttttcccattttgcttaatacgagacactatgttctattaaattaatttcagtaaatttcttgataattgattttgaagtggacgaaaacggttagttacttaaactttttcaaaaaaaaacattcatttcaaagtttaaacatgctatttatatagaaaagatacaatcacgtatgtttccataacctggtggttgtgatgggattaaaaggagtagacatgttatatcataaaatcagagatacaaagtttaaagaatattgacgataaaagtcaacccataagcaaaatcatcagattcaccccaattgttctaggtttcacaataataccaaaggtagagaaagactggcatacaaaatttaaaaaaagactaccaaacaaactagtgaatagacaccaaacaggcaaaaacaactaaagaaaacagtaccataaaataatgcaaacaaggaaagagataataatcaaccagccaaagctagtaccctgaatgatgatgtctcggcaaatagaaatctcattaaacttatctgccctgttcccccttttttttttttaatgtttatactaataaatgttgagtttttttagttaatgggggtcctcacttggccatcatgactttgacaaactcctcgtagttgatctgaccatcaccgtcaacatctgcctcgcggatcatctcatcaacttcctcatcagtcagcttctcaccaagatttgtcatgacatggcggagctcagctgcagaaatgaagccattctggtccttgtcgaagacacggaaagcttccttgagctcctcctcagagtctgtgtccttcatcttccttgccatcaggttaaggaactcagggaaatcaatggtaccgttaccatcagcatcaacctcgttgatcatatcctgaagctcagcctcagttgggttctgtccaagagatcgcatgacagttccaagctccttggtggtgatgcaacctatagaaacattaagtaaaatgattatattagctttgtatagagataactaataggtctacaaataaaacattaaggttgcattcatagaatatcacttgatcagatcattgtctgaattaagactaaatctaaagatgtctgcgattggaaacgaaatcaaacatcaaagcacaaatcgtggtagaaagtacaacctttaatcatatgaaacggaccagtaaatcttgatttcgtatccaacacacaccagcaaatcattcaattataaatcaaatcaagtcaaaagacgtaaacaaaaagcaaactgtaaaaggatattgaaaatgaccatctcaaacatagaaacaatgtgtactcgtacaagaaaaagcatgaataccacagtgtataaagtatatcttaatagatcttaaaagtacccataatcacatcaatacgagacggtgagagtttgtttcaacctattttgacgtattagtacaaaataccaataattaaaattcaccaaaagtgtcagacatcacagataattatcaaacaaatcaatcaccatttttttttcttttgtcaggatttacgacaccaaaattaaagtcaaaaagatgaatcgaagatcgaaattagagagcaacccaagtcaatgaacgagaaagaattttcaaatccatgataaaattctgaaaacatatcaaatacgatctgagtataaattatcaaaacagatcaaaaagtaagcaaccctaaaatacaaacgaaacaaacaaaaccttcggaaacgggatctcgaccaggctcacatcccaacagaagaaaaagatacatgaacttggccctaatgcaacaaatttatgaaataaaaccatataataacaataatcaaagtagtaggaaaacaagtagatctgagaatacgtagataaaaattaaaattaaaagttgtaaaagagatagggatctgagaaaagagaccatcgccgtccttgtcgaataggctgaaagcctccttgaactcggagatctggtcatcggtgagttgatcggccattggagaagagaaatgaaagggaaaataagagcgttagggagagagagagagaggtaataataataagagttattatgttgaaaattaagaaaggtgttgatggtatttatatatctatgataaaggatctctatggtccacaacggcatcccattctctctcatccgcacgtattccttttctccttctccaaattttgctcatcttttaccattttgcccttttcttaacaaagataatttgagatgtaaaaccggggcagatctatcgggtcaatcttttatggtcaattcgaattttctcattaactttttagattttaagatttttttttttaatttcattcaaattttattaaccaacctctaaagtagtgtttgtccatgtattaaattgtactt

SEQ ID NO: 43069 - DNA, 3256 bp, Cannabis sativa
cgacctcactctttgttagtatataacttgtcaacgttacatatacttgcgtgttaaaaataccacaacaatgtgaaaaaaaaaatattttttaataaatattaaattattctatattaaaaagtaacaaatctaaaataactgattgaattcgcatttttacggattagattggattagatttgagttattatgcggattaaattagatccaaaataataaagagaaagtataactaatgaccataaatcatatcattatgtaagtaaatatcctcatttcataacttgtagagaaatagtcttttacactattgattacttatattattttttgctacataaaaaaaaatctatattttttaattcctgttttagaattagaaacatattacttaaatatcatggtatatctatcttagttttgttaaaatattttttattttaaagttatgtccattttttgggtaatttgtggccaaactccctgaactttggagtttggcacaatcaacccctagacttaaattttaggggctgaactccccaaattacaaaatcgtttttctctgtacccctttcgttggtctggctctgttattttctagatggctcatccgtggcacaaagttaacatttccatatcatatgccaccctccacgtcaaatctaggactaattaatcttcattactcattatgattaagctaaaaatttaaaatataattaaaataaaaaaatggaaataaataaacaaaaacaaagaaagaagagggtcgaagagtgagaaagaaactaggtaccattattgtgcaaagaagaagaaaatggtgatggtccgaatgaggagttgtgtttgcaaagagcctaaaatcctaaaaatttacacctcgtggacgagttcgaacccatgaagaatatttgcaaagtttcttctcggtcccatgagttctcttcttctctttctttttttctttttttcttttcaggatttttcttcactatactatgcgaatgtttcttgcctagcagcgtcatggtgggtgtgagctctgggagtggatcgatcctcctatggtgtgattatgccactattgtgattcctggcttgttgagaaagattcgtcagttggaataagacatatcaataatttctatgttaaaagtgggagaagtaaatgagcaatcttacttggcaaagctactcaaaagtgagagcttccatgatagcagtcccagtgtttgagtttcttagtgttcgagctcccatgaaaatattagaattgtcctttgtagaaatattgtcatttgtgttgttgttgcttttgtattgttatggttcaaaacataaagtttgttcagtactttaactttgttatttagtaggatcttgaacaagtttctgttaatttggcatgtaatacttgatattttgaaatgaaaatagttattttgacaagtttagatcttccattaccaacataaaacttaaagcatttcactaagaaaagacaataggctgcttgattcaagacattaatacatatcaaaagttaaagcatccatatttcaaaagaatctatcacaaaataaacctatcacaatagttaaagaccaaaattctaaaaggttatatgttctaaaataaaagtcttcccattagtggaggcagtagcagtaatgctataacatttaacacctaacagtgacctaacatttaactatgacaaactaatgttataacatttaacttcattgttgagtagactgtgaagtccatccttcccctgttgccttttgtgttgcctgtatagttcgctgcttctcctttcacattctccttttccatgttaaaggggtttaattttgaacaggtggcctctctcctttattctttccagcctagaccaatataatatcatggtcaatatcaattgaaattgtattaaaatatcaatgaacaagttaattcatataaaaatatacctttggtggtggtacgattttaggttttttgcatttcgtagttgcgtgaccaacctccctacaaattgagcaatgtatttttgaacctactcttctacttttaagtgttgcatttggtggaggtggctcatcgactgctctgttctttttttttttgcctgccaggtaggttgtgctcagaaggaggaaatattagattgcgacatttgtcttgcctctaagtagtccttatataagctggttcaaaagcttcattattgtagtatttatgacaatagtcccaccatttatggccacaaaacctgatcacacgtaatgcatgcccatacgggcaacctaaaagttgattacttttacaagtgcatgtgttgtggtctaaattaactgtgaatccacttgcttttgacatcttcacttcaaagacaaaagcatttgcttgtgtcactgaacaattcttagctatgttctaattcttgtctattatcttagcaatgttgttgtaaattggatttttcaacttagttgttctatatctttttttgtcaaatctatacatcaaccaataactgaaacccccaccatccctttacctgaccaacaaccttatacacaatcttatcacactattagaaacaatcaaatattggttgatgcgtagatttgagaaaagaatacatggaacaactaatgactacaatgacattatatttaatttctattctattatatatacataaatcttttggcatcatatacatattttgatagtaatatatataattttgttatatactttttgagtattaacattttaatttttattttattataattttttgtgatatataattgggatgttttacttaatacgtatatgaaaacttttttaatcatttttacgatactttaatttttttttttcatttatatatacatactataaattttttcacaaaaagacgttctccgctaataatatcacattttaaagacattcaaaatctatatattactattaaacatgatattatatattgatattaatttgcataaatattatatatataactatagaaacacaattatatatataactactgtgttacatagagatatgaggccttattatcattttaaaaaaaaaaaaaaccttatattattttgccaattaaataaaagtcttgtgatctctttgatcaatgatgatgatgatcaccttgttcatcatttttatatttagaacgtcaatgagttagtgtaatcgtgtaagg

SEQ ID NO: 43070 - DNA, 3448 bp, Cannabis sativa
ggatgatgacattggagaccgactggagggttatgcaaccgtttccgacgatgtggacattggcgccacggccgtcgatggtcttgaagctgttgattataagctcgtgcttgagcttgatggtcatatcggctgagaagacgatccagagtggctctgtttggatcacggcgtagcggagagttccggggactggacgggccacgtcgcggtcggaggagtccgttacgacgtagatctggccgcctttacctcccattgcgtcctggccaaacccaatgccacaatcagcgagtctctggcgattcacttgccaatttgagttgcagcgccagcaatcgtcgatgggatttccggtcgagcactgatccttttcatgtacggaaagcatctgtcttcttgatactgaggcattaactctcctgtagaggaataaaaacagagcaatgccgtgtttggttactgtgaaataatgctaagcaaaatgagctgaaccagagtaagggttttttttttcttcatttctgttaaataattaaaaagctcaaactaaagactcaaagggctcaaaacccagtgaggatttatcttcattgcgttgataaaacagggtagtgtggcattaaatcccaaaaatgggggaaaacccctaattaaaaaagacccatttacttaaatggttcaaagagtaaaacccagatgggattttttttatttttttttcattttttgctttacctttgaacttcttgaaccacagcttcaggatcaggatgctggtgagggagggtgagattgagggttaatgtggctctgacaatgggagagagaaagctcgagaggcatattaagagaatgcaagtggtagataacatccttgaatgagcaataataatgcaaagaatggactattttcttccctcttcttctaactagttctctacttcttttccttttcctttttccttggccttccgtaaaagacactgttcttctttgaaagatgtctttctttttattcttcaacgctcaacaacttaggtcttaggaagctgaattttttttttgggaaaatgtgatgtgtttatataataaaaacaagatcatatataaaataatggaataataattttataagattacaaacaacaatagtgacaaggttaagtgggaactgagttaactttcattgagggttttgagggtttttggtttttatcaagaagaaaagcagagagagagagagagagaccattggcaatggagatggaggagaggatttgagagggaatgtctctctctctctacttccttcctaatcctcccttgcagtctatctcagacactcacattcctaccgtgcatgttaattattctagggaaaaaaggagcaaaatcgatctaaaaagttaaataatttagagagagaaaaagaaaaagaaaaaaacttatccaaaatgctaagctgcccttttttggtgtttagttttattttttattttatttttggtggggtataagttataattattattattgatattattatgagtattattctaataaatcggctgcggattgggattgagatactttgcggaatgggaagaacggaagtattccaatatcctagtctacacaaagtcttattattttgctttcgagtttggtttacaaataaataaaaagattcatagggttaatcaaggttggaaggtttttgtgcctttattcagtaattttatattttgctaaattagattagaggatcacttaattgtataacctataaagtgtgctttttcaagaagaaaagaagcaatctactcatgctcatccagatatgaaaaaggtttgaaaaaatcgataaagattccaatggttttttatttttattttttaattagatttctaaattcccctcgttaaaatgaaattttgggtctttctataagttaaaaaaaatgtttcctttaattttgacaaagacatatgtgcatcatgatcaaagagcaagttaaataacaaagcaaaaacagaatctttataatgtagctagctagggaggtaatgcattataatgttaggttgaggagaaaactgtttgattaattaacgagaataatcccacaattttctttaattaaacaagttgtgtgtattaataatataataatatattgaagaaaaattgacaagttgtatttaaaaagtaataataaagctataaaactagtcattgattcatgtttaccaaataccaaacccataaattagcataataatttgttaaaatcaatttaatatgacggcgacatcctaaattttctgaatacaacctgtctccaaaattgatcagtgaaacccaataaaagagtacatatgttattataagtataattaattttacttcaaaactttaaacatattattatgtaaatataaactcatataggtgtaacagtcttgctacaaaactacacaatccacataaattaaataaaataaaattcatacctaacaataatgagagaatgaattattgatacagattgaagcagagcaaaactttccgaccaactgcgaatatgattatccatccttatatgtaagttagaactaagagcacattttgggtttttttctttttgtggaatatcaaagtaaatgttaaaggggttgtcgattaagtaaaagaattttgggaaattactttaatatcttcaatatacttacatggaagattcaagtctaaaatgatgtttgaaagtgggttatttgagtgtctataaatcgtgttattcgatcgtttgtaaatatagaaacaaatgattttaagaacttatcaaaagttttatttatttttgtgttaatgtttaatgtgatgatgcacatcaacacaaaagcggtggagagagaaccttttttagctttatgtcttttgtgtttctttatagcatatatatataatataaccttccaagtttatccaactcaaactatttggtaacacccctcaaagtaaaaataaaaaactcctcataaggtaattaaacatgttacctaatacgttactcctatttttgttgacggtagtaataaaaaccaattgaggctagtttaggagagtgcgtgtatgttagaggtcctgtgttcgagtctaagttatgtattgtaatatataaatacttaattaaaaaaaaattaatatatgaacttcaataaatcttgtttatcttataatattttagggaaaaatttatggtataccctctgacaaaacattcaacgagattttagtttaatttttttttcatatacattacatatttaggtttaaccaaagtcggtcctaagttgaaatgagtcataggcaaaaacaaaaatttaggctcttactatacagataaataatatttttaaaaattattaaaaaatatgtatattt

SEQ ID NO: 43071 - DNA, 1983 bp, Cannabis sativa
aaattaattggaagtctaaattttaatataaggtatttttttaagcatacaaaataaaattttcctttataaatgagtgtctctaatgaagaaaaaaaaaaatggatatgcatcaatgtcattaaaaaaataaaaataaatatgcgattataaatcaagccttgggataaattctttttttctttttgttttttcaaatcatatattaatagtagaggtataattttttgttttaaaagatgtgtagattatatacctaaaaggtttttttttttttttttttttggaaatttatatatattatatgtataaaaaaagatttaaattttagttatttttcaactaatatttacacaagagtagtgaggaaattatttactttatattttattattttaacaaataatattatttaaatattctacaatgtcatgaatcatgatgctgagtttctaattaataataattgatgaattgtactataacaaatatataattatttattttgagagatgagatagtgggagctgagggagattttgtccacttgcaattgcatgattcttgttcaaaaaatatatattgtttttctaattatttatttgattattttttttatatttttgacattatacaaagcaaaaattagttcttttttaagtttcctttcctcttcaaattttctacttaataattttattctatcacataactataataataataattatacttgtgtaaaattagatcttttaattttttagaaatgaaatggatcatttataaaagtgcaaaagtgcaaaattatttaatcatatcatgaggaatatgatttttactaaaacaatgttcatattacctttttcctttttcttttttaggggaatatttccttttcattttctcattatatgtttaacttcaaatctaatggttccaaaattccattaaaaaaaatattgtggttttaaagataagttaagtatgtttgggtcttctagttaaagtgtaagaaagagagatcaataagctaaatctaaatggatcttcttctaaagccaataatacattaatcctattattatatatttcaattacaaattacaactcactattgtaattagacattattgtgcattttcaacaaagaaatttaaacatattaatgaagtcattcatttatgttttgataacactattataaatataaaagatgttgtatttattatatgtcaaatttgacaccatgttagcatgactattaatttctttatttttacataaatattaaaatatgacaattgtattacaaatttaatactctattagatatgcctatggatacactatatttcacttccccaattatttaggagcttgagttcaacctaagcaaaaaaactcacttccccaattggataaacaatcataaaagcaataataacactctttcaataattattataaaacctaatatatgtaatgtgattgctctataatataatattgtgttctataatcaataatcaaaataatatgatactttggacggcattcactaaaaaacaaagcatctagaagttaatgaagagtcttacaaaaaaaaaaaaaaatgaaagaaagaaggaaaaaaaggtcataactacaatttgataaaatatttataacaacaacaacaattgcattatttgctaataagattatatatactttcatagtttattttatgggtaaataatattttagattctgtgttttgtaaaagctactgattagactttctattttgttaaataataaattaaatcttgtattttctaaaattgtacaaaatagtaccctaaactgattttttgtcaaaataaaagataataataactcgatttaaagttgttataataaaaatgagtatattgttttttgcatatatttgtgttattgtcttcaaattgattgtatcattttgtaccattttaaaaaata

SEQ ID NO: 43072 - DNA, 10332 bp, Cannabis sativa
  modified_base (9543)..(9557): a, c, t, g, unknown or other
taacatggatgaaagttcaaggaacatgatttttaatggagaaaaaattcaagggcacgatttggtacatatcaaattttagggaaaaaaattactaattagccttcaaattttaaaaatgaattctctatcaaattatttatgtaaaaaaaatcaactgagtacgattctatttttttttttttaatttccttttatcaaaagaggaaaaagaaaaatctcactattttgtgtacagaaatattaaaaggaataaattaatagtgagaaaataagttaaaaaaaaaggaaaaaaaacattggcgtttccgtcgcacgaaatgagggaaacttctataagacagcattttgccattccttctcttctttcttctttcttctttcttttccttttctctttctctctctaaaaagctaaagaaaagctagtgctaatcaaccatggcctcctcttcctcggaggaactgaagcaagaaccgcaacaaccgccggtcccggtcaaggaatgtgtgcacaagaccaaactgattcaattcctgggccgtaccactcccatcgtcctccaaaacgacaatggcccttgccctctcctcgccatatgtattttctttttcttccctctctatgtaaatatataggaatctgtattgctagggtttggttgatctgttgaacttgtttggttgccgagaagcgggaaatgaggagattgaggaattggattttggtgttgaataattggagaaatggttgaattaggagaggttgtaatcagttggattttcctgaaatggatcattcgcattctcggcttagagttatcttttcttggtgtccaaacattgaatttgcaatgttcttaactcatggacttgtacgggaaattgctttgtttctaggttttggcggtgttgaactgcttcaaatatttttgatttgtgttgtttatctttttgaatcttgaacaactgtgcttatttgttgttgttgatgccttattataaattcgttattagaaaattgtattctaatgaaaggagagtctgcaagaagttaccaaaaaattgtattgggcattctttatattgaaacttgagcatgtttttgtggtacagagctttatgtagtagcactgtttcaatgattatgtagtttcagtgttatttggccctttgtagcaatcaagtattggaaaattaagttctcttacactatcatactttgtgttttggggtccctacaggtaatattcttctgctcaagaacaacttgactttgagtccagatgtgaccgaagtttcgcaggagaaactgctgtctcttgttgcagaacgattaattgattcaaatagtaatatcgatgtaatactaaaagttataacttgcatttttgtcataagtgttgtgtttttagcttttcattgaaattcaccacgtttatggttacaatgttgtagaataaagatgagggctatgctgagaatcaacagcagaacattgctgatgctattgatctgcttcctcgacttgcaacagggattgatgtaaatataaaattcaggaggttaaatataaacgtcctttctttaccttatggtttcttgtcatttgatatttacttggtctaatcaagatttatgtgatgattgcagaataagtgatttcgagttcacacgagaatgtgccatatttgatttgttggatattccactttatcatggttggatagttgatccccaggtttggtctttcacttttgttatatgttacctatctatttgattacatactaaaaagtacttgttccacattttaatttggttatatcaaattctatgatattttcttgtaattttttaagaaacattttccaacagatacatataaagtacttatgtacacaactttttttgggtattgtcttgccggcctttctcattcaatgaatttaaaaatttctcagtacttattgcatgtgctctcagtacttattccatgttcaattcttggatctctaggtattgaggttcttaggagcaccaagtgtgtctatgattgaaaagaaaataaacttctatcttgctgttgtccatgacagtatccttgctcttatactttataagtattcatcgggcactgggttttcttgttttaaattacattttttcattgccttccgtctgtttgaaagccaaaaatgcctaacatcatctttcgtgtttcgaccttcacataacttcaaaggcataatcagtcaggcactttacatgattttaatgaagtgtttttaactgttgatatattgttatctttttagatagattagatagcgcaatagatctgaaagtgaaaagtagtgatctgttgaatatctacatctggctgttgttccttccctctcttttttcttgcaatgaaaaacggcactttgatgcacaggcactttaacagtttcaattctgttaatattcttaatttttagttgtctttttatgattatatcttatttaggaatttggacattttgttttgatgcaaataaactcagatttgttgattaatcaaatgaaaattaaaagttcacttatctcattttgagaaatgcattgttgctgtttgtttgcatttaacctgtcactatgttcctggccccacttcccttgataattgtattcttgagttactatggtttttttttggcttgatattacattcatgcatgtttttcaggattatgaaactgccaatgccattggatcaaagtcatataatacactgatggaggagcttgtggcccttgaaacacgaaatgagagagaatacaaaaattctcctgaagaagattgcgttgattttgctgcagcaacagcagcaactctgggtgtcccttctccatgcctttctaaagctagatcttttgatgattctccacatttagactccgatcaagaaaatgcaagaaaaggggaccttgaagaggaagcagagttgttgagagctttaaaaatgtcagagtctgaactgctgccttcactggatgattctcttgtagctgataataataaaggacctgtgtctttcagttcagatgaaagcacacatgtccagatgattgtccctgtaggttctgtagatatgttagagcagcatgttttcgaaaataacattttccataatccagacttatctatatcagctgactgcaatgcctccaggaatggaagtgatgagttagtgtgttttgggagtactccagattatgctttgtatccattttcaaaggcaaatggagaaaatagtagcgatctccaaacatatgtcaaaccagaagggcattctcctatcattgatgaagttgaaaagagcagtgttgacacactggtccaaattcaaaattctgtctctctttcacctggaatttgcactccatctgcagatgagcatcatgcaaatattccacaaagcagtgaaataagcgataacatattaaattctaccatagatattcacaagattgcagataagacagttgaatgctgctcagcagaattatcatctttaccagtgccgaatgcagatgtgcattcagattcatccagtgataggatgcaacagcttgacacatcagaagctttgacttcaagtgtcgatgggagtgagcccatttatgaaggggaagaatgtattttggatcctgcaactgcaatttttgaagacagggagccaatttatgaaggtgaagtggtcctcgctaatcaaggtgacaaagacaccgtagactctaggccaaaggatgaaattactccccaagcaggttagcaaggcttactgttggctaactagtagagttttttgaagattgattactatttatgtaactggcagatatattcatttacaagatgttctgaacaagtttctgtctttgtttggcttcaggtgaactaattaggagttttttgaagagcaatgctagtcaattgactttctacgggtacttacaatttaaacttctaactcctcattttatgtatgtatagatagactttctgtttttctgggctgatgtccaagttttctcatccttttccattttgatttacttttttttttctaattgtttgtgcagccttttctgcttacaagatggtcttaaagagcgtgagctgtgtgtctttttccgtaataatcacttcagcaccatgtttaaggtcagttgattacacttttcttcatatactgaaaaaacctaatgtatcaatttatgaattagatgagaaacacttcctttggtccttagattgtgctatattgcctctaaatgtcttgagagtagtatttactgtttttgtactttttctagtttaaaggggagctttatcttttggctacggaccaagggtacataaatcagcctgacttggtatgggagaagctaaatgaggtaatatatagtttcctcttataaatggttctcgttgatcaagttttggtagtgtagtagtcaccgattacagtcttagacgaaatacgattgaaatgcagtaacatttctcatgcaataaatttgtagaaagtattttgaatagataggagaactgcttggtgctttgtttttcagtatgggccacatgtaatgcctttttgtttgacatttataggaagagcgtagttacttgttatattatgtttattatggttgagaggaaagcttttaacaaacttgtgctgctttgggctatgctcggaatgtaggataaaataaaataacattatgtccttattttaatactttggtccataaatttacgtctagatgtttgccacaaaattgcattaccttttgtggaaatagaaaaagaatatgaaaattgcattgtgttcctgaaaagtttgatatttgttggtagtactagtatatgccggttttaaatatgctgctgcctctaatttgtaatatgatttctaactatgattttttttttcaggttaatggggacacgttgtttatgacaggaagcttcaatgaatttaaggtagaagaccattcaaatgattcttgggatcaacataatgctatgactagcactgcggtatgtgtttctttatttttttttacttgagatgtttctttttttttttggctgaattacctgagatgtttgctgtgcacaacataacttacatgatacaatttcgacttcacatacttcaggactacattgccagcattgatactgcagcacaatcagtaaagtaagattctaacttttgctggtttgcaacactcttaattctttgttctatatattcatattttgaaggaggaaagtagaaaggaataaatatgagtggtaaatggtagtgccttctctttctcgtctctttcatctggatgagatgagatgagttaagtcatattgttgaatattagatcagaatgttgctctgtcctttactgtaataactggttttgttcattatacatgttatggaagagctttctttctcattatatgcttttcaagatcaccaagtcttattctgttttggcagtcctgatttgcaattggcaatagctcttcagcaacaagagttcgaccaacagccacagcgtcaaaatgtgcagcagcaaccaccgactgttactaccaattcaaggctggtcactggtccccaggtaattattagttttgatatcatttttctctaaacttgtgttttattcttctgtattttaccttgagtttatgatttatggaagcacgtgcattgcaaaaaaatgttaattgcaggtgccgagaagccggaatccatcgacattgtctcccagggctgaacaaaagtcgaaagacaagtgtacggtaatgtgaattcttctgtatgaaaccaatttcagagtttgttttttgtaaattgtttttaatgcctttcctggaatgaatcctattcagcagcgtatatgtgatttttagagtttttttgactgtaaataaagtcctcatgtatgctaatccaaaaaaaggaaaaagaaaaaagaaaacgtgttggtggaccaatgaccctcacttcataggacatttttctttttctttttcccttcccctcatttatgttttttggaaaaaaaatgggggttggtcctgttcaattgttggacaaaaattcaaagtgttggaataaagtgttaatgggcataggatttggaatgtctggttcagtgttacttgtggcctgtgggcttctagataatgtctggaaaggcccctttctgtaagtgcattgctatggggcagtaagggcctaacgtctcaatgacatgacgttttataattagttagcggttttctataattttattaaattaaagtaagtgagacccaatattgaattacaccgatagtaatgttacacctcataagggtgttaggaataggcaccatgggtgccttttagcattttctctttttgtacatgcaatattcttggggatgtctttttttatggtttttaaggtggaagtttgcaaaatgtagtttttttcaaaaaaaaaaaataaataattaaaaatttaggggaatttttaaaaagataagaaaacatgggggaagcagtaggtaactggttctctgtctgaggtaaggttaccttaactgtttttccatattttttatttattattttgaatttttcctgtaaaaacaaccttttttttcttgtaaaaaaacattgtttttagtttcaagctctaattgtaatttatgaattttgggcgtgagacagtgcactaaggcgatctgtcttagtcaaattaactcaaatttagatattatgatatttaaacttatcaaatttaaatggcaagttcaaaacgtcaatggagaattcgttacaaagaacaatggccatcattaatgaagtaggttttagactatagtagaagagtatgatataggggaaagcattaggtgataaatggaataagagtatgtagtaaggcaattgtgattgaatgggtaaccgattgttctttctgttgagggtcttggtttacccctttgtgccaaacttccatatttgaccttttttattacattattacattacagaagtagtattattattcgacactttctcattttgcatgtactatactgtacttttgtcgaaagaatcatccttccaaagtgcaaaaggacctttaaattttagggtttaggatttcgaagttgtgatattcaatgaaacttcactaaattagtttcgaagtaaaattcaatttgtgaaaaaaagaaaaagaaaaagaagtaaaactcaaacatgctacgcacttataaattcaacaaaacattagtttccaatttagttcttataattggtatgcttgaagtaaattacatattagtaggcatcatatatagctaatatattttttcactcacaacaatatgtcatcaatgcctgattactttgtctcttacaatactgatccaacacacgcccatcaaagagtgttgcccttcacactatcgatttatatataagtattgctatcaggcattagtggtacttagtaccttatcgacatgtcgcgttgcgatcggttagcgatattttctaaaagttttatataaaattatatgagacatatacttaattagactaatggggcgatattgacaaataaaaaggtgctagacactactggtgccttttaatatttttatatatatatttatatttatatttatattatcactaccattccaaccgtttctctcacatttgtactacttgttagtctccttatatcttacactcaactccaattacattattctatcatacttttagcaccatcaataatttgagtatatgacttttatttaaatttattcgatatatcattatatatatgtttgtgttaatggtatattattaattcattagatatatacatctagttaaatatattgttattgtaagtccacgggattcagttgtactcaattgtctatccatgtaaatagtatgtaaagacttgcttgcttgtgtatttaggtctttcataataattgtaatttttttaagttgtttctaaatgagtgatataatataaatgtgacataaaattatgcactaactttattttttacttttagcaattagatctgtccaaatatgattttttatcatttctatagaaatgatcaggtcatgtgataaaaaataaataactcaatatataagtttacccatattgatactaatataatatgtatcctgttagctatttctataaaatagttaaccatgattaataataatgttatgtttcacagcgtataagataaattaatttaaattttaatattttattgggctgagatgcaaaatgattctaaatttagaaactaaattagtaaatgtctatttttttttaaaaaaaaaattaaagaaataaacaaatataataaatcagctaatagaactatacatttagtgcatatatatatatatatatatatattttaaaattatagatataataattaaattaagttatataatctttttagtattacatattattatattgtaataaaaactaataaatatattaaatcattgaatatatataatagtattttttttttgttggagtaaccgataaaggttaaagtaacaaaggtaacaaagttacacagcaggagggggtttcttccgtccaagaaaatttattgtctatcctaaggacatgctaagccaatctatgagcctcaacattaaagttgagactgacatgagagagatgtccaaaaaattagacaataaaattttaatatcagaaaagataacacctagttcaaaaaaaagaaaaaaaaacattgtgtgacgctccaaagctgagaccaaagaaagtgaatcaggaaagaccctctccactagaagtttcacgtcttgaggccaacgcagacctactagtaaagcaattgcttctgtttagaaaactgaaaaagaacctacaaacgaaaagtttaaaagcaataagttcttttaattttcaaaatcgaaaaaatattagaatataattgtaatagagtcaaccaccaaagaaaaacccctttggtttaactctttacctaacttcttattgatcgatagcattttaatagtaacaaaatagtataaatttaataactcaccacgctaaagcagatcatatatctattttgaaaatattataaatattaaaatttatctaaataaagatccacttgaaattatttagttaaactgtttaaatttgaaccacacttgctattaatacatccttttatacattcgtaagtaaattttaagcataatcttaaaactaaaagaataaattaaatgatatttagtatttatttttgggaatttactattatataaataatatatagataatagtatttaatatatcgtattactaaaaattaatataccgtagtaataaaattatatatcacaaaaataataacaatactaaattaatactnnnnnnnnnnnnnnntatatatatttatatatatcatactaacaaaattatatataccgctattaaaatatatatatgatacgattatatataataaaatagaaattaaatatagatttaaataaatgatatactatagacaacaaaaactatcatacaataagatatatatatacctacaataaaaaataaaataaaatgactaattaggatttttacctcctaaactttgacatgtaccaaatcatgccccctgaattttttcggtcgttaaaaattccacctgaactattgagattatcgaatttaaggaattttatctaatttcattcaattttactaatttagtgattgtttatgtacctcagactttaatatctatcaaatcacgtccctcgcactttgacatgtgccaaattatgtcccgaactttcattcatgttagactttccttactaaaattagacaaaaatctttaaatccaacaatctcaatagtttaggggaaatttttaacgatcagaaaagtttaaggggtatgatttggtacattcgggggggcaaaaatcttaattagccagataatataatatatttttttaaaaaattatatatattatattaacaaaagtatatatcacctttatgtataataaaataaaaactaacatgcatgatctgagataattagatgatattctatacaataaaacttatataccatataataaaaaatatataccttacaatagaaatatatataatactaacaaataaaaataaaaatatat

SEQ ID NO: 43073 - DNA, 5768 bp, Cannabis sativa
ccagcgttagaaaatcccttcagaatgacaaaacgcacctgataaaatgtgaataaaatacctccaaccattccagttaagtccctcaaaaaccactgcaatagttccagcgttagaaaatcccttcagaccatttattgcaaagctcaataacatgaaaattgttcaaatcaaaaaaaaaaaaaaatgtagagttaatttacctggaatgtagcaccaatcacagtagcagatttttctccaacaccaatagcacttagcagagccttaaggattttaaaagaaagtgatcagtaccataatacaacttcaattcaaacatttgacagaggatataagcttacttgtgtagaaagcatggtcctaatgtatgtagaaagaccctgaaaaatgaaaagatagaaaaagaaaaattatctccatttttgttatctcacagcattacaacatttccatttgcattattacctgcaaggagtcccagacttgaaaagggacataatctggggtgacactgtttggaaaaccctgcacttccattccacaagattaaaataacaatcaataacattcaaatcttgaacataataagaataattctatacataagagttcaaatcattgaaacaataaatccgcaaagcttgcctcaggtacaaacgcttggagaattcgcccccaaacatggtggaaatagctggtcgatctaatacattcaaaacaaaactaaacgaaatgggaaatacacagaaagaagaatcatggcaaggaagatgaaaaattgaaacagtaccttcggatacagagtgaaggagaggcagtaatggtggcagttttagagagcttggttgaagaagaaccattccactcttccaatataaaactcggtggtggtggtggtgatgatgatgacgacacttccatggcagattcgctacactgaatgaaagcagagtagcccaattctagttaagaataaccataacaaggtcaaaatggttataagctttatttatttagagaagtaacattagaagtagggctactttgtaacccaacacccacctctctctctctctctctccccaaaagttccgaagccttcactataattcttcctagacaatataagttacaagaaaccaaaaaatcgaatcttggagagagtattgtagaagacgatgtgagttgcccgaaactgtgcttgtcgagtatcatagaatgtggaggaaagttttttctctgcttccaaacagagccttttcctccaatcctgaaattccaaccctttactcctttctccaaccctccattttcgcccttaagagagacccacctcttccctccaccaagctccctactcaaccccctaaaaccctaaactcagacaccgtaacctctctagagaccactctccacaaatccctcctcaccgatgacactgatgaagcttggaagtccttcaaggctctcacgagtggctccgccttcccaagtaagtctctcgccaattcactaatttcccatttgtcttcgctcaaagacgttcacaatctcaaaagggcttttgcctctgccgtttatctagttgagaaaaacccaggactgttagagtttgaaacagttgaatctcttttaaactcgttcaaatgtgccaaaacttctgcccctgcttttgctttgatcaggtgcatgttcaagaataggtttttcgttccctttagtgtttggggaaatgtgctcgttgaaattagtaaaaaacatgagaatttcccggcctttttgagggttttcgaagaaacttctaggattgctctggatgagaaattgaggtttatgaaacccgacttgtcagcttgcaatgcggcgcttgagggctgttgtcatcagctaaagtcagtgattgaagctgagaaagttgtcgaaacaatgtcggttttgggtgttcgtcctgatgaaagcagttttggttatcttgcttatctgtatgcacttaagggtcttgagcagaaaatagctgagttaaagtgtttaatggttgggtttggtatttccactaaagggctttttaggagtaatttgattagtgggtatgtgatgtctggtaatttagattctgtttcagctactattttgtgtggtctgggagaaggtggagaaagcttgaatctaggtgaagaaacctattgtgaaattgtgaaaggatttcttcaaaatggtgaagtcaaagctttagctactttgattattgaagctcagaagctagagacttttactgttatagttgataaatctgttgggtatggtgtcattagcgcctgtgttaatattggattatcagacaaagcacacagcattctggatgaaatgaatgttcaagaaagcttcttggggcttggtgtttatttgccaattttgaaggcttactgcagagaacatcgaactgctgaagccactcagttggtcatggatattcggaactcggggcttgagttggatgcgggaacatatgatgctcttatagaagcatccatgtctagtcatgattttcagtctgctcttactttgttcagggacatgagagaagcaagagtatctgatttgaagggcagttaccttaccgtaatgacaggattgatggagaatcatcggccagagttaatggcagctttcctagatgaggtcgttgaggaccctcgagttgaagttagtacccatgattggaattcaataattcatgccttttgtaaggctgggagactagaagatgcaaggaggacttttagaaggatgatattcctgcagttcaaaccaaatgaacagacatatttatctttgattagtggttatgtgtctgctgagaaatatttcaatgttttgatgctttggaatgaagtaaagcgaaatgtttcaattgatggcgagaaggggattaaatttgatcagaccttggttgatgccttcctctatgctcttgtcaagggaggtttttttgatgcagttatgcaagttgttgagaaatctaaggagatgaagatttttgtggataagtggaggtacaagcacgcatttatggaaacccacaagaagcttaaagtgtcaaagttgaggaggaggaactttaggaaaatggaagcacttgttgctttcaagaattgggctggcttaagtgcataaagagcaacaagcctagagctatccattagctagctcctacctatggttcaggctctctaacaacaaaccaaaagggaagttatgagactagaacttgaaaaatcacaccctttagatttgtttcacatggctgaataagctcacaagctattcatttcttgatccatttgtctcaattttcaggtgctgagagaccttacatgtctgttgaggaggatttttaaagttaagttggcttggtttccataccaaaaactgaaagatttcattacatatgaatgaagaggccatgtagttttctaatttgaaacattagaaaatattttcagacgatgactcgtgtgtgtctatgatgaaataattggtggtcttctcggttcaatctgaaggaatgttaaccaggtccaaatttggtacccggaattagtattgcttggaaattttcttcaattgttgaaacacttaaaagcagagacaaatctcttccattttcgctgttagcttctcatactcagaaaaaaagaactgccttgttcaaaatacacacatgttttgcgttttattttttccccttgtatcaatatttacataagctataatagaaaatattgaaaattttgtaatttcattggagtcttggcttagtgacaaacaatggtaaagtttatatgtgattgtgaacacaaaaaagttagcctccatacaaaaactatgctagaaatgaaacagtatatattgtattaggccatacttcattgagaaaactagtgtgtatataaacaggatctcaccatccatacaaaaagtatgctagaaatgaaacaatacatattgtattaggccatagttcattgagaaaactagtgtgtataaaaacaagatctcatcatctcaccatccgactgctctggctagcgcagccttgttcaaacaccgaataacaagaagtattttcataatatatatcgttttgtatttatgtaagagatcttaactacatcaagaacagacacctgaatatgaatgcaaagtcttcttgcttatttgaatttcctataagaaaaatgaaagtactcaatgtttgtcccagtagtattcatttatcaaactttgttctcatgagtcatgtaaaaacaactcatgttatcatggtcagaatttaatgccttagcaacaaccccatttaacaaatggttcagcttcattaatccagtatctactgttacatgtatcagtcatataaccaagtaaaaaataaatttggaaatcctaatttacttttcctcccatccaataaattttcttatatctagacagccaaagccaacatatataattcacaaggcaatacatattcttgaaaacgtcactataagaaaaaaaaaactcttgttggtcaaaagacttagaggctatttggttgtgttttcaatttttagctctcaaaaaatagttttttccaccacactacttttactttttggtgaaaatgaaagtattcatttgtttaactaaagattgaacataatacttgttatacgtgttttctgataagggatacgtggactctcacagaggcccaccaagaaaattgggcccattatctggcccaaagtggataaaccaatcaactcattcactaagaacgagtaaaaccggaaggttagtccaaatctcataccattctccattgatatatctggatagctagtcaaagattaaaacttcatactaaacagacaaacaacacctaaatctaaggaggaggcccttaggggtcatttgggaaacagaatacaaaagtacgtacgggataggtcattatctcggaggtcgcttgcgtggtatacctctgacacgatctttagaaatttggcgacctgtcccctctgttaaaacttggaaaggcacacaacaaaaaaagaaatcacttttttgggcacacatccactactctgacatttctctctcccaacggtcttcgcctcacctgtcactgtcaacagaactatcacatatggcaggcaactcactagaattgggccttacctaccctgaccgcagtacaatatatcgcagaacatacttcaccacaaatgaaaactcttctaagcattcataattaattaataacagaagttagtgaatgtatacctttagctagctagaacccaatcacttctaataagtaggatccttgccaatcgacctcacaacctacaacataaagaaatattacaaaattaaaaatttaattatttaactacttagtggttatataatttatgagtacctagttactgactagttaagttagtaacttattaataactacttagtaaaattagtaattatttagtaataaaaataacaaactatttactagtaaaaaaataaaaatgcataaatagtaatgaaaatagaaaaaagaaataaaattaaattaaatttaatatgaacattaaaaaatagataaaagttaatttttttttctcattttatatttacatctattttgaaaaaaaaaaaattatctatacatttataataaattatatctcactaacatattttttagaatctaatttcta

SEQ ID NO: 43074 - DNA, 2612 bp, Cannabis sativa
aaggaagcccatggacgtttgatcttgcgcctctagtctttgagagggttaaacatggtgaaaatccacgattgttaacactggacacgcttaatctttgggtctaacttcacgataagacgtctaaattcatgtctgaaagggttattagagatgttaggaattatattgggaccttcgttaaatcggatcccaataatttccaaggagtgtggaggaattatctcagaattcgtgtttcaatacgggttgatttaccacttcaaagaaatatgaaattggagatgaagagtggtgcttcatgtactgttggctttaagtatgaagatctgccaaccttttgttttatctgcgaaattcttggccattccaagcggttctgtgattgtctttttgatacccatatgcatttgatagagaagccttatagtgctgaactgaaggctcctccgcgtagaagacaccattatattggagctcagtggcttcgttcggggccgacggttagttcaggcagttcaagcttccaagggagccaccaaagattggaggccagtgggagacaggctggaagagttcaaccgcacaatcaacaatcagatatcaatattcctgattttaggggggtcggtgttagagtctcaggcggatatcaagctcaagaaattactggggataatggaggagatttggagaaattgaaaggggttcttaataactctattagtaatagtgtttccctccagctggttgattcaaaaaaaaggaagacaactgtatttgagggtccacgtgggcttattgggccatctttgaatgaatttatttgtattgggcctcatggagtggatggtaatgttttcgataacaatgaaaggaacaatataaatatgattgacacaggtgacttgggcttgagttcaaaaggtgatggtaactgaaaaaacttgtttggggtgggtactggtttgcagtcccgccatctattatgaatgttttaagctggaattgccaggggcttgggaaccaacgaactttccaattcctaaaagagattgtgactcataagaaacccaattttatttttctgtgtgagactaagtgtaataaaagtagagtggagtgggctggaaatcaattgggctttgaaggtatttttgtggtggaggcccaaggttttagtgggggcttggtcctcttgtggagaaacaaagacgatgggtctttgttgggttcctctttaaaccatattgatatcagtattactattgaaggtggctcttcttggaggctcacggggttgtatggcgagcctaacacaggcaggcagtagcagagatggaatctccttagaagccttatcaacaggtctgaccttccttggtgtgtaatttgtgatgttaataatgttttgtcccaacaagataagaggggtggcaacccgtaccccaggtggctgctagaaggattccagtcttgtgttttcgattgtggcttggtggatttggaagttgtcggttaccagtacacatgggagaagtgcagaggaactagctcctgggttgaagctcttttggaccgtgcccttgtttcgaatgcctggcttcagatttttttaggtgctcttctttctaatcttgagcattcttcttcagaccattctcccatttttcttgagcctaacatcagtagtaatcataccccgtatcgccgttttcggtttcagaatgcttggctcaaggagccaatgtgcattcaaattgttaaagattgttgggagggtactggtgaggcctcggtgatgggaaaactaaacctatgtgctactaatctctctcggtggggtaaagacttgacagggaattttaaaaaaagaattcaacagtataaaaatgaattgagtgctttgaagaataaaagagatgctcagtcgataattaagtatgatgaggcaaaagttttgttagcaaaggttcttgattagagggaaactttttggaggcagaggtcgaaacaactttggctcaaagatggtgaccgcaatagtaagtattttcatgctatggctagtaagcgtaagaggcacaactcaatttcaaaactttgaaatgagcagggtgtttacactgattgggatcacggtctggcagaggtcgtagtggactattttaataatctctttactgcttcctcagttgcttattcggaggtgattgaatgtgttgatagggtggtttcggatggtagtaatgaggaattgtctcaacctgttctgaaataagaagttcgtaaggcaattttccaaatgcaccctgacaagagcccgggtcccgatggtatgactccggctttttaccaaagatgctggccgattataaggaaggatgttaccctcttcgtccaaagattctttaccactggagactttgaagtgggatgtggggatgctaatgtagttttgattcccaaaaataagaatcctgtatttatgaaggacttgcgcccgattgctttatgtaatgtcctctacaaggttatcactaaagttatcgaaaatcgtatgaaaccgctaatggatggtatcatctctgcttcccaaagtgcgtttattc

SEQ ID NO: 43075 - DNA, 2872 bp, Cannabis sativa
  modified_base (2820)..(2834): a, c, t, g, unknown or other
taacactcttctatatatttatataagttgtgttgtgttagtgttccttcttttccactgaacgcggcgacttttctttctcttcacactatacatacacacgctttctctctctttctttctctttttctttctcactaccaaataccaaaccccattaagggattaacccaatcaaaaatctatatcacattcttctctcaattctcaaacccatttccacattccgattatcggtccaacaagattatgctccgatcctgttaccgccctttagagcgctgtttcggccgatggtgtaccggcggcggtagcgatgcccttctttggcatacagacttgaagtcccatgccgccggtgattactcgatcgccgttgttcaagctaattctagcctcgaggatcagagtcaggtctttacttctccatctggtatctatgtgggtgtgtatgacggccatggtggacctgaagcttctagattcgtcaacaaacatttgtttccttatttacagagtaaatttctttatttgcaaatctttaaattcatttcggttatgcttctttagtttacctgaaatttgtgattaggaagggtttttggtgtttgagtcactggattaggttttgattacagagtttgtagcgtaaatagagaaagctttggtttcattgtgaattgggttgtgtttaatggtgtttgtcttgttcaatttttatagagttttctaaggaacaaggaggactgtctactgatgtcataaagaaggcatttagtgccactgaagaggaattcttacgcttggtgaagcgatcatttccggctagacctcaaattgcatcagttggttcatgctgtcttgttggtgctatttcaaatggtgttctgtacgtggccaatcttggggattccagagctgtcctcggccgaaaagattccaacagcaagaaaactcatgtagttgcagagcgtttgtctactgatcataatgtaggggttgaggaagtgaggaaggaggttgaagctcttcatccggatgattctcatattgtggtatatacccgtggagtttggagaataaagggcattattcaggtattgtgggtcttcattttgcttttggtagtttaccataagagcttaaaaagtgacattattatttgaaaaagtaaaggttttgtatgaatgccaaacttttctgatcagatgactattattatgtaaattcaatactttcaattatgcttattgattcaatgtaaatgtaactgattgatcttttttcatgttatttaatctgatggtgttgtttccttaggtgtcaaggtctattggtgatgtgtacttgaagaagcctgacttttatagagaccccattttccagcagttagggagcactattcctttgaagcgacctgtaatgacagctgaaccttctgtacttgtaagacagcttagacctcaggacttattcctaatatttgcatcagatggtctctgggaacaattaagcgatcagacagctgtagagattgttttcaagcaccccagagctgtaagcttttttacacatttgttataccaattcttaattgtgttcatatggccataacagtgcaagttagttttacaactctactggtttaccggagttaacttggatattgatttgcagggaattgcaaagagattggtaagagctgctcttcaagaggctgctaagaaaagagagatgagatatgatgacattaagaaaattgacaaaggtataaggcgtcatttccacgatgacattacagtggttgtagtttttcttgatcgccatgatagctccgcagaccaaaggtttaaacagcatactgccggctccacaatttcaccggttgacatctattcgttgagtggggatggattggaagaagatatgtagaggaaacttacatttttggggaatatttatatcaaaatcacaaggatcgtcttcttatattggtaggagggtttatatgggttgggggtaagaaaatcacagatgcacacacaatcttgtagataaatgagttttactaatacatgctgactggtctagcttgaaagggttttaagcttatcaaggagttaatgatgcgttttctcaattattatttaaggtttttggttgagtgaattcataaagatcaaattccattttttttgtaagttttatcataaacttattatacatggttatttgcaacttatgttaataatttgattttcaattttcttagccaaaaaaatctgctttttattgttgattctgatattttaccattttcacaaaacattaactaaatctagtggttttgagagaagctggtattggtgtgtgcaaataatctgaccacttgctccctcatagtttatgctgccatttcctaatccctatcatattattcttttcgacaattttcttgcattgtattaatattttagggaaacccaaaaatataagtagttgctaattttagttagtttatttatttagacagagttggaatatatttaaaatggtttggattagaaatttgaaaaatatgttagtttggggaaaaaaatgtatcatatcttttctcattcaaaaaaaaaaaaaaatcatatcaatttcttaactaaaattgtacatcaaatgaataataataataacaatagtaatataacaatctaaaatgaatgtatgtgagtcttttcatgttttgccataaataaaagagaattgttaaaatgccatctcactctagttttttttttaaggtgtaatattattattattattatnnnnnnnnnnnnnnntattattattattatgtaatttaatattagatctcatt

SEQ ID NO: 43076 - DNA, 3662 bp, Cannabis sativa
aatgttactgttgaaggaagctctgttaacataaccactggaattgttaacgccactatttctggtactgtttatgaggataatcagcttgctatttacaaggtcgataaagtgttgcttcctcttggaatattcggtccgaaaccgaagacgaagcagcacttggcgccttctcccacaccattgaagccttctaaagatactaattcgtcttcttcgtcgtcgtcgtctttctcctcttcagaagaatccattagcccagacgcggcagaaggggacaagtcgaacggtgttgtcttgagtaaaaatgcaattataaacatgggagtttttatggtttccgcaatctctatgtttggtcaattttagtttttagttgtgttggagattttatactgtgtgttgtgttaaattggaagcggtcagtgtttggccatggaattttgatttactgttattgtttgttggttttgtcatgagatttccattttaattttgtgcatatattgtttgaattgaattttaatgcaatgattttatttgtttgatcaattgattcatcatgatataaattaatttgattagtttttgcataaattaacttaagaaattgtgattttattaaaaaaataataaaataaaataaaaaattgtgatatgctgttttggttatccaaagtttaaacaaaataccattatatatagatagcacaaaaaggagaagaaaaaaaaaacatgcaaaaaccaattacatatacattatggaaaataaaatgaagaaatgtatacagaatttaaagataactcatttgtcacttcaaaccaatttctatctataatacttgtttttttttttcatttttaaaaaggaaaaatcttttacgaatttcctttttaatattttgtacatacttatgaatcttgttgatccataaagtgttatttcttgcctcaaaaaataagttatatacaagactattgataatagttatgtaaacatcttcttaattaatttacacaactattatcaatagtatatacaagtgaagggcaatatggactatacttgcaactattcataaaataggcatttgtctctgcaatataggcaaatttcaacaacctctctcaatttggcttttttttttttgttgattatagtaataagacatttcagttccataaaaatatatgtagtaatgcatattaatatatataatcaccttaactgcttaaaaaaatgatacctaacaatttattttttattagattgtatttactaactccatttactatacacacaattacactcatgtttattattttaatgaatttttatgattattttttttttcaaattctctttaaaaaatcattttttttttaaaaaaatatatatgtaattggtatccaataggaatctttaccccatccctgcagccactccgcccgtttacatccctatatccctataagctttcctgaataatgagatgacaattacaagtgtagtacttattaattacatatacacaataagtattatttatttttctttgaatatatttttaatatataggttagatgtcttttcttaagctaatctatatctagggcgaggtgcatatatatgagtcatcataatctaaatcgaacacccaactcacatatatatctttgatatattatatatcataaagttgggctatctcccacaacgtcacaaaccatcattatcaatcttaatttttgctcttccattagtgtcaaaaacaaacattgcatatctatcttagaaaactatgtattacgtaccatatagtttgatttgttaaacttataatcactatacatgcaccctttaacctaatattactatacctataaaaacccttcttccccttcttccaactccatcatcaaaaacaattatatcatcaaatcccacacttattaaacaacccaagaaaaaagaaaagaaaagaaaatttcactacaacaaaatggtgaaacaagttatcatcttgtccttcttcattgttttcctctttcactcttcttctactttagctcaatctccagctcactccccaactcagcctcaaaaaccaattcctaaagctcaatcacctactactaaacccgtccttgctcaaccgccatctcaagcagtactaccggctccttctcaagctccaacccaaaagcctctccctcacaccccaccgcgaaagccaaccactaagccagccccgcctaatgtcactgagatcctcgacaaagctggaggcttcagtgtcttcgtccgcctccttaaaaacactcaagtcgtcaatcagatcgaaaatcaactcaacacttccaacagcttaaccattttggccccaaccaacggtggattctctagtctaaaagccggtgctctcaacggccttaccccagagcaaaaagtccaactcctacaataccatatccttccatcctacgttcccctccaaaacttcgaaaccctaaccaaccctgtccgtacacaagccagtaacactgaggattaccctatgaacattacaacggagggaaacttcgtaaacatttctactggaattgttaacgctacactttctggtacagtctactctgataatcgactagccatttatagagttgatactgttcttcttcctttaggtatctttggctcgaaagcgcctactccttctcctactcctgctcctactccagctccactcgcgcatttaaaacctaagaagtcttctactccaacaagtacttcatcatcatcctcagctgctttgccttccaactcatcattggcacctaaagcgcctaaaaagccattaaatttgtcgtcaaccacctcttcctcgatcactcctgtgtcggcattggatgaatccggtgtcgttgccctaacttcaagtaatggcgttgtgattggccttgttgtgactggggtcgctgcagttatgagtattttgggttaattatgatcaatatgtttgagtacttgtaattcatagatcatgattgatgatttatccggaataatttgaaagttatttatcattgttattattttatagtagtagttaaatgtattattgtatgttgtgatgatcagaacttttgtattgtgtggatttggttaatatatattcttttgttttcccacatttaagcactatatcatttatttttattattgtatgttgttatttatttcattttttattacatgcaactaattaatatttatgataaattagtagtttgtttattataactataatataggttgttatagaagaaagtttgagtaattaaatatttttctccatgtgctaaaattaagattcctgtgtttgtgatacaaaatgattccactaattgggggattcaaaattgaatgttagggtggtttagttatatacatctaatataattcaaaataataaataaatagctaaatttaactggaatgatagtttagcaacatccttttttattgtagtgttcataagtttgaacctaatttgaactttatacttgatttttttttttaataaataaaaaatagatacatgcacatagaaaaaatgggcaatagaatttaaaatatggtctcccatataaatttaaag

SEQ ID NO: 43077 - DNA, 6578 bp, Cannabis sativa
ttcctaatttccttgattgttgcctaattctactatgtaatcagcctatataaaggctacattttcatcaataatatcagattagaagtatcattcccaaattgctacatatataaaaatatcttttggaaaattgacttgaacaccttcatttagtattgacaatactgccctatttcttagcaatcccctctccctcacaccacaagcacatctactattcgggttaagttatcatgaatcttcgaaattgtattcaatgtgcttttatataagcacgaatgaacagattgtgaatctgaagccatatacacatatatatttaaagttccttagtccatgtgcatgtgtatatgtgaatgaaatgggaaaaagactagaagtttatgtgtgcatttacgtggttggaaaataattgttctagaatataagagatgtgaaaataaaatttaaatgtcctacatttgattaaaaaaaggacagattagagaaagaaagcaaaaataaaaagtgacaatagagccacaaattatttagtagcgttactcctgaagttgaatagggttcttattcttttccttggaaaatttgaaccaatgacctcttggatttgaagtgtcaaaatagttaaataaaaaaaatggcaacaataatccatttgacaaagcaattaaagacaaagagcatgttaattagcactgttaatctaaattccagaaaaactcacacaaacatgacttgctcaacaaccaaactcagggacagtaatcacaagatacaaggggtggaatcatacattgtaaaacacatgattaatctaataaaacatattaccattgtagtaaagcactacaaaaattagtgttttataaagaaaaagagaaactaaatgaaagggtagtttgagtgactccaaaggaaaaaagaaaaagccaataattatattttgtttgagagccaaacgcaaggacaaccaatagtctccacgcttcaggaggtaaagaagttatgaacacaatgtattacaggacaattgaacattttgtaaaacatacacaaccctgtccaagaacttaggctaaatagtagacgataattactgtagattctaaaatcaaataagtaaatgtcatggcatcgtactcgctatacattacagaaccttaaaaaaggtatagctattttacttgatgccagctcgtacctgagtgacgatgactagtctttggacatcttgatcattaactatcacctcttcatcttcatcgtcaattctactggtcaacaaggtcattcaaaattaaaatggatggaggcattaggaagggcacgctacagatgaactatcccttaaatgaggaactgtacacatttaaatacttccacatgaagtaggaaaaaaatactaaatgcttggatgcaaaatactaaaatgtttgttaaaggtcagaaaggaagagaaagggaaaaaaaaatggaagagattgtgaagaagatacaaaaatgcggaaggaaaaattggaatgggggattctctatttctacattatctttatcaaccaaaatgtagtctttgtttctgacagaatttggagtgcaatgggttttgacacagatgtaggtaagcaagcaaacagaaactagggatcatggctaataaggcaacttactggctctttggtagggaaactaggatttacgtaaaattggattgttcacaaattttgggaaaaattatattggtcgccagttgggatttaaaaaaaaaaaaaaaagattaaaatcccttttctttttcaatttaagacgattctgtgtatctttagatgaaaaataccttgcagtctctagtaattattctcctcttttatacaatcttattatcaaaaggagaaaaatggaatgatgcaacataaagttaaatcctccaaaaattaagaaaagggaatggaaaacttctcaaattgataagggttttgaaaaatcagggagatttaaagtaatgatgtatggggaaaacagtaactttaaatcaactttttctccctctatcaaactctagaaaagaatgctttctattattcgtccacattttttctcttttactttttgaagagtagcagacccaaaaaaaaatgagcaccggaaaaagatttaaaaaacatgtatgttttttttttgaaataaaaaaaaacatgtatgtttaatacaattatatgcactcacaaaatttatatatgaaaattttattagaaatataatatatttgtaaatgtagtaatgtacaaataatgaccaaagtaaaatattacatgaaaaataaatataagaagtttcaatatgtgcattatagcaaagttttatatagaaatggctaaaatgaagaaagaaattacacattttttaaaaaaattcaggtggggcaactgccaaactataaaattacaaataatgaccaaagtataaaaatttacatgtaaaataaaacaaaaaaaattcaacaggtgcattatagtgaacttttatacagaaaaggctaaaacgaaaaaaaaaagtaaataaataaataaggagggcagcctaagtaagaactggatctgccagttccctacccttaccaatttctttcatccctaaattatgtgttgccaaaacataaaaacaagtgcagcagcaagcagagaaactacctgtaccttctagctgatgaaagaccatcattctttgttactttatgctcaagctccagttcttcgtcgagcataaacgtattggcaaaatcattggatatgtcatcatgattcttaatagccacctcagatgacatttgagtgccctcagtacaaggttcatcacatttagaaggtttggtaccttgcgagtgatctgtgcaagttgaaatattgctgccaagatctgagcacttgctgttggatggaacatttgatttcccaattgagtcgccacatccgcctgaaggggattcaccattaatggaaaaactattactttcctgagccttgttgtttaaaggaaactgttcagtcaatttatcatcattttttgccgggtcgacattttcttcagaagcctcccttttactatcaccatgtccatcattgttaaaaacagacttctctgaaagctggcctgagggagtctcgggttttgatgtcacattggaatctgcctgagctggaatccatttttcccacccatcacgcctccgtatcttgtttccctaaaagtacataacacaaaactccaaattaaaatatacattagttaggagaaaaagagacctctagggacttgctaaaacaggaaactctagaaaataaattagtgataactctaagaaggcttcatatcaaaaatttcactgaactttaagattgcaccaaacactaatgcttttgaatatgaaaagttgagcaggaataaagttcaatgaaataacagatagagcttaaggaaaataacctgcacttctacagtaactgagccttgcagcgcatcaagaataaatgagatatctgtggtcattttcttaacctgtatcaaacagaaatattttcccaaataagtcttaacattactgctctcagataaataaataattaaacagaaaatcatgaaatcattgaagcatcaaccatatgaattatttatctattaattctgaacttactcgtttgaattctgcgatgagggatattggaaccagtccttggtcatccattacagaaattaaataacggtcatttcgcaaattctcatcactgccaaatgaaaattaataagtcagtggctatcaatgctcttgtacgaaacagaataaataaaagtaaatgtctgcaatcgcacgcatgaacacacaaagcaacaaatagaatgatgcatttttctattcacattagctctcttacctgaaatagtattcaatttgtttcactaaatcactttttaaatccaatgtcttcggggacaccattggagcaccagggctgagagggtatggaaccatatatggaggacccctagtagcagtttggtgtccagctgatacatagtacattggtccaggtcctgcgcaaaaaatgcaagccagttgtagattattatatttaaaagctaacggaaacgatgaatatggcatacaaatgcatatattaattttgtatatgtagcaagaaaattctggtgagtgagaacacaaacaaaaaaactcagttggatgatgaaaaataacattatcctaaaaaatcacacaattaattgatgtaattaccctggaaacttggtaccatgaacccaggacccgcaggaaaataatgaggtccagcgaaaggtctaggcccaataccctgttgcatttgaatgggggggtccctatatgctcgttgatgatgccaattctgattccaatggctgacagattcttgtgcattgggtcttctattggaaaagtgggcagggtaaacattttggtcccctcgtgggagcgggagagggagaggctgagctggtgtcataaatgcttgaactggtgtctcagatccagattttcccaaatgagtttcaacattttgaacaggtccagagaatggctggtatggatacgcagaaactgccataggaggtggaggtcccatagaatgaattacgggcggagctacaggttgaagcgggtgaaagaatggaacaggaacaggaacagaaccagagccgtgcggattacgcttagaccctgatcttagatgtcgtgatggatgcttgtgtgaaggattaacatttcctgagccataagtcttttgatgcccaactgatccctggatgaccaaacaaaaatgtaaacaacagctagttttgttaatgtttcctaggcgtaagatcatatattatatttaattacaacaaataaaatggtggagatacaaagatctctcaccttccatttgatgttttgttaaaaacaagaatgatacagcatgacacctatattataacacttaaactaaattaaaaaataatacacatcataagacaaagagcaagaatgtagtgtatcctgaaactccacaaaatcaaaccacacagcttaagcattacaagttcacatcaaccacgttatctgtcggctcaaaaatcatagccagacctctctcaaagttcatttaagaaaaattttaaaaatgacaataatgataaaaaagtaacttatagcgaaacagaatgttatagtgatactgcgcaagaaattaattctgaaaaatattgaatcccactacatagataccaatttcctagctttaggagacaaatattcaaggataagcttttaaatcaacgaaagtatctaaataataaagacccaacacaactaagcccattaaatagcgacatcaacaaaatactatcttcctccaacgtattattactagatcaacaacccatatggtgaagctctttgaaaacaaaaaccctacaaattagatcgatatccaagttcctcctttaaaaaaacaaatgtataagttaatacttctcagcatatataatcataacaaactatccaacgttttacaaaatgagacaaatacaatgactcgtattaaaatcgaaacaaattggttatcagcatccaaacctgcacagtaactggagattggggcggcggcgccactgcattagaagggggaccagttgttgttgcctctgcagccggtatagagggcggtttagccaaatcaggattgctcttagtcagttgagcagcagtaagagtaggccaagactccgcaggccccatcacaggcatatccgcagccgccttagcgtcaagcgccgccggagtcttccacggggacttgggcccaccattgaggtcccttccatcatccccaccgtcattctccgccaccaccattcctcctacgatctcaccaaccaaccaaccaaccgaaaatcctctcttttcttctcaaccgaaataacggattgttgtattggcaccaaatcagtcactgacacaatccggcaaaatcaaagatcttgagagcaataatagagctagaggtagaagtagtagccagtgatcatggcgagggtttcaactcagtcgcgaggacgaggagagagaatgcgagagaattagggttttaggagagagagagaaagagtgagtgtgttcctttccgagcaatagcgattgacagttacggagaaaaaatagaaagtaagttacggtggaaattctatttaggttttgtaagtctatattattatttatagtcttaccaaattttaattttattttccaatattttaaataaatgatattctgtttttgcttaagcctatattagggattaatatctactgatattttttcatcatttaataaataaataaaaagataactaacaaatttttaaaaattaacgggtcgttccatctaaaaaatattttaaaattaatataatgtaaatataaaattaatgtaaacatttaactgaatttaaaattaatgtgcggttatttatttatgtataatttaaaattagatattttataga

SEQ ID NO: 43078 - DNA, 1711 bp, Cannabis sativa
ttaaagagtgttaaaaagtaatttgttacctttttttttcttcttaagaaatattatagtataatataaaaattgttcattaattataaatgtcacattcatatgtgttagggtatcaatttaaattaagaagaatagataagaattgacttgaatataagtgttatacatattttattagtatgaggttcgtgaggacttagacttaaaacggatcacttaataaggtgaaagaacagggtccaacaaattatattagagccaaaagtttagaaagtagtgtcttatatcaaaactctacttaatattgtggtcgacgtattctattggtccaacagtatggttttcgcaaggtgcgaaaatctacttaatttattacttttttttttcttgagaaactaattcttaacataaagtctgacacgttttaatttattaaatcataataaaaattattaactaattacaaatgttgcattggtatgtgttgaggtatcaacttaagtctcatattgaaagaataaataagaattatcttaaatataagcgttatacattttattagtgcaaaattttttggaaaagtggttgaaatatattcgtgagggcttaaacttaaagtgaatgatccaacaaagtagaagaataagacccaataaattgtatagagccaaatttaaaaatgggtaaatattattttggactttgtgttttgcaaaaattattaatttgatcctttattttgttaaatagtaaaatgaatcatgtattttctaaaattgtaccaataagactctgaattgattttttattaaaataaaacataataataatttgatctagagatattatgacaaaactgttcatattttctgtatttgttcgtattaaaaattgtcttaaaattgattatattaaaaaataaaattattaaaaaatgagtttaggtatctatttttactattttaaaaaatataaaatttattttattatttaacaaaataaaaaatttaattaataattttcacaaaatataaaatttaataatatttattcatttatatcgaaagtgtacttgatattgcagtcgacgtgtccaattgggcccaactatactgtttgaaacgaggtgcgaaacaagaatgcttttgtgccttgaattgaagtaattcatttataatttgaataagactttgtttgtggcattatctttctttctttctttttaattaaattgttggagattaacttccaattttgtgttggtggcatatcaagatcaactttgtcagtgactctggtggccccacacaaagaaatgagtcatgaattttacttggttttttattggtgggtatacaatgcatgcacgtgatttcaaacaagaagccacacgctcaccctagctagctacctatacctcctttctcatgggaaggaaggaacattagattgaattgaattgaattgaattgaagggcatagaagcagccacgccactacaaaacaatctcatcattcccctcatcaatctcatctctttaattaataactcccccctaactctttcttaattaaaacaaaacattgtatattatatatctatacgtatatataaaataaatataatatatgggacacgattttgtcccgtgatgtactttcacggaatgtattctgtggtacattaaatgagtctcagggtacatta

SEQ ID NO: 43079 - DNA, 3955 bp, Cannabis sativa
  modified_base (3732)..(3733): a, c, t, g, unknown or other
ataattttgattattactttgtatatatatatatggaaattataattatgattttaacataaatatatatatatatatgtggcagtttctatacactgatcgagtacacgttatgatgaaacataatcttcaagagagaggtttgttctcattgcggtaagtatattaattattaattacaacttataattataaacactacaaaaatattataattagcaaatacaataaatttttttttttttaactaaatttaatttttagtcacaataaaaaattaattgtaattaaaatatagtatttagatactatcactattttaattttaattataataaattttgcgactaaaaataaaattttttgtactatatatactataaaattcctctaaaacaatcatactatttgtggggcacaaccaaaggggcatgtggggtcatttacctcctcaactttttattaattacatttttatatacatattttttaatatttcacatctaattttttttatttatacttttatatatttttatttttgtccacatgaaatttatgtttttcaattttatctttataaaatttatatttctcattttattctccaatatttttatttttagtgtcccactaaaatttatatttttctcgattaaaattatatttatcattagtactctaattttttttgatcccactaaaatatgtggctgactccgttactactattagtattagtcgcgaattctaccttttgtagtagtgacatatatgtaaatatttggttaatttggacaacatttgtattgaatcataattaatagtgggtgaaattgttacttaaaagagtgtaattaattatacattgatttggtacatttaatttcagtcgagatggaagagaagaagatgataataaagtggataaaatactgaatccatgggcagcagactctcgactatggaattttatattcttagcttcatgtctaattggagtctcaattgatccattgttcctctacgtaccaattgtagacgataatcgaaaatgcctcaaaagagactataatatggagatcatagctcttgttttgcgatctgttactgatttgttttacgttttccatgtctgttttcggcttcataatgccttgaaaatgtccaaagaacttcatgtatccattttcacaaattttccgtggtttcatcttctgatcgatattttgtccattcttcctcttcctcaggtatattattattattaattattaacttttcttttgtttaagattttgtttgtgagcatacttcataattattgtatttgttgtagttacaatatttttcttgcaagttcttacttcttttaatagtttacaatgtttaaaacaaggttattaatttttttcaagcgcatgtgcataagtaaactagaatatcaagaacgatatatgttttcagtaatgtaaattatttatttatttttttaaaataaatacatgaataaggttgggattgagaaatttttggggaatgtcttgatgtgttgatgattgaaatgcatagcgattgtaattaatactcctctaattagaaatatttgtgtgtatgtaggtggtagttttactatacttttcccaaattacaggatcaagatctttgagtggaagaaagttcatcaacttaatacttcttctccaatatgtgcctcgtcttcttcgtgtgtacttaacagctaaagagataggaaagggtttcgactcactcatcagtcaacgtgtatgggtcagatgtgccttcttctttttcgtctaccttaattttggtcatgtaagtattatatatcatcatttttatcttcctttttgttttataatagttgctaaagttagaatgatagaatactatatgtaacaagggtttggttccaattgaaatgactcaaacccgaactatgtggctccacgtgattagttggaaccctacaaagattgtcgagctaacaatattctttgtagggctaacctaaccattttcatagctcggattgtgagtttcaatgggaaattaactacaatattttttaatttttatattaggttttcggagcgttttggtacttctattcaatttttcgcgagacagcttgctggcacgaagcttgtaaatatcacatgccaaaacaatgtacacctggtccttttgattgtagtcttggaattgaaagtcatcccataaagaatttgacaaagttaaatcagtattgcccaattaatccaccagatccaaaaatcttcaattttggaatgttttcgggagctattgagtctcgcatagtcaacaatactgattttcccacgaaattcactcgtagttttttctggggcttgaaaaatttgaggtttgtaaatatatcctatgtttattaagatgtgatatttctaattaattttcatacatatcttttaattttcttttatttttcttgtagttcttttggttccaaccttgacacaagtggcaatattgtagaaaacttgttcgcaattctcatttcaatcttgggtttactattatttttatatcttattggaaatttgcaggtatgtatacttactcttagtctttgttaatcaatttttttaaaaaaacataataaatatagctacaaattaaactcaaacactagctattgtttcaaaatattaataaaaaaatatatttacatattttatttttaacaaattagaaagaaaaaaatgtaaaacattaatttaattgggcaccctagaaaaccctcaaaatatttaaatgcatcatattttgcaaataaactttttattggaactaattatattacctatgatatatatatacatatattatatagacatatatgcagttggaaactacaaaatcagaagaggataggaaaaagataagcatcatacaaccagaaatagattcttatctcacaaaccatggcattccatctcgaaaaaagaaactcatcaacaaatacctaagtcgaaaaattagacaaggcgaagatattgatgtcaaatatctcttttctatactcgaggagcatgctgatcaaggccaacacaagagtcatgaggttcgtaaataattttttataaaatcttattacttttagtaacaacaaaatttataattaaaaataaaaaaaaacgaaaaatatattattgcaatatttataaagtattgaaacttattttcattcattttaatagacatttgcagcttgggtaactaaattatcggatatgaaaaagcatgagagtagtacaatggagcaaaaggtagagctgtggatatcaaaaaatggaatccctaatgatttaaagttgaagattaagaaatatgtcaagtttaaattgcaagaaggaaaagatataaatattgagcatcttatgtatattcttcctccaacactaagaatctgtatgacagagcacatgtgtttctctatcttgaaaaaagtaagtgattttttgttgtttatattatatatatgtacttaaattagttattactacttaagaccatcattaattaattattttttgttgttggtatataccataattatcataatttaatttgttttatataatgttgtgcattatagttataataatttttcttacaattattgataatatacactatacaaaattttttacttttagtcacaataanntttgtgactaaaagtaaaaaaatggtgactaattataataaaacatcattcttatgtgattaaaaggtccgtggttaaaggtattagttacaaaaattataatttgttgtggctaaatgtggttttagtctgactaaaactaaattagtgacaaattgtaactaaatgctatgttttattcacaagtaactttttgttgtgactaaaagtcccatttagtca

SEQ ID NO: 43080 - DNA, 3795 bp, Cannabis sativa
tattgtgtaatgattaggagatctaatttctttatttaatgaacatccttcctttcaagagaaaaaaacaattcagcactttgccgaaaattaggaattctatctaggataggagcaaaaagaaaggacccaaattaattttttgagaggtggaggggaccaacaatactcataataattaatgtatatttctctttttttttcctgtttttggagagagctatatcaaactataaaaataagtatataagtcgctatctatttcgttttgagtttattttacaaaaagaacttcatctctctatttacaactgtcatctgctatgattacgttttgatcacggtttacatccaaaaattatattgcagctatagcatagtagttacaaaacaattcacgtcgttgggtttagtattaattcttttaaatacgctatgtctggtttgaattttttttctttgattatttggaaccaataaattaacttaagattttattaacatgtccgtataatttatcaatatcttttaacatatttgtttccattaaattaaatcaattattaattcaggctctcctgttcattattggtgttgacaagcctgttatcttattgaaaaataaataaaattaaacgagtgccggctgttttttcgtctaattttttctgcgaacacagcaaataaattattgatgagagaaataattataataataatgtgatcccacctgtcacacatagtgaatattttgatattaacgttaattaatcaattattgcttataagaataatgctatattctcatatctatatataacatatataattatatatgaaaaatatatatgtaataataatatttatttatatacatatgattctagcacttcatcacttgagtaaaatttatcatttaaaacgagttggaaacatattataaacagctccaaccgatatgaagactcgattttttttttcttttaatattgatttttttcccattttaattcttaaagagatccacaccgtttttggtgacgaaaattaacaaatagataataatagactaatttatctccaatcggaatcatatacaattatacattaatttataatttactataatattatatgatcggatcgatccaataacaaagaaagaaatacacacaatccaatttgaatagttgctagctaattaaacagtactatacagtacagtattgttaattaaccctaattaaacattattcaacactgaaaatcaaaagaattataattaattaatttataaaagcatatctaaatcatagatgatgtggataaacaggaatgctctgctcattcctaaagaaatttgctgggtcaaccctcgttttaatctccaccaacctattgaaattacctttgaaatacttaactccataagctcttccttccaaatagctgcctttcccattatgattgattcccaaatcaagatccttataattataaaaagcttctctgggatttttggacacaaaaggagtcatatattgatagagtttcctggtcaaaccaatgtatttatcggtcaaacctttctggctttcgttccaatcgattgcgtactgaatcaaagccaagtttccagctctatgagggaatggactcgcattctcaggaatctgagccattctaccaccataaggattgaaagtcagcctcaagggaccatcaagctccatcattctaccccaaatcgattccaaacccttcttcgtaatgggttttttcacgtaatcagatttccgttttaagtagttgaccgttggggttcgagtgagcaaaacgctgtcgtatgagccattggggatattggtcgtccagaaaagtacagtggctttaatccaactcgtttcattacagtcagatttctttaaacccaattcaggaaagctctttcccaatatggaaacaacgttttcagaatcaccaagataaaatccattgaaagtagctctacccgttttgtttcctgttttagtatcatttttcacgtccattacaagccttaagaaaacgtcgtcgtctagtttattagccacgtgttgccactttgaagcaattaacaaagcattttgttccatagttctctggacactgaaaaatgttgctttttctggcacacgaacgagtttaatcttgtaagccaaaacgacaccgtaactagctcctccaccaccacttatagcccaaaacaaatcttcccccatagcttttctatcaagaagcctaccattaacatcaatcattagggcatcgtctaaattatcaactgttagaccaaattttctcatcatacttccataaccaccgccgcttatatggccaccaacaccgaccgtagggcacacacctgcggggtagccatggattttgctcctttgtgctatgttatagtaaacttcaccaagagttgcacctgtttgaacccatgcagtctctttttcgatatctatatcgatttttcggagattaaacatgtccaggatgaagaaagggacttcggctacgtatgaaacgccttcgtaatcgtggcctccgcttctgatcttcatttgcaaatggagtttgcgagcacaaacaatggcggcttggatatgggactcatgcagggctgttatgatgagaaagggttttcgggttgaggaagtgttgaatcttaggtttcggatgtaggattgtaaaacggaggagaaagtagagtttttcggggtgaagatagccggtgaaattgggtgagaggggtgtgagttttctagaaggcagggaatgaagtcatgaggacttggattattacttagagcatatgccggccatgaatgccaaagtagaagaaatattaatggtgcaaatattaacaaaagatttggagactttgaaatattggccatttttgttttttagatgggatattatgatttgtgttgtggggtttttttggatgtgtttgtatgacattttataggcttgttgggtttgaggtttggacaaaaaaagtcaaacaactcttatgttgaagattattatacattcacttgtttaaaattggcaccttttcttgacgtggaaaagtcaaagtataattgagaacgtaataaatttatagttgccttgacattatctatcttaattaattcaatattaatatagtgaaatgaatcaacttttgacataacaatactgggttagtgttgacatgtttattattttaaaaatgtggatttaattaacataacttttcacgttaggtattgtttaattagctacaaggtcaggttacggctgtatattatatatgtttgtaattgaagaatgttgacatagttaagagtattcatattggcattagtactcaacactttttataggtaatgttttacaattggttaatgatattttttaaaaattattttttttaagttatataagaccggatacttttttttttaaaaacaaacaaaaattttattcacaacagaagcaaatacaacccaaagctagcaaaaacgctgctcgaactcaatagagtaaatcaccaactctctataatcaaaagtatatataattcacatatttttttaactcttttacaaatcaatcctattactctatacttaacctccttttgaatctccttcctaatactattaactgccatacacttaaattcaaaaacaaaggtttctgtttcgccacacaaaataaatcattgctgctataatagtaatattctgcagtagattt

SEQ ID NO: 43081 - DNA, 5896 bp, Cannabis sativa
  modified_base (5501)..(5504): a, c, t, g, unknown or other
atttatgttacttattaatttatttttcatcaatatagtagtacttgttattaaaattaatcccacgttctctgaagtcactttaatattttaaattagtaataagtaaagttgtacataaaataaagtataactataatataaaattaaaatttaaaatttaaaatcaagtaaaatcagtaggtattaaaaatatttgagatggatactttatttacaatactttaattaattattatgaaaatacataattgaaaaagtatagtttgaattattatttatttttttacataacaaataattttatgctataacgttttttttataacactaataatttttttttattattaactttagtattttaacatttataaaaaaaattatattaaagaatttaatgaataagtgttgaaattaagatttataatattctttttttaaaaaaagtacaatataatttgaaaagttattaaaaagtacagtataatttgaaattaaaaagtacatcaatcaatatcaactttttaaaaataatgatttttaaatacaatatgaaccggtgaccaacttataaaatttaactactcctactttaatcttagccttcagatcgggtccctacaaatattaattatgattattttttatttatttagttaaatttcttcactactttgtttggattctaaatagtgtctactcccttttcaaaaaataaaaaataaaaaaaaatagtactctagtttttttttttgaaatgagaatagtactctagttaacttgccatacctgtgatattttctggttacccataccattttgactctcaggctctgacactgaatagtcaaacccattcctcctgaatctggatcacatcaccatcataattaataatgggaggtaaatttcagacttcaattccttctattacagcttttcctaccattcattttatcctaattttgttccttccttgtgcattttcctcagattcagaatcagcttctccttcaccgagtttatggttggcccccaatccgagtaagagatggggagaattgtttttccttttgtacactcccttctggctcactctttgcttgggtatcgttgttccctacaagctatacgaggttcgcttttacttcctttgtagttggttgccagactctgtttggttcatgggaaagtgagggaaccataggctggattttgatttgggccgtattataataatattcttgattggatttgtgttgtggtccttgcagagatttacggaattggagtatttgattctgggtttggtttcagctgttccttcgtttcttataccattaatatgggttggaaaggtaatattctcaaaatgtatatagtggcagtgtataaggatgttagtcttgttgacaattatggactgtatgtgttgatttcatatttgtttcgttttacttaataagtcaattcattgttcagatatataaatttaataaaagaatagaagaatttgaaagaatcaactttcacccgaaagtttcacataccagctttgaggactagtaaacgcttgtaaaaccattttggggttttaaacttcatttagtttccatttccttacgcaattttggctttatttgtactctatgatgacaattattagcaattaatcttataaaagcacctgttttaattggtttttggtatacaattttatggtttgctgttggatatttgttgcaaacatgcaaaagagtagttgttattttaatatccgatgctctaggtcatattttacttgttttaatttaacatttcctctctgaaaaattttgcaggctgatagaagcatttcatggaaggatcggtattgggtcaaggtaagtatcttaaaatattagtatgatgaccatggattgtttgcttagtaccggggacatgccatatggttattgtgttttttcactatggtgatatgttttgtctgtataaaaaaacacagttaaattgtttggattggaacatatcaattttcacacttctgttaataatcatttgtttctgatattttgtgatcttttacatctttttcatatttgtagcacttgttctataagtgaggcttaccaaaatcttaaatgggaaaattaaagcatagagtgttcactaaattatcaaagttttttagctggtacatatcaaagttttttagccaggttcatcttaaacaaaataaaacatagtaatcagaatatttcctaggaaaagcaatactattctttaggtgttatttagtttagttgggtcatagggggaataattcagcacttttacctttccgtagtttattcgattgaaggcttttatcatgcaaagactcttttggaattttgtgttgaaatgcagtatctcttaaaaattagtgatacaggaatttgagaaagacttcagtcttcatagattttgtgaacttgttagtagagaatttcttttaattttttgctgtgtaatactcttatctgaatgtgttgaggcaggctaccctttggatattcatctttagctatgttggtaattacttttggacacactacttcttcacagtactgggagcttcatatacatttccatcatggaggatgaacaatgtaagtttaaataatgtagaagaaatgggcaataggtctgattatcatctctcctaataagtgtatgttgatgtttatgtacaggtaccacatacaactttccttcttgctcattgttgcttcctgttttatcacgtaacctcgaacattacacttcgtagattgcggcatgccattgctgacatgcctgaaagagttcaatgggctattgaggcagcatggattttggcactttcttatttcatagcatttctggagacttttgctattgctaatgtatgttactgcaccttgctctacgtatagtagtataaatagattaagatccttctttatggtggctggcatatcaagcccaagctagtgatacagtacagttttagattactgctgttttgactagtcttggttatccctctgcatttgctgtttattgccttggtagttttggcaatcccctttatttaccttctgtttcataatgacagtaaacccatatgttgttttcttctgcttctgtttttttttggggaaggctacagcccctttggaattattccagttagagaatagtgtattttaattcagctaattctcatacagaaattaacaatattttgctgctcattgtacagtttccttactatgagtttgtggatcgggcaagcatgtataaagttgggtctttgttttatgccatctacttcgttgtgagcttcccaatgtttctaaggtaagaacctgtttagctaagattatttgactaatttcaattgcgtaatacacataaatttgcaagacaagttcctttttaagtcaatataggattgagttcagtggactttggttcatcttcgttttgcaggatcgatgaaaaatctggtgctccatgggacttacctagagttgctatagatgctcttggtgctgcaatgctggtcaccataatactcgatttatggcgcatctttttgggacctataatcccagtttcagacacaaaacagtgccttcaaccaggactaccatggttccatggacattccactgaagtttgaccattgcatctgcataaggaacccgggtttttgctagaccaaccgcagaattaacctggaaccgagctctatgatttattgtggacccactgatgctgtagtaagcttaagccataactgtaacaaagacctcactaatgtagctttccccccttttaggggcaatgagagaattgcaggaggaaatgtttcattgtgcttgcctttcctgagtttgtttcactagttgagttctccctattattctttgttatcatttctcactcagttaccatcattaccaagtggcaaatgcatcaaacatgaaggtcagagcatggcaccattggactaaaatgtttattatcccgtattttaatgggagtaagagtaaatatttgattggaggtaatgaaatggaatggaaaggaaaggaaacaatcttcattccttgatctggttgcatattaaaatgttggaatgactattccattttgaaatggaaggaaagaccattctaatgtatgatgagaaaaaatttaataattttttatcaattttttctttttatgtattttaaattttattccattcctattcccattctcattctcattcccatgttttcattccttctaaccaaacgccaccttagtgttaggcactgttattgttttatgtattatttcctaatttaaaattaagggtatgagaattcgaacccctctatcctttctttgtaatgaaactcgagaaagtaaatcattagttatgccaccttgttttagaataattagggtgtatttgaaagtaaccgtctaattagtaaatagtttaattatcaagagtaattagtaattacatataaattcttaatattttatttgaaaatagttagtaattacacttgaaaaataatatttttttttttgataaataatacttaaaatggaaagttgtaattactcttaattttcacgaggccatgagaattagcccttaattacttttaatacaatattatgtttagtattgacttatattaataagttgtgtaaatatgccataaactcgacctcgcatatcctcgaccttagctctgggcgctaaacatagactcgaaccctgatattgaccctagcctgatcttggacccggtcgacacagacacttgccacagactttagtcacgaccccggacgccaaatccccgccatgggctcggacttggatgttagctttcgacctcgatccaaacccaggtttagaccctgacccgaacctcaggcccatcacctgacctcgaacctaaccctaatctcggactccagtcttagaccatttataagtattataatacaagataatatgaatcatttcttatgaattaataatatgatttatattatattaaaatttatgatggtaataaataataaaatataaagttttatcctaacatagtgtttcttcttatttaatatactacgattcttatatagcttaccaaacgaaacgagctattattgtgtaaacatattaaattatataattacctttaattacttccaaattcaattacaccataattttctaaatacactctttaataattaatgaaataaataagaacttttaaaatatttattttttatggtttatttttttaataatacaatcttcaaaaaacatccaatttttaaagtttttagttcaaaatcacatttttttttaataaataaaagttatagtaaggacataatttttttttttttttcatttagggcttgtttggtacgccgtataaggnnnntactgtattaaataataaataacactatgtttagattaagcaatgtattgtattaattattacgaccaaatttttttaatacaatgtatgttgtattatttaatacataataaatggcccgtattaacttggattataatattaataaagaattttgggtcaataccgatcctgaaccaggacccggactcggacggtcggacctgaacccagacccggaccccggcccgaactcggaccttggacccaaacgccggacccggacccggaccccgaacccgaatccggaccccagaccttgacctaaacctggacccgaacccggacccggacccggacctagaccccggacctgaacccgaactcggaccacgaacccgaacccggacccg

SEQ ID NO: 43082 - DNA, 2801 bp, Cannabis sativa
ttttattttttatttaatgaaaatatgaaaataaataaatacgggttaatattattttggacgggataggttgagaactattattttttattatacattaattaaatataattgtaaaataattttaattgataaatactttattttataaacaaagtattaaatataacttcacataatttattaaaattagagttcctaatacacataatgtggatataacctataaaattgaatataaattaaagagtaataaaagaaaaataaaattaaaataagaaatatacagtgtaatttcttcattttggacctgtgttttgaaaaagttagagatttgactttctgttttgctaaattacagtttgaatcctgtattttttaaaatagtataaaatagacattaaatttaattttttttttttaacttacaactcatttctagatgtaagaaaaatataattgtttttatcataatacttctaaataaagttattattaaattttaatttgacgaaaattattatcatagtatactttgtactatttttaaaaatacataatttgaattattatttaataaaataaaaaaatttaattaataaattttgtaaaatacagtatttaaaatattattgacccaataaataataataaatgaaaatctttattgttcactttgaggacgtgaatgatatcaaatttagtgaattaattcccctgaaaacaaagtatgaaagaaaaaaaaaaagagtaagtggaagattttgaattgaaatttctctcgtggcgagcacaaaatttaattgtcgttttgttgtgtgggcctaagattttaaaatgaggggcccattttcatgtcctttgagcgacccacacacgtgtctgacagctctctcgcacgctcacgccagccacttgtgctttctgttacaaatttattttatttaattattattttactaattcaatcaataaaaaaaatactaaaaaaatcaactctttgttcataaaatagaaaaaaaaaatcaacttaaaaaaacctaacccaatattttatgtatatctgtcctcgtaatccccgaatcccgacagttgttttccccacacgtgtccggatctgatcgcttacgtcacccctcctgctcattcttcccgccaaatcgtaaggctctcagaattttgatcaaatacctaaaaaaacggattgtgtcgcccaaaataaagaagaaaaagaaggcatagtattaataagtgtttgaaaattgataaagaaaattaatgatattttttaaaaattatttttaagttatataagattattcaattatactaagaaaaatattacaccaataatactttttagtatttattttttattcacttatacctagtcaatcaatataatcaattcacagtagtgttaaaatatctttaatagagataatatttatagctgtcaaaaataatacatttaaaatattacatttttattttttctcttattcatataaaatttactacattcttgacaacttaaaaaattgtccacaataatcaatcccactcccacatgcaacattataaaaacaaaaaattaagttggtgataaaatattttttttttctttaaaaagtaaataatatcacatgatcgtgacttattttagacaatattattgataaaatttatttaaaatattgaccatactgtacatgtggtaaaaatcactccataagcaatcttattgaagatgcttttagaaccatatatttggtttggcataattatatatagtttatagtggtaataataaatttactttacaacaattttattgtttggtttcgttctgaagacgacgttggcgttgcaatattttgtataatgtgtaatcacaataatatggttttgtttgatttcctaattacttttggattttaatgaaacgtggatttgggattgtcacgtagctttttgacattatattttttaatttattgatatttaatattagaaattttgaatatattggttgtcatatttttcttaatttattttagttagaataaatggggtgtctttacttaattttattgagaaatttttaaatgattgttattaattaataagtgtgattagtcacatattcatttagaatagaaatttaattttaatttcttcacatgtttgattttgatgcttcataatgcaacttatgagtgatcactaattaattgaaaaatcattaagtttttgaacaatatatattcatgtaatagattatatccgctctagttattgaacaaaaatatacccaaaaattatcatagttaatttgttgggcaatggtgctttgtttttgtgtttttaacaataattggtcatatttaatataaagaatcatattaaattgttgggcaaacttgtagtgttatgctataataacaatgttccttacaatatatgaatatgagcttaaatattacatagaatcacataatatatatattgtcaaattaattataataatttagattagaaatattattgtgtgtaatattattattatttagagagatggagggggccaatatataataggtatctagaaatgaattatggggtttacacgtgcgattgttgagttggcacatgtgtgtgcttacatagtgttttacaaccgtgttccagacttgagctgagctgcacccaaccacgtctgatgtcatcatccaaaacaaaacaaaacaaaaatcttatatatgaacccttaattcccattttgttcctatatatatata

SEQ ID NO: 43083 - DNA, 3865 bp, Cannabis sativa
aaacacacacaatctccttcttttttccctccctttacaaccatataaataaagctaccaatcccttcataaccaaaaaaactacacaccatttctcaagttttcaccttcaacttgttcttccaactctttttgcaaaaacaagtaagaaaatcatataagaatgatatactcttctagcccacctctacttgatcactatggagctcttttgagacactcaaaaacaacaacaaccaccttgcagaaaactcaagagtgcaataatggccactacttcaataatggagtggtcatggaagaatgccaacttccattgatagacctcaatggcttaaaaagtcatgacatgtgggagcaggcagaatgtgttagagcaatctcaaaagcttcatcagaatggggttttttccaagtagtgaaccatggaataagccctgagttagtgaagaggatgagggaacatcaaatgaaactttttgaagcaccctttgaacacaaagcttcttctaggcttttgaataattcatacaagtgggggacaccaactgctactcgtcctaaccagttttcttggtccgaagctttccacattcctctcactaaaatttcagatgaatcttgctatggagagtttagctccttaaggtaattgcaaaaaggaaaatagtaaaaactacacatacccttttgagcattatgcaatcacatttcatgatatagaattaggagaaagtacctacttgtaatgacacccttttggaatggatgactaactgcattgttttcatttttttttactcagggaagtgacagaagaatttgcatcagccatgtcaaatctagcaaggttgctggctgggattctggtggagaacttgggccaccacagacaagttttggaagacatttgtgaggaaagcacatgctttcttcgcttgaatcactacccggcttgcccagtttcttcagatatttttggtctggtgccacatactgacagtggctttctcacaattctttgtcaagatcaagttggtggacttcagctcatgaaagattccaaatgggtatctgtaaaaccaaaccaagaagctcttattgtcaatattggagatctctttcaggtaaaaactattctatctgactattattataatgcctcttctaagatttgctcattttgttgactcataaagtctaagttgactcaatctggatttcctaataatatggtccatgacatctttaatgtaattaatatcataccatgttaaaacacaattaaataatgagttgttaacaaaaataataggcatggagcaatgatgtgtacaaaagtgtggagcacagagtaatggctagcaagatggaaagattctcagtagcttacttcctctgcccttcatatgattctttgattgggagctgcagagagccttcaatctacagagacttcacttttcgtgagtacagaatgcaagtccaagaagatgttaagaagaccgggcgcaaagtaggcctttcgaggtttcttcttcatgatcaagatcaaagtatgcatactagagtaatgcagaagaggcagctttgatagtcttgacaagtctgttgcgcgcttctattgaaccgcagctgtcctgctgcatcgagttcttcagaacctctcaactcaggctgacctgcttcaagacttagccatggcttcagaaatattttcactggaaaagcaagataattataatactatagcatacattatgtatatttaaaaatcaaagtacgtatatactatatagcttatgaaagagttgttcctgattgtaagagttggatatataataaaataatttattatttcctcattttgcagatgtggatggttaaaactcatataatatggcaaatgtctctattgtattcaccatagaatacaatttaacatctggggtggcaaataccacatctattattaaaataaggtcataatataatttttggtaccataacaaatcagcagcctttcagtgttttacataagtgtctcagaatttagcattataatatatacagaaaaatcaactacatttctgagaattatggtgaccaagattagaagtagacagtacactcccatgggctgaaattcagaatatagtaaaatctaactatttgcacaaatttgagaaatattcaatcaaggaacattgcaaccttgttctttgacaaaaggactacttctctagctatatcgatcttcttactttgtataccaatctatttcatacacttgggaaaattccatatccttaattacaatcatttttcattctccgctataggtttctcaacaaaggacctaaaaacagatttagcatgtcatgagcaggatcccctgttcctccggctttaatgacactttcttctgttgcagatgaactatcgttcgctttgtaagaaccaccaatatcattggttgttgatgtttgaatgaaagagctagtattatcattagtggttgagctttgcttacaatcttctgagtttatactagaagatattgttgttaatggtctacttctcgaatcaaactttcccttcacttcttgctcttcctccttatccttattggctctaacatactgcacacaaatgatccagtcattagatttttatcaattatttttttcttaactacattctgggattgaagaacatcccaagagagatccaactactgactgtcattcattttacagttggtattcagtagtataatgttattcattttaacattgtttaattaagataaatataacaaaacatgtccaaatgaaacaaaaacaatgaaaatgagttatggaagagaaagtaacctctttagcaatggtcaaaagatcatcaactgtcagttcaaaatcatcaccctcattcataggctggatatcttctttctgaacatcttcaagcttctttgttttccgccttttctgagaagaaggtttggacaattttctcctagttctattagacttattatcttgctcatctacagatatttcagtatcagaataggcatctactttttctgcctctacttttctttccccggtcctacatttcacaagagcatctgaactatgcaagctcccttttcgcgaacattttgccaaagttcgagatgagagactttcctctggttgctttgtggttgattctgttgttttaccagacttctccactgcttgaacatcagaagaacttcccagcatccattgtggtaagcgccgcccacttccctccacaagagctcctccaaccattttcacagaaaactgtcataaaccaaatctgagtgaaaacaagaaaagagtttgtttaccataaaaagctagctatgaacaccctcattggaattaagcgttgtacataaatggacattactaccaaccattgaaaaaattacaataaccacatccttagtttcatttatagaatgaaatttcaccaactaccaaaatgatgatcagattataaaattgaaaacattgcagacaattcaaaactttaattcatgaaaaaagataaaaactttatatttttaaaattccaaatttgaacgccaagaaagaacaaattcaattgagtttggtaacagtaaaaattacttaggccatagaagagaagtgagcatgaatgaaccctaggtaattgtaattgaacaaataaaagaaagataccttgaattggagccggggaattcaacattggattggcgttgacgttgggattcttcttccttctcctaattcagccacaaccatttttatatttggaaacaaatcaaaatcaaaatcaaaatagt

SEQ ID NO: 43084 - DNA, 13300 bp, Cannabis sativa
agagagagagagagagatggtttctcttgattttttcctatttctttctatttttttaaaattcataaaaatgaatgataaaccaaagccattactcacatagtggccagctaccacactaaaaatcagccacctcacccaagacaaaaatgacaaaaatacccttctccaaaaagcttaactagtaaagtggtcatttttaaaacctcggatatttccgacattttcaatgtctaattaggttggcccgctactactaaaaatgttaaatgtgattctaatagccaaacactgcgttctaatgttacggggcacaaaacatgcaaaaatataaaattccatatatgatataaataatacatcctgaatttaaataaatttccataaaaggatgaatcaaaattaatcttctagtttcataattaaaccctaattatcatctaattcaaaattaaaattttattatataaaggaaagcaacagaggaagcctaatgtacatgttttctttcctctagaatttgttttgttttgctttttttgtttttaggaaaaaaagaaaaagaaaaaagcatgatcaatcctataacatggtttagttacagaagaatgtttgtctgtgttttattatcaaagtaattagtagcatgatctatctattttagaattttgtattttgtaattggtatcgtttagctgagtcttacatctattcttgtgttaaaatgcagaaacatactatgtggaatgaaattcgtacgtctcaaatgaaagatgtagcacatgtatcatcatcactgtaaccaaccaaccaacctttaattattatttactatttttaagttcatagtagcaagaaaaacaaaaagttggaaaatataatttacagtagtccggtgtaaagactgagctttttcttttacacgaaaagcccttcacccatgatattttcagcttttaatagcatatttctcactaaaagcatcgataccccccaaaggcattattcatattgagcaaaacataagtgaactaattgcaaattaaagtgagacataattacaacatacacaaatgatagacaagacgatcttgctcattgccttgaaattgaatttaaaacactaccattttaaattttaaggatatatatttaatcgaaagttcaatcacttgttatcacttatcacaaacaaccatcatctcctgaaatgctaccaaaaaaacgattaactctgcacagcttcagcaaacaccaacttaagcaactataaaacacaatcaccatggtaaatgaaaaattctcgtgtgtggagcaaaaatttgaggttactactagaaatgtgctacatcagaacattgcaagatcaagaaaagctgggagccaaaatttgaccgccactctgctttatgtatataaaaatatctattatacgaatatgagcctaagagaaaattaacaaaacacatacagatgctttttttttcttttgggtaaagatttgaacaatccaacctccattattggcagggttgaagacatgattttgggtccaattgtatattaagttgaagcattaaaaccagtatgggcaccaacattgagattcctaggatatagtgtgtgtgcgaacagttaaatatctacaaaagggaaactgatctgcagccacccataacaaatttacggaacaacaccttgacgacccgaacgaattcccttcaagatacaattgatacagcaaagaggtgggggtcggagactaggaacaacatcaaatcactcacttaccacccatccccaagaagcacacaagttagatgatgacctcaggagttagcaaatgctcatcctcaaatcactgaaaaataaacgattcaggcatatcaactaataataaaaacattaaaaggaaaaagtattggtttatgatgaaagactaaacgggccacaaatataagctgaaaaacctttggatgtacaagaaagatatgaatgtgcatgattcagcaatattaaaaattagcctgcagttgagttcaaaataaagtatattaaccagagaagaaagaacgaaaaaaatggtcttcatttgctattacacgtcaacaaaaatattaattgcttgaattgtctcggctcattaacttccttctagaattctctttaaccatttctcttatctgttctatattctttctatccataaatttctatgttgaatctagggccaaagatagagttgtatgtattcccctatacaaaatttacaatcacagataggcaggaagtcaattgttattcatctgaatgaaccaataactaaaaagacagttctgcggtgtgttgagccaaagataaatccaatcaaggagaacagtaaaaaatgctccgtatgatcttatataattcgactggaggcatttgcaagaggttgacagcagattcaatcaaatattaaatccacagtcttgcacactacagtaagaatttacatataagcaacttacaagtttcttttgtcaccagaatcactaacacacgaccctactgctgccatggcgattgcttgaagccatcccaccctccctcgggctctttcctcttcaaagtgccacctggcatctggaacatcctcatttgctcatccaatgggagttgtgaactggcaacagacagctgctttggcgcaagatgaaaagattcatctctaccctctatttctgggcctccaggcccagcattaagatctaaaccctgccttccccattttctactgctctcaccactactgttattgctaccatccgggagactaataacaaaaggccttgggtagttggaagaaaccccaccagcagaggttcccaacaactgtggatgcactgctgggaagcaaacccttccaccagaagatgagtccaagtatgttgtaggacctccagcaaaagtgcttgggggcatcgagaaactggttccatatgaaaaaactggatattgaaatgaggtagaaggaaaaggcattgctggtgaagctgacaagacagatcctcgataaacgtcaggagtaaatggattgccaccaccggggggacccatcatcctctgtggtccaccagctgcaacaattgggaaaggctgctcccctcgatcaggaataacagagggaatggtaacagctgagtaagtgttgttccctgtatgaaaccatgatgagaagttccctgcttccgtattgttcatcctaaaaccagaaacagatggttgagatagaacactactcctggcttgttgaataaaatgtgcaggttcagaactcatctcatccacagaaggcccatcattcaaatcaaaatccctccgaacacctacatccccagctaaagtaagtacccctagatgaagaattgactagcatacttacttggaatctcagttcgacgactattgttgattgtgaaactgcccatatctaaagtctcatcagcctggttcaaatcaagatcaagtcctcctgaactacgaaaaggtgctgcacttgtggattgatcacaagcccgaccacttttactcattgcattggaagtcgaacttgtctcatgtgaagaataccgagatgtcatatcctctaaaagtctttcatcaggtacatttaagtcaatatccagaggagggcgtccttgcttcccagaagtggattcagcatgtgagatgttcactgcaccaacaggcatatctacaacttttctcggttcagccggacgaaatgcacttgtagctgctgaacccttccaaccaagtacccctttgctccgtaataggtcctcaggtggaagaaaaggaccttttgctgcagccgtcacagttacggaagaaggaaggggactagacatagaagtaactggaaaaggcaatggactaatcagatgaccagtaggtgaacatccaggtgctgagatttttacatctccaattttcccatcgtcagcattaaatccttcattcaaatcaaattccaccttcgcatctgaacctgaaaccccaacagaagagatagaagaaacatcagccgcacattttgatgcacactccccagcttcattggtttccattcgagtcaacttagaatccctggacctcaaaagttgttctgcctcatgcgcatcacatgcagatggcaatatgttagaaacctgctcgccaccaccgcattgttctacctctttacttttgaggtcatgctccaaagagttgctactttgttgagttacactacttacgccacctacagcccgattctctgaggttgtaagagagttaccttctggctcatttctttgatttacagactcattaacatgaggcataattcccataatatcacgcttctcggactttatttcacatgctttttctgaaaccaaatcttttccatgatcagaaggcaatattacttcacaagccccatttacaaggtcggattgcatcactgaaacggcctgcttttcatctgtcttatcaatactgtctgtttcttcattcttaaggttcaccttgacatcagttgccaatgatgagtgtggagacaatcttcctagattttctgtctttaattcattcattgtgcctgcttctgtgatcttattttcatttaacaaaggatcacttacattgtgtttaacatctaaaatgccctcagtttttactcccccttcaactgacttcccaccagttggtttgcctccttccctgtctgcagctttatcacttaccctcgaaggagagatcacaggagaagctaaactaacatcgttacactttcctttgctatcttcaatgccttcagcttgcttaaaatccttactgggagatcctacacgtacagtgtgctcagacgtaggtgtatggtcagacagaaatgctgttttatcttctttacccttagccataagattatcagattcactagcatgcttcccattctcattattagaaccgccagtgaacaggcatttgttttgtccaagctcaccttctgctagtaattttacctttaaatcatcaccagtagaggagggttcaacggaattgtttctctgtggagaatcaaatggagaaaccaaatcagatttggacatctctctagcagccacactagcaagcaggttcataccaagatcatcagaaccagacatcgagccattaccttcagaaaacttcacacagctttcaactaaagcattcatagaagtacaggaaggttcttgaagatttgcagatttatgctcatttccagatgatgaggatgcagtttttgaaacttctgcaactttctttgtttcatcaacagtcctacaacgttcttcgtcagtcaaagcagcaggtgatccatccccttcatcagaggcagtaagcatgtctttaaagtcattactctgccaggactcagaatttacatctgaagcagcgttaactttacaagcatcgcttttctccttcaagccagaatctaattgatccgccttctctgaagtcacaggagaagaagctctactactcctgattgaacggtcttcaaaataacctccaccacttcgtgcaggactacgaccaggatttggaatcttgactatcaatttatgagtattcccgtcaacagtagtcctttccgacatcttatcaccagtcaatccagaatttgatgatttgtctattgggttcttatgcagtgaagaacttttgctagacccagtttccttttggttccctggtagagagccttgtaacccatttattggttttcgaggttgtgatgagccaccagacaccttattcgcattcattgaaccagcacttgagcttcttgcatcatccttgccagaaacaactccagctctggcatggtcattagagcacgattggctgttgttgtgagactgactagaactgctgctcttctcatctctagtggctgtcaaaggaacatcagacatgccaccgctggcatttcgaaaatgaccatcctttatgttgttaccagctgatccgggggacggaactgactttacagaccctggagaagcagaagcagacctagtagtactatcgccatggacaagcttaactgaaacagatttggaaggaaaaacctgtccaactgagctctttacagcaacatcagatggtccacttgaatttctgtttccaacttcaggtagacgagctgatcttccagcccaggagacagcatgatttgagccaggcttcacatcattgatattcatttcagcttcaacacgtttcttccatgtatcaaccagactcctagatttcttctggatttctgagtttttatgagatcgcaaatgattcacagactttccaatattacacgttttcaaggcatcaagattcacaggcagcttatcaagtgcacgaagtaaaacaagaagaaactcctcaattaatttatcaccatccttcgatccactactgtcaccaatctttcccttatgaatttcctggagccactcatcaaaaacaggcaaaccacgcagctccacaaatcggctaaggcaatcaaatttatctgtggctgctataactccagcaagcattgaccgaccagccaaatctattttcttttcatttctatcaggtagcatgagctgcaccaatttctcaactccttcagagtcaacaagtccccccttttcagttatcttggatatctcaaattttaaaaaactctcctgcctacagtgaccagaatccccatcctctgttttcgtaaagcgctctcgtttcaaagaatcagagccctgctctattctctctctcttcttccccctgacttgagatgaaaaggaagacaaactgttctggttactctcagagccagcttttaactgtgaagttgaagttggaccatttgatggctttggagatcggccacctgcatgcatttctactcttgttttatttaacaattgctctacttcttcctgtcgttcctgcaagagaaagagaattagatacaaccaattgcttcaaatatatgagcaaaaggcaagataacagagactatcaaagcttacattaatataatcttgatccgtcagccaccataaacacttgtttgtgatgtcataaagctgtctgcacacaaaagacgaaataccagatggaagttcaacacctttaggaaggaatgcaactttacatggatgcagtaacgaagctgcaggaatcacatccttatgaaacgaatagaaaagttcattcggcgcagcatccaacaagatgcctttaccaagctttacttcagctggacgataaagccaatttacacctaatttcaacttattatctttgcctgttgttacccaacgaattattccaatgaaaggaggtgaatcttgaggaggcttaaacagagcacagtcaccaacggtgatcttgcgtccgtcctgtgaagaaaaaccagaaataaacagatataagggaaaaagaaaaagaagagaaaaatgtacagattatttatctgaaactttaaaataatataaaataaacagataatttatcttaattaattgaaggccaagcaaaacatcaagaaaatacatttagtgaaagaaaaagtgcttattgcccatttagaataaaattccgatatacaatccgtaagaaaaaaaagaaagaaaaagacaaaacaagggaacgcctaaagcatttagagttatattctcaatttttctgctcgtcatcacgccaacaattcgctcatggttcagaaattgatacaattccctaatttccatcacattaaaattagaaaaaaggtgttatttttcttgattttagccaaaacacattctaaatcgcacaatccatataattgccatccgtaaaacaatgagaacaccagaaataagatcaaaacaaacgaaaagcatgtagaaagcaaaatcaccgaaacccagaaaataaatggagaggcaaaataaaaatcaaaccttgtaaaacgaattgggtgaagatgaacacgatgaagaagaaccatcgactgcaactacacgcctagggactgtccacatgtgccgactccgtttcccctcttcaccttccctcccatgcatagccttgcattttccccaatttcagcctcgatcccaactttaatcctaacgagtaccatcaatcctctatcccccttcaattacacatccacccccaattcaccaattcgcactctgcaaaaccctagatcgaccatacgaacaacaacgtcaaataatcagtcaaaaaacaagcaaaaacgaaaggaaaaaaaaaaaacctaatccccaaaacaaattcgaatcaaaagaaaagtgagaaaaccctaatttcacaacgaattcctaccattaaaagggttttcttctctcggcggaataatcaatcaaatctaatctacgcacggatccaacagagcaacaccaatcgggaggttcagatttcgagccgcctttcgatccaagagcgttttagagtgagaaaacgagagaatttagagagagaaagataaaaattaaaaatataaaaaaagaaaaaataaccccaaaaattataataaataaatgaaaataggtctttggtacttggtaaacggcaaagagagagctaaacggcaaaaaggaaaggtgtacttggtacttggaagagagcagtgggacgggcaggcataagggcagatcgggtagcccgaaaagaggagaatgataggaccacctagtggtgacacactaaaactattaaaaataaaaagatgtgtgtacttgagaaaaaactctttatagaatagaatagagatgaaggttagatatgttgacccgtcggaggatggggatttgactttttctgtctctgagatttcagcgaatgaattgtgattttttataattttatttttttaataatatttccaaaatgggtgtggaggaaattgtgggttacctgcgggtgatggaagtgagtgggccagagtttgtcataaaagggcaaacaagtaattataaaggaagtaaaacattgaagaggtgagaagtgagggggggcatattatgatagagaagttaaggttgtcttgtgttgttccaacacacattactaaaaagtaagagaaaaagagggttgaagttgatgatgatgtaaattggttctgtttctctggcaggaataagccctttgaattattaatattatttttgtttttattttagaaaaaaatttatgtggtctttctttggaagataggattgtatccttcttcattgttgtcagaacattcaattttttttagtaaggttcacattaattttgattggttaagctttcaaccaagtaaacaaccccttatttttctcatgggtcatttttttttatatatgtatatcttgtatttgttatagaataggtatcttacttcttatcccaaaaaaattaaataactggttgtaacaagtaaaacatatttgctaaacaatttgaaggtgttaattaaaaaaaattgttttatttgtcaaaatcacaactacagcatcttaaggtgtctctttcaatttaactttttgaaaagcttatccaacctgaccaattaatcaaaattattgaaagctaggaacaattcttccctctttccccacgctttaatgtcaaataattcatattaggattttatttttttgctttcgttttaatggtttctgccaaaatttgtcaattttcccatcataattttttttttctttttcctgaaaaactgtcataagtacaggttcattatgttctttcccaaacaattactcaaaaggatggggggaccaaatccagcctagccattggcaccagaaaggaatgacaaaacagtagatagaaaacaatgcaaaaccatcatattcccatgtataattggtacttaagggcacaaaaacagtaataaacagagtaaagaggccactgagcaataagccagagacttaaagtttaaggtgtccaaaacaataaaggaatctgagactcattgtttatcttaatttgtcttagttataaatagactattcaagggaaggtggtctagttggttggggaacctaaagtattaaatgcaaatcaagcaatgagattggtttgaagaaaatactgcactgttgttttttgcataaataaataaataaaatggtttaaataagatggttcaggaggatgcaattttactgcaaaaagaaaagtttaacttatatatatatatacgtttggtttggtcagatctaaccgtaagagtagtgaatttcaagtagtttatagaagagtcttgggatgaaagaaaataacagctgttgaaagttgatgaaatatttcaagtaaatcaagtacaaacagaagagtgtggtgggatttattagcatagatttgaccacacaagaagagttctatattgatgtgtcaagcaaaagtaaatctcaaactgataataggtgtcttattatagatgaaaaagaggtacaataaaatatatttatatatatataattattatttatataatagagaatatccttcctccaagacaaacccccaatttataaacctaacatcaaaacacaaacttctcaatcatacaagagtaatctcttagagaaagataactattggtatttaaaagcaggacgctagttgttgaaagtttactaatctaaattccaaaaataaggcagcattacagagtacagacctaaacattagtgactatagttgtagaaaagagaaccagatgccatcacaaagcatttaccatcctcttcatctcagcagacctcctgggatcaggttcttcaattgctctctctgtcagtacttgcttaatacgacacatcgactttctcacctgagacattttatattaacatcatgaagatagtgtcaaaactgaattggatggaaaagcttttccaagattaaaaggtatttaagttcaaatatggtatggaggcattatcttaactatcgtggtcttatgccttacaattcaaatatctagtagtcacaacagtcaacatgatgagcaagttgcatcatcagaacaattaacagtaattaaaacttagatccagttaataaatttaataccaatcaagtttatgcatatacccatttgtaaaatgagatgtttgctaacaaaattactttgtaattttcagaatgcagccacagtctaagttggaatcagaataatgaaaagcccttggcacaggtgcatcttctaaaaaggaaattgacaaacgatatttgtgcacatctttaaagcctttcttggtccaattatttcaaaagtgataacaatttgcaccttatatacacataataaccgaagatcattagcaaaatatgctagagacatagcattggcaatattggttgggttcaaactagagaatgcaaaccccatgtactgcaccagattaaaaaccgagagctaccagcaatatatgagaagaacaccccatgacttttttagctgtggggtcactttctaacttctattgtacttttaactttattcagtttggtcaactttggtacattttacttaaacattcatgtgcaagtactctctaatactattcgattgagagacccacaatttacgacagatttgttggataaaattttattagttacaaaatcactttctaacttctgatacatttttaatcgtaaaattcattttgatcaacattggttcattctgctcaattgtcatctacacctcaattcttattcatttttaggacacatttccatacattaaaattaattactatcattaagttttttgtttatatataaatatatatatatataataaaaaaaaattcaaacatctataagtagaacataaaaagaggtgcattatatagaaactgaaccttgggaacacgttctggattaggaaagcggagattttgtgcattaagcatctgccgttgtgtcatcagcatgtttttctccttcaacagtacgtaccatagcttttgaaggtcatcccaagacttcaagcgcagttcagatgctttccaactacgacctgacaccagtaaattaaagaagtttaagaaagtcagaatctatcttcgagaaaaaaatcaggtaacaaaatcaaattttttaagtatggtttgtagactcgtgataaaattggtccttctgtaagtaagtcaaacatataaaatattataccaaaagagaaatcattatcttgacatattatgttataaactataaattattaaataatctctcttttactttcatatttttcataaattagagccgaagttaatgaaatgctaaattaatcacttggagacatatgtagtgtacttattgacccttgtatgaatcaaacttgtatcgtgcaatgttgaattagtacttcaggaatttgcacgtagttattcaaaactattccaaactttactcaatgactacagagctttgaatcccctgtacttgacatacttttccggttttaacttagatatagactttaatgtattaacaagttactgaactttctaaaccaaaaaaactttacattttctttatttggttcactgcatccgaccatctagtctaatataacatttgttccacattgcaacaaatttgctagcagtagtaacaatatgtctcaattagtttgttcaaacaaaaaacaaacgcccttaaaacgaaaaactacggttaagatacagaagcatgtaccatagacaacaggcttctcatcttctgtgcttcgatctacctcaaagaactcagcgagggggttgtattctgtccttgctgaagaagcagcagctgctgctgcagccggagtctctgatttagcggcggcaaggagtgttctcccaaagtatcttgttagaaacatgactccaatcagttgctgcataacagtgcaagctatattagttagaaaacaaaaagacaagttatcgagaaaaaaaatagacaaaggagctagctttttactgataagaaaaatggcctttttagaaacaggtgaaatggaatcaagaattcaaaaatagcatgtcaaaacaagttcctaacaatgcaattagttgcacaatctatacaaagtttctgggtgtttttttaaaagaaaaatctatgtaatgtcttgacaacttgataattagttaattacaacacttaaccagtataaattatgagaaatatactagcaacactcttc

SEQ ID NO: 43085 - DNA, 4163 bp, Cannabis sativa
agagagagagagagagagactatttttatgaatttcataaaaataaccataacagttaatgaattcttatttaattgatattgaatagagatattgtgtcattagatcatgggaaatttcacttacacttgagagaggtagttgaattatattagggttgttggaaatcacaaatcatgagaaagactgggataattgagaaatctagattcacaatcgaaaataggaaagtaaatgctcttggttttaatctttgaaatttaatttgtgtacttcgttgaaattttactcttttacaattcatttattaagcaattttaatcctagttttctatttaaaattagggacttataaaaataatacttagtgaactaaaattaaatctctgtgggttgtacactacgctaaattaaacagtgtacgcttgtggtataaaaaatcactatcagctacacattctacaaatttatgaaaaatggaataaagaaaaaaccaaagaatcttacaacagaaagaatatcttttgccagccctttttcatatgaaggaggcccaacttttgcatctaggatcacctgccggactgaacttgataccaactaaaaaaaaaatacaaccatcgtcaaagtgaagtataagaatgatgaatgcaaatgtctgtggagagagagagtaccctcaaagcatcctcaatggtaggaacaattcctgaagtagacatctggccaggatgatgaacagagcctagttcttttatctataacaaaaacaagcagatttacattattaaaaaggatggcagtcacaatgatgcagtaaaaaaagaagccttatatacgttttacctctttcattcttaagtttccaaccttaagagtattgtttccggatatcttctgcgaatctctgcctatccaattcaaagatcaaatttaaaactacaaccacgtataagagtaagtatattacaaatatcccatatcggttatgatgagagtccaatgtgagggcatatgtgaacaacagaataaatcttgttgaggataaaaacctaattttgttgtgaattagttaataacgttacaatcattctgctaagttagtcaataactcagctaatggcagcaaacttgttaactctacctgtttatttcttgtaattagtttgtatattaaagtaagaaacctatttgaatccccttaaacaagcaaaattgtgcattgtgttcgtgcataaatgatgtgtgagttttgacctcttgactgtttgtgcctagtgaacttaaaacaaaataaataaacaaaatcaaacctgtcatggagagcgaacaaaactccatctaaagaacgtgaaacatcaatctcgatgcagtctacttgagaagccagagcagagtgatatgcagctatctaagaatggagtaagtcatgggattagtgaaatattccaacatacaaatgacatttggtatgtgatattgatgcaataataacgtacagtgttgggaaaggcctttgttgagtcaccaccatgggcacacactaacggaggattattaagccaactgcattttcttaattggagctgatgaaggctgcgaagcctgaaatggaagaagatgggagggaagatagcaatgaaggcaagggtaatgataatagagcggaagagtctcttggaagaaaaccgaaatccatcaccaagcccaacagtcctacgagtctgggtcacccatctccttcccaatctgtttgttgagattgccatatctaccactgatcaaactctcactacccagtaccactcttgacactcccttctttgcccttgaaatttacacaccgttttaagtttatgtattgtgacaaaaattacactaataatggttgaatttgaggcgaagtaaacacataataattggttgttttgtgcaagtatacattaattgataaattcttgcttatttttgacagacttaagattaggatcaaggtccttcatctctgtgcttcagtctgatccaacattaattatacattaattgataaattcttgcttatttccaatagttttcacactaaaattttaattttatgtttctagatttcaataattggacactaactaagctaattgaggcaatttttcatgcagtaattttataagcataatataggcacataaatacttaattcattgtattcatataatacgtcaaacatcagctatttaacatatgtagcaattcaagtcgaatctgagtccaacacactaataacttcaatgtttttcttgacatgtttgttacgtgagtttgagtttgagttggagggagtaaattttgagagaatatgaaacccaagtattggaggggattaatattaccaccatttaaatttaaaaagtggggccacttagaaacacaaaccttattaatgaaaatttaatttaccaaacatgcgttaagttgatcccgtatcatcttgtgtacatcaagaaattaactcatcatattttgcaattttgctccctctaattatttttttaaaaaattataaataaaactaaaaaaatccagattttataggtcatgcaagtctttaaaactttaaaattccaacataacaaaatgagtattcattgaaacagagacacgtttccaagaaccactcagggtctgcatcatcaattaaaaactgtaaacaacattgcttttgtaggcattggaagacttttatcaccagactgaccccaataaataagaccaacttataactgctgaaaaattagctaaaagaaaatagctgaagtaaaataactaatttcgtttttatcctagtctcatctaccattttgtcccaagggtggaatgctgtaatctcgtttcatgttcatagtggagaagagaatatcctaagggcagttcaaagagatttagggtcaagttttttgagctgaacctttataatttttttggggatctttattattttcttgatctttatttctgcaaagtataggtgaaacttgagtgagggaggtctactcctaacacatataaatttaatattattgatacgactacgttaagacacgcctaagcattatctatctacatacaaatctacagcttcattttttcatttctctaatatttctataatgttgaaatttctactttccaaaaaaaaaaaaaaggaaagaaagaaagaaaatacaaaagcaaatctcatcaaaaagacaaaagataggctaaaacaaacataatttaaaaatgaatatatgagcaaaaggagccacctaatctgatcagagtgatgagagagaaagtggaaggcagtggctgagtgcgacgtggactcgaagttgagggagaaaagaagaatggctccgttgattgggtccaacctgggctctcggcggatggtgatggttgtgccgtggcggagtcgttgcagatggagttctaacggggtttactatatgcgaacttgcgaagggaaattgagatggctcctaagattgggactttaggcgccttgcttcaattgagagtattttgttgtgaaataggttgctgatttgttaaagtctcaactaagagacagatattaacacacttttaggccacatggtaaatactgtggggcttggctttcgaaaaggaaatttacaaggtaattataaaaaaaacctataaaatataataaaatacatacaatatttattaatatatcttaattttaattgtattccataattattctttttttttttttttgagataaaatgctattatattatattaattgtaaagttaaaatacaatagacattaacggtagagacatttcctctagccatgaacaattagttttcactaaaagagcaaattgtgccaacaaatgggcagcaatgtaagcagatctaaacacatgtgagatctgtgctccagggaacttggatactaaaagtgaaatattattcaaaagacaatggaaatcggaaacatgttgttgtaatgaatgtaatcctttaactaccaaaagtgaatctgtctcaattaggtgaacagatagtttaagatcatgtaatcattgcaagttgtgcattaaagccaatgcttccatcatttctggtttaaagcagcctttgcagggaa

SEQ ID NO: 43086 - DNA, 4351 bp, Cannabis sativa
atttgcatgacttatgtgacaattggattattgcttaatgctgatttcatgttagtttaattgagagattaattagagaacatgtgatttagaacctagaagatcgaaaagtatttgaaaatttgatgactcgagtaactggtatttctgagcatttattcatgaatttttttatttggggtctgaagatgaaaattcgaagggagttactgctagctaaaccagttgatttagcggatgctatggcgaaagctcaattgttcgaagaccgtaatgatgatttgttgggacgttcaaagagaaagtattcgatcaggttggtctcagtgcaccataacttatcctcaaccttcagctcaagctacggtcaacacttctacttttggggcaacctcaacaaataccaacgatccaaaatccactaagtcaggtactaatacactgcctgttaagaaattaactcctgcagaaatcagggagaagcgtgagaagggcctttgttttacttgtgaggaaaagtacagtctcagacataaatgcaagaacagggtattaattctttgtggcaccgaggaggaggaagaagggcagcgaagcctagtaggagaattagacttgaacgaggtggatgagactttagtagatgaagtaagcctgaattccttgtcaaattcagcgaaccctcaaatatttcgaatatgggcaaatcatggtaaggaaaccttggaagttttgattgatactggcagtaataacaactttatacatgaatccttagccagcaagttaggccttgctgctgaagatacaaaatgtttcaaggtttacatgggaaatggtaactctctgttgtgttctaagatctgtcatggggtggaattactactccaaggtcatcagttctatgttgatctctatgtcttgccaatatggggattagatgtggtgttgggaatgcagtggctacaaaccttggggccatgtatccatgaccataaggcactcacgatggaatttacttggaatgggaagacagttaagttggcaggttccactgattcggcgccacatcatctgacattcactcaattccatgccatattgcgagatggagagataagggaagcatatcgcattacatcactcgccaagatggaagaccaatcttcaggatccatttcaacttggttagaaattctgcctggggagtgtagagaactaatccatgaattccaagatgtttttttcgaacccactactctgcctctgtacttggacatagaccaccgaatttttttagaatcgggatcgtctccagtcaatgtgaggccataccgctatccatattatcaaaaagatatcattgaaaaactgattcgggagatgtcatcttgggggtttattcaacatagcaatagcccctattcttcaccagtactgctagtgagaaagaaggacagtacctggcgcttctgtgttgactatagagctcttaacaacgttacggtcaaggatcgttttctcattcccacgattgatgagttgctagatgaattgggtggtgcaacagtgttctctaaacttgatcttcaagtaggttatcatcaaatacgaatggatcgacgtgacattcacaaaacagcgtttcaaacacatgaagggcactacgagtttctggtaatgccttttggcctcactaacgcaccttccacttttcaagctgccatgaataaactattcaaacctgttattagaagttgtgtaattgttttctttgatgatatactggtttatagcaaagatattcaggaacatatgcttcatttgaaaaaggtcttacatctacttcaagaaaacaagttctatgctaatggaaagaagtgtcaaattttccaaaccaccattgattacttaggccatgttgtatcagctaagggagttcaagctggcccaacaaagatatcagcaatggtttagtggccccaaccaaaaaatttgaagcagctgcgggtttttcttgggctaacggggtattattgacgtttcgtggctcattatgcaagcattgctgccccgttgacagaactactcaaaaaagataatttcgaatggtctgaacaaacagcagtgaccgttcaacagttaaaaaatgtgatgacaaccacaccggttctagctttgcccgatttctctaaggaattcattattgaaactgatgcttctcacacaggaattgggggtgtcctgatgcaggagggacatccaattgcttttttcagcaaaaacttaggacctcaatttcttggcacatctgcatataagcgagagctacaagctattgtcgcagcagtcacaaagtggggacaataccttcttggtcgtcattttgtgatccgtactgatcacaaaagcctaaaagaactccttacacgagtcatacaaactccagaccaacaatttttccttcgcaaactgatggggtttcaattctctatccaatacaagtcgggaaaggagaataaggcagcggatgccctgtctagacagcatgaacactcattatcatctcttagaactgccatcacttcgggatgttttgaattcttggaagaactgaagcaagaaaacattacctgcccagatttgagacttattcatgaacagttaatggccgattctattacgctaacaggttacgaggtaagagatgggttgctttacttccaacataagttggtgatcagcaaacactctcatcttaagagccatttgctgcgagaatttcatgattcgcctattggtggccatgttggtagccagcaaactttccttcgcctaagtgctaacttttttggcaatgaatgaaacaagatgtgttcaactatgtgcgacaatgtttagtttgccaaaccatcaaatactcccctacagctccttatggtttgatgcagccacttgaaatgccagagagggtttgggaggatcttgcaatggattttattgtgggcttaccaaattctaatggggtcaccaatattctagtggtcattgataggtttaccaagtatgctcatttcggtgctccttcagattactactcagccactaaggtagctgaacttttcactaacatggtgattcatttggatggggtaccccgaacaattgtttcagatcgtgatccaattttcaccagtgctttctagaaaaagttgtttgaatttatgggtgcaacattgaagatgagttccgcctatcacccccaaaccgatggacagacggaggttaccaatagatatgtggagcaatatcttcgagcttttaccgctgagaaccccaaaaaatggagcaagtttctttcacgggctgaatttcattacaatacaagctttcattcagccattggcatgactcctttcgaagcggtgtatggaagatcaccaccaacaattccagactatactcgaggctccacttccatacaagcagttgaagatgatttgctctcaagagatgacattctgcggagactcaaggttaacttgcaacaagctcagaataggatggttcaacaagctaataaaaaatgcagagacatcgaatttcaagttggtgacttggtgttggtcaaactccagccttactgccaatcaactgtggctaaacgactcaatacaaagctatgtcggcgttacttcggaccattcccaatagttgcccgttgaggtccgttagcgtacacgttaggactgccacaagagagtaagattcatcctactttccatgtatccttgctgaaaccctttcatggtaccacagctccagtttctttcccgttgcctgaaactagccttgctaacaagccaatgatgatccccatagctattctggctgcttgcaccaagatcatcaacaacaaacccattcgacatgttcttgttcaatggtcgttgtcttctccggaagactccacttgggaagactttgaatcatttgttcagctctatgatttacacaaccttgaggacaaggttgattttgaggaagggagtagtgatagcaaggcccaaaacaaaagcccaatgctaattaacccaaatgccttgcaccaaaaagtaaaggagtggatggaccaagcctcttcttcagcccatgacactaacaatgaacaagcttcttcaaccaaaggtattaagttttactctattttactctatttccctagttttactctactgtatttactggtttagtataggtcttgtttagttggttgtatttcattacacttaattagttagtttggttgttacccttagtcggttagtttgtttgctgtaataacggtttg

SEQ ID NO: 43087 - DNA, 3789 bp, Cannabis sativa
ccgccacaaaacatttgcattaatacaagaatcactatcaaatttcaagtacaagacaattatacaatttatacgtacgaacttataactaataatcataatcatcatgatcatactatcttcttcagcaaacttataatttcatcacaattgtttgaaatcagatcagatccatgatcgtacaacgcatacgtaccgaatatctgaagattttggtgtgtcatcaaaattaacaagagccaaaggagtatatatagtaccacttccatcatcaccctctcttgaaaaaaaaaagccacgtggcgatcatcatgattttcttacacaccagataaaaatctcctaaccgacacaaaccagacaatatattctgctaacacatataaatgattgtgtatttgtgtgatgctaataaaatttaggtctcacacatatatgatacgtcactttcctcataaaccagtgcctcttcaaccaacttggcttaatagagtaatattccatatatatggctaaaaaatttaaacagtttaaagtgtaaaaataggtttataaagtttttttagacaatccagatgatctacgactcaaaagtaatagaggggtgctactgtaaacttcctgttacaacctcttagtaaaccttcacgttcgaaaacatatgtcgagatttttttttttcaaattttttttatggggtgttcattatgcttacaacatcatgtctgtaaatttttgaaattttttgaatagtttatagtgccaaaagtacgtttgaagttttttgaacacgcgtggtaaactggaatatcaggaactctgttttcggaactgtaaactattcagaatttttcaaaaattgacagggatgatactgtaaatataacgaataccgctatgaaaaaaattaaaaaaaatatttcggcatgtgatttcggacgtagagatttactaagacattgtaatagaaggttgtaattagcatttctcaaaataatatatgcacaagaaaagtaaaaactaaaaaaaaatagtgaccgaataatatgtatgaataatggtatattgtatacgtatgaataccctcatgatgatattggcacagtagttttcatctctttcaccaacaccggaaggccaccgctgaaggtggcagtaaggccgggagaaaaccgtggcatccggtattgtggcggcgctagctcgatttcgaagcggcggagaagagagagtgccacgcttttaagctccaccatggccatatctttccccaaacacaccctgtgtccagcttgaaacactgggtacttataagggttttgagaacagaaaacgccatcgtttaaccacctctctggtttgaactccaaacaatcagttccccaaatttcttcatttcttcccatggcgtaagggtggtacgtaaccctagtccctctcttcacaaaagtcccatcaggtaaaacatcatcgtccacacaaaactttgagtcaaactgtatcggaggataaagcctcatgctctcgtatatcgccgcctctagataatgaagctcttgcatttgttcaaatctcttaacgggttgacccgatccgattatccgatccgcttcgacttggatttttagacgggcgtccgggtttttggccatgagccagaagaagcttgttaaagccgatgcaacagtgtctctcccagctaagagaaaactcactatgatatctctaagaaacgtttcgtcttcgttttttacagtacgcatgaaacgtgacaagagatctttgtgttgatgattcatcgataaccccaattctctcttctccttaataacttctctagctagtgaatcaatcaccttaacagcttccttcagtctcttttcagaacccaaattgaaaagtctctttactttccaaaccaaaggcgaagacctcatggctcgctcggctgacaatctcgaagccaagtcaaatgagaaggcgaattctgacatgggaacagaagaaatcgcttccagacgaatcggatcgagcccgaacgagaatcgacatatggtgtcaaaggagaatcggcgaaacacttcttgtaagtccaaaaattccgaggtctgtacggacgaaacaagaatcgggacgagacgagtttgaatctcgctattgataatctcaaaagcgaaagatttaatggaatatctatggagttggagacttgacatctttctttggaacctccaaagctctccgtcgacgttgaatatgccttgacctagaaaatctcctaatattgcagagaagggcttcccttttgggaaattttcaaaacgggtcttcaacatgtactccacgttttccgggttagccgttatggtgttgcccaatacgtgtatgtggattgttttggtttgagattttgtgaggagatgtgtgtaccaatcgcagagattgacgaattggtttgaccaactcgacgttaaataactctggcatattttgcaattacaccatagttttggcctcactattaattggaatattgttattatggtcgtgactagtaataataacgaaacaagaagagataaagttgtactgaaaaatagagagaataatgatgaaaagaatgggaagaagagaatttcaaattccgccatagatgatagtactataaacatggatattgagaaaaagtagtgagaaggagaaagagaagatcatgataataaataataaaaaaaggagggtgagtgagtgagtgtgatgagagggacaagagggcatattgaattaaaaaataaataaataaataaataattattactttcttttttgttattttcttgaaattattaacagtactgtactgtttgagtcagtgtgagattttttttttcagctttatcacctggctataatgaaaagatatataaaaaattatcaataaaaatgtttgaattgaaataaaataaagaccatgtagaacccgtgtggaaaaaggcagaaaaaaatacttatacttataatacttgtactactaataataaattataaataattaattacatagcatatatactagaggcatcttttgttcctgctcataactaagttagagtcaagttagataatttaatggattgtatttattcacccacgtgcttttattcgcttgtccgtactgcatgttttattatttacaaatttaacttaaagcctaaatattgggccaataattacatgttaatattattgtattttgccccacttataaaaaataaaagatggaataaacaaaaacatattgccaatttcaaccaaaaaatattgggacaacaagtaccttcttataattatatttaacaaaacgtttcaaaaaaaaaaaaaaaaacaaaaatacaaaaacagaaaaaaaaaaaaaaaaacaaaacaagtatatataaaattataaaaattagggcacgtctttttgtatggccccgtttatatatgtaaatggtaatatattatcaaatttacattgtgcttgctgaaagtgaatatattaattttacatttttttatggcccgggttgatatatgtaatgatatagggtttggaataaaagccatatccacagtagtacccatatttttgaataaatggggtaacatgtttttgataacatttttttgaagggaactagtgcccatatttaaagaaagtaaaaaaaaaacatgtttttatttgttgagcattttacttttagttcttgttgattagggttacaagttttatctttcgagaagctatgt

SEQ ID NO: 43088 - DNA, 2736 bp, Cannabis sativa
gaattctaatcgacaaaacacattctgatttcaaatgcacataattgagtaattgaccaactagtttcaaaaacatagttactctccaccatggaggaaaaccccattttcttagttataaagtacagagataggttggtcatgatgtagtctcttaccatttaagggagctggcagagcatcggtgaaatcaaatcggctgaattctcctggcttgctgggcattgcaaagatcattgaatgttctttccattgcaaccgatcatcaatacctagctctccgaacaagttctgtacgttgggataagctccaacttgcgacgcatacaaagaaaataagcactcgaaaattcaaagggggtaaaactgaatttggtaaaatgaaatggttccgagattcaacttacagaatatatgtagaccggtctcataccagtcaccgtcatcatctttccatgctgccacctaaagggcaaagacttctaatcagcaaaaacactctcatagtttaactatttcgaaactacccaacaaaaaggattgaaatgtaaactataagataagcaaaaatgagtttgtccttgaattgaaagtgaaaatgaaaatgaattgtaatgaaagaataagtttgatgttaacatggggggtaaactagatcagtgtaaaaacctttccacctaaaacatctcttgcttcgagtaatatcggtttatgacctgcatctgccaagtatttcgcagtagataaaccagccaaacctacaagaatttgaaaaaacaattagcgaaggactcaccatacatatacaaaatcataaaagctttacaaaatgataatacaactcgaaaacgattcacacttttcacactgaggtgactctaacagacaagattagttacaaaattgagtaaaattaagataaaagcaaaataaacattttcacaccaaatcttttttaatcatttgcatacaaataaaatgaagaaaaaaaaacataagctaattgaactttcttattataagtaatgttttttattacaagcaggtaaacttgatgatgttgatgagtcaaacacgataatacaactcgaaaacgattcgcaagcttcacaacaaagtgactcgaatagacaagattagttacaaaattcagtataattaagataaaaaaaacagaatacatattttcatatcaaatctttcttaattataaaaaataggctaattgaactttcttattataagtaaagatttttcttaaacttgattattctcccctattctcaagcaaacaatactcaaaagtaagaaacacaaaaaatcattaagtaaataaaaatgcaatctttcttcacctgcaccagcaattacaactttcaaaggcttagctggacgaggagagccacgaaaagaagcagacaaagccgcagcttccaaaaagttaacagtactatcaagctctggtcttggataatccacacaaaccacctatttcaaaactcaattcagttaataaatttctcatttttctttcatcccaacaagaaaaacattcaaattcaacacaaaaatacctttaaaggcaaaacacccttcttcttcttcagtcttgtaccaggaggcataaattgattagacccaaaagccaaagacgccatttttttggaactcaatgaaaaacaacatctgggtactgttcctacgtttggaaattcaaagatacgactctggtgggagctgaagttagtagctgaaacagaaccccactgagacatttcgtcgtacacaatccactcaccaagttaattgaactgtaatttccggtggtggaagaaagaagatgatggaaagagagagagagagagagagagagagtggagaagaaagtggtggctgaggtgggaacacataggtagtgacgaggtaaatgggtttcggttgggtttggttctgttgtcgttttgaggttttttgttgccgttttgaggttttttttgttgtcgtttttgggtttggataacggtgaccgttagttgggtgtcgttttgaggttttttgttgtcgtttttagggttcggatttgttgtcatttgaggtatttgttgtcgttttttagttgggataacggtgacagttagttgtcgttttgaggtatttcttgtcgttttttgggtttggatttgttgtcgtttgaaatttatgttgtcattttggggtttggatacagctggttggttgtcgttttgatgaatttgttgtcgtttttggtgtttggatttgttgtcgtttggaatttatgttgtcgtttttgggtttggaaactgtgacagttggttggttgtcgttttggggtttggataacggtgaagtttaggatattctgttatggaggatgagtttgagtccgacaaaatgggttttaaagagccggacatattttccactaattacacaattagtcctcctttttattttatatttgcacaaaaggtattgtatttctatataattacacttattttattttatttattttcatcaaagacaataaataataataataaatatttttagaaatttatgtaacggttgttttgttggattttttatctgtttcggtatctacatgactacgtacagtgacggacctaggatttttactttgtgggggcttatttatcataaaaaaatatttatagctacattataatcactcttactaaatttatctaattt

SEQ ID NO: 43089 - DNA, 1881 bp, Cannabis sativa
ttttttttttttttaacaatataataactcagaagttgatcacttcccaaaccaaaaaattcatatatctatgtactaaagcaagccaactcaattagactacacattaattaattatacatttattatcactaattccaatttgcaattaattaaacaaattcgattcaaaaagtaatagagaaacattataattatataactatatttgttcaaaccaacaatttcatcccaaatgcatgcattttctgccttatattccatctttatctcgataaatgagagataaaaaataaaaaataatacataactaaaatagaggatagtactcaaaatattaatatattttatatatatatatatatttaaaatgtagggtgagatgtgttcataataataataactaaaattgggagcacatgaaaataaataaataaataaataaaaaagggcaataagtgttgaccatattaatttgttgttgatgatgaactcaattcttatttggtccaaacaccaaacaataataagattattcatgtgatgtcacatgtgttctcccatgtttcacatctctatctttccccacttgcccatattgcaatttgactcttatttctttattccttaaaaacccatttcagttattacagttatggggttagttgcatttattatattatagaaaaagaaagaagaaagaagaaatcatgtatgattattattaattagttagtagtaatagtagtagtagtaggagtatattgattcactataaataaatattgagagaaaaaaaaatattaatttggttgatgtgattagggcaaatatgttattgattattctgttttgttaaatgaaaattttgtattttttgtaaaataaatcaacaaattgatactctataatttttcaacaaagtagtattaatactctaagcttaatttttcaatggtggtttcagatctaggtcaaacaatgattctaaagttaatcgtactgaaatttctgtttgatcgaaattgaatgcaatacattttgcaaaatatgagatttgaatttgtcattttatcaaagggttaatattattttgaactttgtattttaaaagttattgattggaccatttattttgttaaatgataaaaaagaccccgtattttctaaaatagtacaaataaaattggatattaagctcaatttttaacctttttttttttatatatatataaccatcttgataattaatttttaccacgaacatattttgaaaacataactaattttctcataatacctctatattgaattattattaagtttcatttttgcaaaaaatcaattaagagtactgtatagtattatattttgaaaaatacaagacccaatttattatttttacaaaccgatagtccgatcagtagcttttacaaaacacagaatacaaaaatagtatttattaattctttaatatatgtataaatatataattaataaattgagttagggagctcaaacacgatctgttatatgtttatgaccaggtgttcatgaacatatcataaggttgaattttgatttggtttgaccttggaatgcaattgcatatggttttgaaccctttttttaatagttagttttatctaattaatattccctcctttcatatcccatgttatgttatgcattttttcttttggttttaatttcatttatttattgcttattaattgactactttcttagctttcaaaaaaaaggttcaaattaatgcaaatatttatatatggatcttcatctacataatttgtttactttgttaaatttcaaagtttctaaaaagtgaaatttatatatgtgagtaataatatatatata

SEQ ID NO: 43090 - DNA, 1517 bp, Cannabis sativa
gcgtgagatatagctcgagtctttattgatcaatggacaagaacaataaccataatttagagtatagagaatcaaagttcatttttgtcacatctcaaatgagagctcttaatcaaacatacaagaaactctattacaaccttgattaagtaactttcactaattcaatctctggtgttatttatatagcattaaataattataaaaattttttaaagtttatgcatgtgattttttttttttttttatgaataaggttcttgtattactcaaatcaacaattacattttataattttgtatacattttccatctgactactctatctaactatacaaacaacaaattttagttacaaacaattcctagatactcaataatcattcttgtcttcctctttggttttactagggagaacttctaatattcttagcttgctttcatactgaattctttgcactattaccctaatttgccataggatctgattccataatacattatttttagccctccacacatggcaaactaaaccagccataaatgccttcagcagactctttcagctaatgaaaatatcttggcccaattgatactttacagccacaatttgatatccttcaagcacctcctgctatattcacattcaaaaaatagatgttcaattgtttccttgtctttcccacacagtaaacatgtgttatctatgttggcgtcaaattttacaactctttctctagtgtttaatcttccccaaagggctagccacaaaataaatttgtgtttgggaatgattagtctatcccaaacaactctactccaagggattttcacactgttgttgaatagtagtttatagccttgctgaattttgtatttctgtaatataaaaccagcaagatcagtcttctccttcagcatattcttgacgctaacaagttcccttcaataccaactgcaatcaacaggagcctcatactcccaccactgctgattttttaagtatacattatggatctatttcacaaacaagcaatctttcttacttgctatatcacacacatacctacccaatgttgcaacattctaattctgaatgttcctaaagcctctagcagccttgggaagacatactctatcccatgccaccaatcctgggccagcacctttcttgtattcatttccatagaaatgatctacatattgaatctatgtcttttagaagtctctttggcaatatcaaaatttgagactagtatgtgtggatagagatgagcactgaatttatcaatgtcactctccccatgtaagaaagatttcttgtgctccatattctgatcttgctaaccatctttttaagcaaacattggcattctaccttggagattctttttgaacatatgggtattcctagatacctgaagggtagagagctccttgtaaatttagaagcttctaatattctggtaacttctatttctggcatgcctgagcaataaattgttgtctttgttcat

SEQ ID NO: 43091 - DNA, 7553 bp, Cannabis sativa
  modified_base (32)..(45): a, c, t, g, unknown or other
tatcggaccaaaatttaatagtttaatatttnnnnnnnnnnnnnntatagttaaatttgtttagtacccattaataaagtagattctgatgtgaaaaaaataaactatgtaaatactttaatattcagatttagatataatatttattattcagatattcattttcatcttaaaaaaaaacaaatacacccataattaaaattaagttgttaaaaatgaaaatatttgaataataacatttggcaccatttaaatagagttgcttatcacttctcagacaccatgtaaatgtaacacgatggcctttctatcaccctaccattgaattggacttcatgaaactgtcactcaaaattcaaaggcaaaacttttatttgtcaaactcaataccaatacatgatgttaaataataaatagcaaactgcattgttaatgaccttcagatacatgtatattcctatactctttttccctttgaagttatcccagtgagaaattggtaacagattacatacgtgccaattacagctttttagtattatgtttgtgtcatttatctattattctgcttgagaaagaatttctgatttctatccttgtcatatgaacaaccataacccacaataaccagctatgctacaagatcttcgcctacaattggttgaatcaactccacagtcttcatcacttaaacatctgtggtcgttacgagcatctgcaacatgacaagcactctcgatgtgttggctaccatactctccggtgttaagcgtgttagcagggcatacttgcatagacattgcacttgccagcctcacatgcttttgtttctgcaaaatcaattcagacatcaggtgcagtcgagaataaattttccggggaaaattccaagtgaaatcatctcatgcagggaagagaattttgcaggataagatgattttggtagaaaaacagaaaaaagaaaaaacaccttgacaaaagtccagttggtagagatgtaagcctccggaagtctctcgtgccaagcacttaaaacaggtaaggggtgaccctcagtcgtgaaaatatagttctgattaaccagaaatgaatcatcgaacagaagatataaatacttgcacctacagaaaacagatgtgttaatcccaaaggcatgcgaatatcgtaaacttttgtaccatgtttactttcttgtactggaagggtgaatacaatgcttacgtttcagcgaggaagaaactgtgttgatgatcctccaactgcatagttgtcacatctctaatactagcaaaccctccttcaactttggtgtataaattaagagaatttactattgattctcccacctctatgtaccatggatctgaacaatgcgaagggcagtactaagttaatgaagtcaaaatcagagcaataactaggagttgtaaacaatgtctgtacataataggcttgaaagttgaaagcatgcatggtcaaaataagtatggagtaataatatccacagcactaatgttctgctaccatcttcattgctaaatggccttgatatcaataaatatcatctcagattactaaaatgattagatttaagctggactcaatattataatgacaaccttacctttggtggcttgatataagtagaaagttgactctgctaattcagggcgcaagggataatatttttcagtagggtgcaacatttgatggtctaataaatacctgcatggttttaaaagtagtattaggaactgtttttcttctttcttcttagattaagtgttaccatagctgaacagtttcttgaatatagagttcacagcaaaaacaaaggaacgctacctctcaggaagcactccgaactttttccaaacgtaaaagaactcccgatgtgatgaatttgctgctgcaacatccccaacaagaacctgatgatcaaatttttatataaagattagaatattcgttctgaggtttcaaatcttcaatatgtatagcacaggtctctactacttgcctgtaggccaggccaaaacgcttgaaggctagtaagctgccaataagttgcttttcctgtcctcatatcagcttcgtggtacctaatttgttgttacaatcgttacactataaaagagcttttatattggagagaaagcttggcaagtaaaggataatattcagtaaagatggaaatgaatggagtaccatggaccatgtctaaaatatttctgcacagcgacataagcagagtgaaacattttccaaaactcttcctttccgaaaacaatgtgagccttgaatagatactcataaaaagaatcaactcctgtatgataacacataattgaatatcagagacttaccacatttatccaggtccatttaaaaattgaaaggttctgggacagaatactctgacccatccacacacctttccttcttccacccactatatatttgagctaattttaatatattgaaactgcatattcaggtccgcaacgaagcacaaccagttatccaaaaattaattaaattataaataaagagatcgatgtccaagtaagacataccagccccaataccggatgaatgttcaatccattccccagttatcacatccagtgttgttccaaataaatttaatgagcttctcatactccacagcttgcggagagcacgtaaagcagcagattcatatctggggttaccggttaaccttgataatgctcccatttcaagaattaaagaacctaaatcgacaacaaaaatcagtacatctcaggaaagcatatcagagaatgtcctcatcttaaaactcaaaggataagcctctcaccacaccctgaagtgcttgtctcagtggtctcattctccatcactccatactgtccacagaatttcgcattgatgcagagagtcatatatccttcttacaaacaaaacaaccaaacgtttttatacatttggaatttatgaaatcttttgtttgagaagaacaaaaaagatgaaataacgcaaacatagtttttagtgtcagatttctctgtgtatatactgaacagacacaagacaatttgaccatgcattagcttatgtgctccatgaaagatacttactgcaacaaaattatattgccgtttagtcaaattcagcagttaatacatcctcccataaaaattcaacttctattccactcaaacaataggcatcaagtatgatgcaaattacagtcaatcagtggccattggtaaatttcattagacacatgctatttgaaccggtaatctatcacaaacataaaagaacaactagaaactaaatttatgatatggctctactgagggaagtcatgaaagttaactcattttcttacaaatagatggcacataacaggacaagtgtctcccaatccaatacgatccttttgcaaattagaggtagcaaagtcgtgttcaatggtgtgtgtatccaaatgtcagaataaaatttggatcatgataaacaaaaatgacaaactataattgggtagtacctttaagttgatccatgcatacggcaatcctgttggtgtatcgaaagctggtagcaaacgtttccctagatcttcagccaaaatgagtagttgattcttataagctccttgaaccaacctgtttgtagaatcagttgcaagcatatgagcagatacaagtcctccaagaactcttatgttgcactacaagtagaccaagtgacaagagcatcattaaacacttcaaacataacttgcttgctcacttgcacaaaaataaaataaactacaattattgtcacccttgccatggtttgaacaatcctaaatgaatttttctgtttgggatcaaccagatcaaagcctttttagaaaactctatgattaaatacctcaaaaagatttatccttgcatcaacgttgaatttcagatttccagacagccaaataatagccctttcgaattctgtattgtttcccataataacaaggctgtcaaagaatttgtttacatcagattggcaatccaacaaattggtataagtggcctaaagaacgctacaaggtgaaaataaaagcattgcatttactggagcaaaactacttatattgaaaagaactctgtatccatattgagaactatctcgtacctggacaaagattctattagtgtaagggcagatccgctatagtcctgtggtaggtgttcaagctgtaaatagaaacggtgaacaatttacaattatattctttaaaatctaatcagaagctatataacatgaacttataaccattacattaccctcaaatttccaagctcactaagggaatcagtgaaagttttcgtaagaggctttaactcatcatgctgcaaacaatatagaaaacaaacatcaacacgcaatgatagcacggtttaacaaaaaccatgagaatgaggattctaaccggaaacgcatggttcatgtagttgtcatatgcatgatagaacctgaaaggagaagaaacaattaaagtcattctgtaacccaattcattagttgcaaatgggagatgtcttctcatggcgttatgtgatcaaaatctgaacttttcatgaagaacaaaatcaaagcatcaattaacgcaaccaaccatacaccatgaaaaagaaagaaaaaaatgatttttcttttcatgatgaatacccagaacgtagatgaatcaaataaatgagaattaaggtggttggattcaagaagcgtatgaattagcttacattctacggactttctctctcattcgtctttttttagttgcataaacgtggttttgatcggagctagaaacttgtaagagagagatcgagatgaggagaagaagtataacccattttagagatttgttgggcaccatagttgcatttaatttcgaggtgagcgagtgagataatattagatcacaaaaccaaccccaaagccggtgttctggacctgcgaatgcatccacgaaaggatgaggtgggtttgatattctatttaggattttatttacatgtaatatataataatttatttatatttaatttatgcgttttatttctttaaaaaaattatacattttattaaattcataaacagaattttaatgaacatgatatagttatgcatattgtcgtaattgaggggctttttctcacctttcttagtgtgacttccggtatcattgaggagattgttggacaatggaatctgttgtttgtgaaaaatagacaacatcaaaaattgcgcaaaaatcacgagtattcaagttaacaagagcactcatttacttgcatcaaaaaaaaaaaaaaagagcactcatttacagaactctgagttttcacttaaaagtgacaatactcaaagtataataatgaataataaagaggcagagaattataatagttcagttagagtttagtctccttagtttacttttgtaaaagttttttaattttttttttattttaaagtggatcactcatttatataagaagcaagtggtcatttggattatatattgatcaattataacattaatcacatttagttaaaatagaaaatatttataggataaatgagagaacaatttcgaccgttcttagttaatatcggaacgtatgcaactttagaaatcgcatattaattgttcactttcttcaataagatattaacttgcgggttctcttgtgttactcgcatataaagtcgttggaccacaaaacctcgaggtcatttataagatagaacacatgggactatactagtcacatattgagtgttcatgtatagacaacattaaactcacgggttcaagatgaattgccgcacacattagtcattcgaacaagatgcttgtaaagatgcgatatgtacgtgggatgcagggaagaatcatttagtcctcgcatataactaatatatgggcgactcgtggtgacttctcttgattctgcttgcactttactatgctgcgcataatgtgcaactagaccttgtcttggtcacaccttctcgcaagtttcggtcatgtgaggatagctctactggagcagttattgacacatcatatttttccaactggaaattgggtccacgtgtcaaatatatacgagattgtgctcgtatttctaggaaaaaatttacactataacacatgctcctagtttcgcgataatagttgtctatcacacggcgaaactatctcgagggatagtcgagttgagtcacatcatgggtgacatttgattaccttctcgaggtttatgaaatggcaattggtaattatgatgttaatctttccaagatgtcgtgacatgaaaacccttcggcgtctctataggcttgtctcgtgacaatcgttcgatgaggcaactattagttttccaacgccatgtgttacgatcataatgtgggaccacaattcctataaaagccccaagtatgaaaaatgagggtttcatttttccctctcattttcattttactctgaaattttttcaaatttttactccacttctagaaatttctccaaggatcatttgttgctcaaactctcggaattggattcaaacttcttttcaggaaacaaaaccaggctttcagattcaaaggttgttttctctatttctcagttttttgtaaaataattttggataattaaatgcattctgggtcttattgattaaaactgcatgaaaataaaagacggtattctgggtaatgggaatttgtctttatatggactaaaataggtcactttttttttggggatttacctttttgttgaataatcacatcttctttatgaaatttttgaatgatagcatgtttctttctagaacactttgaatgttcacagtaggcagtagaccactttgaatgctcgcacatgtatgtaggatttcaccttaacagtccacgaataattgccttattttctggggcgatttccaactggaaaaagccttaataatattagaagtcacactaacttactaacaacgcacgagtgagaacactcgttttaaattgcatgcacgatgtggaggaggttttcctgtatgcctcactcgtggtcgacaccatttggcgcactcaaaatgagaaggttcataataatctcactttagatgtgaagaagtgcattgactctattcgattttcttttgcagaattacatgctactattttcctttcccctgacccttgcctgaaggagtgttggtctccccccttcaagattggatcaaactgaattgcgatgttaaagtggggtttgatagcatgtgtatagcagttgttgccaggaaccacttaggcgaggtggttcgagttcatacgtcttgtcttgacttttctaatgctctttgtggggaagcagggacgtgctgtttggctatttatgctgcttcggattttgatgccaagtttgtcatcgtggagagcgactcgagggtagtcatcaatgctctcaatgggaaggagtctcattgggttattggaaactatgtctc

SEQ ID NO: 43092 - DNA, 1534 bp, Cannabis sativa
  modified_base (50)..(52): a, c, t, g, unknown or other
aagtgtgaccttgaggactattgcgactatttttggaccttggggactannntgtatcaacgtgaactttttggggacttttaccgcaaatttcccttatatatacttacgaataataataattttaatatttttttaatataacacagtaaacaaaaatgattatatataatgagaaccttttcccttttatttattacataaactttcaatattgccagtgaacacgaaagtttcttagagttactagtagatttgctcgacaacagatacccaaataatgtatatctagctagctacatataaatcatacacatcaacaactcacaacatcttatctatatgaatttttttgacctaaaattatgtgatttaacattaaattaaataaaagctcatttgtgggattactgttttttttaaatcaaaaattgaatattataaaatcaattaaataactatatatatatatataaaaaatataaaaatcatcattattttcgataatcacaagaactatataaatataatatcattataagactacataattagtttagtgtctagcatcacaaataaataactaatatataaacgttcgagacaaattaatataatcattaaccaatttgaaactcaacatagtgtgtatggttcttatcaaattttcattatatataaaaacttgtaatattatgtttgtataaaatatattttattagatcaaacataacagtttgaaaaatctatactctaaacaaatattgtgtgtactagttaatgtccacaatcatattattatcaaaaggaaaatatagggttgaaaagagtaggaaaatagtatatgtaaaaagaaaatccacaaactaattaagtgtggggcctaattagtaattataatagagagagagagtgaaggcaactctaatcttgtataggtgctttaatttaatgtcgtacaacagtgtgtgcatttgtagtagtaatattattatggtagtagactttttaagtttcttttagtagattttatctatttgcccttcaatttttttttcactttacttatttttatgattacatacgttgtaattatttaacatcatttataaatttttaaaaattttcgaatagtttaccatttaaaaaaaagaaaggcttaaacaataattactattatgagcataaaaaaagtcgcgcatcaacaaaatatataaattttgttttcgatattataaactactcaaaattttatataaatttagtaattgtcctaaataattataatatatacaatcatgagaaaaaaattaaactaaaaaattattttaagtattaaaacggataaaaattaccaaaacacacattaaaaatgtattaaaggcttacccggtaagatattgtgttgtgtatggagctatatacgtgatgaaatggcaagtagtatatatactaggtagaaattacgtgtctagccacatatagttagttttattttaggttttagttatagttatggttttttttcaaatgt

SEQ ID NO: 43093 - DNA, 2369 bp, Cannabis sativa
agaagaagatccaaatggatctctctaaaaaaaagttatttttttttttgtcaaaatagaaaaaaaaaataattatttttttattttttttttccttcatatctaattgcaataagggtttctatacgattttttattacgatttaggttgcagcactaattataatatgagtttttatatagaattattctgtaaaaatataaaaatatatatatatatttagaattataaaaataaaaaaaaccaaaaataaaatccacataatttttatatacaattatttacataaaaattaaaaatatataacttttgcttatatcttagtcttacattattcatatactttatagaaactataaataaatgtgatctttttctcattaaaagaacataatatatatgtttttattttttttttatcaaaaattaaaatagaaatgttaaaacatatatacagattatttttgcgtatgttgttgttgttgttgtcgtagttggaatagttggctttggttttcctaagactctcaatcaaagagattgattactcctttcactgttctgttggggtctagaggagcacgcaacgtgtcgtgggtcccattcaacaacgcacgtgccacttttatcttaattttcactttgctcccctaaactataattttattccacttttacctctcatttctgaattttaaattttatttgatgttgtcgctttagtgttttcgccactttctgtcattatacctaaaaacataccatgttataacacgatcagttatataaatagaataaatatttgtttatttatttctttagtttataaagagcaaggaaccatatataattaatgaccttatatttatatctttaaattcacataatttatgctttaccgtccaatttgtctggtgaaggtgaacaatcgcattaaggctaaatttgtaatcactcataaggtcacagcaaaggtgaaattgacctacaaatattttggagcatagtttatatctatgggtatatgtacttatttgaaaacaagcctttaattatttaaccacaaaggaaaatctaaatatcttgtccacccacctttgattatcaaataaatctttaggaagtgatcttatatgaagggttaaaataataatttttattatgttgggtaggttgaaatataggatttttttttcagataaggatgaagttattagagtagagttaaaatttatggtgagttggaatattttggccacctaaattatttttgtttgcttaagtgatctaggtacttccgtgtaaatttttgttcttactaaactttataaagaaattccaacgaatatacaaactactaaaattaaaaatacgtgaaataaaaaaaaaaaaaacaagcaaaacaaaatcatgtctgagatagttccaacaatatatgttggtcaaaatcaaattgttgttttttctcatcaactcaacaaaatgaaaaatataatttgttataaaagaaaaaaaaaacacaatgaaaaatacttcttgagaccatatataatataataaaatatttctataagtaaaatacctaaaaaaagaaatgctaagcccccaagcgccaagccaaacatatattgacataaatctctaagaacataatcttatatatagatagagtgcacctcacaaaattcattatgagttcttcattacttgattattactcatcgtctcacacagttacagatcaactcttggattaaaaacacttaattatataattggctgtgataatatataactaattggcaaaacttgcattgttaatagagctagactgttgacaatcctgtctttctgcgtgtggccctagtgttttatctctttgtatgagtttgattttgtgccagtttcatcatttttatcaacaaaaaaattccttttgaaaaaaaatatatataataaatgtagattattagattgtaatggactgcaactctttttttagcaatagtttacactcctgatgactattctttataaaacaattttttgtcaaaaaaaaaagaatactaataaatttaagtaataaagtacttacaactagagtataatatttaacatatcaaacaaataattcaaaactattcaaagcacttcatttgtttaattattgatccaaataaatcatgcatttgtcaaagtaataaagtatgtactatatatatagtaaaaaattagctcaagtattatttatagtactcaaattgtaaatttaaaactaattttgttttggaaagaaactatgtttcttaagaaaaaaaaatccattctttgtatcttttaaaagggttaatataatatatatatatat

SEQ ID NO: 43094 - DNA, 7348 bp, Cannabis sativa
aacaatctcaataattcggaggaaatttttaacggccaaaaaaattcaggggcacaatttaataaatatcggggagaaaaattactaattagcttttttttttattattatttcaataactggtattacatttgcttgctttaagaccaatagcttgctgccaagtggacggtctaaatgttgagctacactcaccaacaattaaaaaatctacatcatagtacgtatcctctgttattaatgcaagtaaactcttgtgtttaaacgagtttaaccaataaataggaaacacgtaagcaatttgattacttcaacaacacgcgtaacaacaccattgacttgacataacacgtggcaaaattccaggaagacttgaacgcgggaaatccgaacatccgcgacataaaataaaaaacatgattcaagtggggatcgtgagaagcgtcgttttcaatacggacccttttttaaattatggaaattagatttttttcttgtaattaaaaaataattatttattttcttacataataataataataataataatttatttagtacagcacgagagaagttctgggactatatttatagaggataagaagtctcactatctccactactctacaagtccgtgatccgagtgagatttcgcagagagagctccaatggcgacatcgcaattctcagccagttgtagtagaacaaggccatttcctcactacgaatctcgctccagattgatcgatttcacatgcagaagcagcaaatcgaagctgttttttaccaggtcactgaatcgaaagcaatcgaggcggtcattctccgtgaagagcgtttccagtgagccgacgcagaaattgaaggatccgattgccgatgaaggtcttgattgtcttcttcctcattttcactctgaatttgtacttactttttttggtattttgaataatgaaatcttgtgtttctgttattcttttcgtttattgacttaaacattgggtaataaggtttatgagatggtagaaaggagcttctgaggtcaaattgagtttaatatagattaaacatggcaaattgtgataaaatagtgactaatttcttatcaactttaacgagctgtgtttggtaggcaatgtacaattgatctttctttcattttctttaatacctgttaagttcagataaaatcgacatttaagtgagttgaagatgctttttgatgatctctattctctaccattcggttacgatcacacactacaaatcatctcaatcatttaggatatttggaaaggagatagttactggttgataatcattgtatctacaatctagttagcttatttctattttttatgctggcatcaatcatgtatgagtagttcctgttatttggctcagttccaggagatgtacatcagagaaaaaaaccttggtttgagatttttttcctcgtttctgtatctgaacactgcttcttgagtttgatttctttagatttgatatactagattctgacatttaatatatgtccttagaagcttcgaccacactcagctcactcacaactgatgctgcatctgtcgcttcaagtataaaatatcatgcagagttcaccccatcattttctcctgagcgacttgatcttcctaaggcttactttgccactgcccaaagtgttcgtgattctctcattattaactggaatgcaacatatgactattatgagaagttgaatgtgaagcaggcatattatttgtcaatggagtttctccaggtttgtcataatttatattgcaatgattctgcaggcagaaataatttatatcaccaaattattttctgtatgtcaatgttttctacattttaaaatttttaattttgtttgtagggtagagctctgttaaacgcagttggtaatttagagctccgtggtgcttatgcagaggctttgaataagcttggacacaaattagaagagatagcttcccaggttagaacactcttttcttataatttttatatctacaagctcaagcttggcaacatcaaagtcttgtcacttttgattgacacgagagttctttcattagtattttttatacttatttggccattcagtacattcaacatttcattgttcttatgctgtatcgtttgttcaaaaatcaacatcttctatttctgtttgtggaaaaccaaccacaagaattcgtaagcattggaaacagatttctagaatttgaggatgagacgtgcacttaagctgaaaatggggtttgcatacacttttttcccctcattcaaatataaagtttgaaattgttttctttcaaaggggtagttatggaaacctatgatgcgataacttcaaattctaaaaaatcacgatcttctaaaataagattaatacatgagctcatttgataaaaaaaattcttatttattgtgaaaccaatttagctgttgtttcagttcaacgatctaatacggtatatgacttctctgtgttattgtaaataaatgcttgacttcttttatggtaggagccagatgctgcactcggaaatgggggccttggacggttggcatcttgctttttggattcattagcaactctcaattacccggcatggggttatggccttagatacagatatggtttatttaaacagctgattacaaaagatggccaagaagaaattgctgaggattggcttgaagtaatgttctctgctcaaaatctttatttaatctgcttttgtctgtaaaggttaatggcattgtcagtacatttactgttatcttgagttgtctgtccttaaataattattgtttctccttgcagtcgggcaatccatgggaaattgtaagaaatgatgtctcctatcctgttaaattttacggcaaggttgttactggatcagatggtataagacactggattggaggagaagacataaaagctgttgcacatgatgttccgataccaggataccaaactaaaaccacaattaatctccgcctttggtcaaccaaagctccatccgaagattttgatttgaacgcctttaattctggggagcataccaaagcatatgaagcccttggaaacgctgaaaaagtatgtacacgcttagtttgcctttattaccttcgatcatttgatatgctttttggccattcatatcagaaaagtcttgatgttgagagttttcattatggtattgactattgagaatttcaaatattgaggctatagcatgtttttgggccgttctttagtatgttgtatataatatcgatctcggattccatcttaatggaggtgccagaatggccaaccagttttgtgcctgcccttgtcaacatttctggtacaagttatgtctaattataatttatacttatgcgagtgtctctcagctctggttgtctgacttccgacgatgcctattctaaatgctgcatgctgctttaattttgtttaccacttatagaaaagataaagatgacttttcttgtataccagatttgttatgtactctaccctggggatgagtcaattgaaggaaaagtccttcgtctgaaacagcaatatacattatgttcagcttctcttcaagacattattgcacgctttgagagaagatctggagcatctgtaaactgggaagaattccctgagaaggttgcagttcagatgaatgatactcacccaactctctgcattcctgagctgatgcgaattttgattgatttgaaaggtttaagctggaaggatgcctggaatattactcaaaggtattactttctcatgttcttcataccattcactgtagaggagtgtattaatacagacaagagactagtatctaaaatttattgttactattcccatcatttaaaagaaaaaggaaatatatattataagttagtttgattaacgtgaatgaatttgcggcattttttctttcccaattttgcattttttttttcttttctttagtaccatcatattacacttgataatggaattcagtttatatgttagatgaagttggtcccaacctaaccttgtttggtctccaccaaccaaaatatacattgcacatgtgcctacattttttaagtattcattatgaatgtattttttccctaacatttcctcatgttccctaatctccataatactagaactgtggcatacacaaatcatactgttcttcctgaggcattggagaaatggagctttgaacttatgcaaaagcttctacctcgacatattgagatcatacaaatgatagatgaggaggtagggttgtaacttgtaaaccaacacctaattgtttgctatttattgctctaactcctattgtatcaattttcaggttattggaaccataatttcggagtacggtacagcagattatgatttgttagaaaagaaactgaaagaaatgaggatattagaaaatgtggattatcctgaggcctatgcggatatacttgttaaacccaaagaaattgaacctgttgaagaagttgaaattgaaaatgttgaaaaagtcgaatctcttgatgaagaagacaaacttggagaggaaagccctgatgagaaagaacaggtgttaccggagccggtaccagaaccgccaaagcttgttcgtatggccaatctctgtgttgtgggtggtcatgcagtaaatggtgtcgctgagatacatagtgaaatagtcaaggaagaagttttcaattcattttatcaggtaaatatgtcagccagaggagtatgtcttttctgtctatctatacagaaatcagaatgtaatgcagtttaattcttttatctcaagtgaaggccttttacaaagctgtgaaattattttcccttattatagctcttttgcaactttggcagttatggccggagaagtttcagaataaaacaaatggggtaaccccaagaagatggatccggttttgcaatccagatttgagtgaaataataactaaatggattggcacagaagaatgggtcctagatactgaaaaattggcagatctacgtaaggtaaaagcagcagcagtggagtgacttttctgtatgattgcctgagttcgtgtttagttaatttatgttcactgaatacagattattatactctgtgctgtacacttaccgggattttattgtatctgatagttcgcagataatgaggatcttcacagccagtggagggcagctaaaaggaacaataagttgaaggttgtgtcactgatcaaggagagaacggggtactctgtcagccctgatgctttgtttgacgttcaggtactttaattttgctggaattaggtgtgtttttttttcttctttttgaacaaatgttggacaatgaatattattttatcactacaatgaagaagtaactaactaactaactattaagggaatggaataagtgtgactgtttttacagcatcaaaattttgggttttaatacttttgagaaaattacggatgatgacagatgacccccaccattgttcaactcccaattgattatatcattatatgtttgcttgatggtgtaactggactgggtcaatatttcgcaaaattgaacgtttaatggagcttgtagataaatgcattagatttggcaaatgtgatgccatcttttctctatgacaaattgtcttaattttcttgttactgttactgtgtatatgtccttcctttatgtctgacttaaattggaccaactactctcaggtgaagcgcattcacgaatataagagacagcttttaaatatcttgggaattgtttatcgctacaagaagatgaaagaaatgactgcttcagaaagaaaagaaatgtttgttccccgagtatgtatttttggaggaaaagcatttgcaacatatgttcaggcaaaaagaattgtgaagtttatcacagatgttggcgctactataaatcatgatcctgaaattggtgacctattgaaggtacacgtagttttttttcctgaaaatgaagctacgcatagctttcgtactccatattgggtactgagtgtttttatttaattgcttactcaaaattgagtcacttcacaatatcttaatttttgggctgagattattttctctgattttgaggaaacagtatatctctcaaatagatttcgttttgaatagttttgagatgatgacatctttagacctagagaacatttaagctgcaactttttggtagacagttgcttcatgatctgatattcatacttttcatctcactaatgtatccgggtaacatccttcagtgtgtaaccttatgatgctagataaatgatataactcctccatgtacgtatcttctgtatttatgtcagttgaatttttgaattaattacactttaaacatagatgagttggttttctcaaatcacccaatttctttgagcacatgcgtgttgctgttaagttttgtgtcatttctcttacatcatacctttatgctttgtttattaggttatcttcgtcccagattataatgtaagtgttgctgaattgctgatacccgcaagtgagctctcgcagcacattaggtaattcttcgtacttttgcatacaagatttttcttgcttacacttgttttcagtcatctgcatatatccgaaatgatataccgttttcttaaatttggccaccactcatgctttatttattagcaagattgagcagaaagtcataccctgacttgcgaaggtctcttttatctgaaatgcttattttcctttcgtcttctccctttagtactgctggaatggaagccagtggaaccagcaacatgaagttttccatgaacggctgtatcctgattggaactttggatggggccaatgttgaaataagagaagaggttggtgaagataactttttcctctttggtgcaaaggctcacgagattgctgatctccgaaaagaaagagctgaaggaaaggtttgtagtaataataaccattttgacggtttcatgttactcaatttttgtttgtttaaaagattttatccattcaaatgctgctcatgagcacaatgacttcgtttattcaatcttctcatattaacctactaactggtacgatatggtagtttgttccggacccacgtttcgaagaagtgaaagaattcgtgagaagcggtgtattcgggccttacaactatgatgaaatgattggatccttggaaggaaatgaaggttatggccgtgcggactatttcctggtgggcaaggacttccccagttacttagaatgccaagataaagttga

SEQ ID NO: 43095 - DNA, 1868 bp, Cannabis sativa
tgtgtgtgccaaagttgagactgagaagtgtgcatgagggcactttttatatgtttgataagaaaatgtataatagaaaataagtcaccatgcatatatattgatcttaataacatttcttttttaggttcaaataatgaccttaagtcgtgtatcttgaaacattgagatcatcgaagggaaaaaatgaaagggaatccatgaattagaatttgttactttcatgttttaaattggtataacattggctcctatttagtttaccctaattattcataataatgattagaacggcaatgttgttgttggggtccatgtaataaactaggtgtttttcttctttaatatgatgtgttaatttgctaaatgaattatgtttaaaggattttgttttttcttatttcaaagacctatcaatactaattattgtaggaattgatgtttaaaattaaaacatatgtacaaaccctagctagctagtatttaaatatttgattacatttttattcttattttcctaacccttttgctggtacaagaatatgtctgaatagaattataaaatttgcttggctgtatatataagaaattgtagcttaaacaacaaaccgtttgggtaatgaaaaaaaaaaagttgggacactttggtaggtttctaggaataaagtttgaagtacaaaaaaatgtattaaatatgaataataacaattaaatgagataagggttcagcttcatcttcatcaaagatatacatgaacaaatattaatttgtcctttgaaattatgattgtaggacccagaacttgttccatatttcttaaagtatatctcaccatacaataaaattctgaaatatgacactttttcccttaagtttacagaaagtgaattattttctctttttaaagtatttcagtttccaaaaagctaatagcaaccccatgttccctaaagctttaataagagacaatgatgagtctcaaagaaagaaattcaataatttctttagacatcatcaaaacaagttcaataaagtgacatcaattgccttgcttcattaaagttctatagcataaaaagaaaaatgaaaaagaaaataagtttagtaatgaaatcacttatgtatatgacaatacaatttttggttcattttggcttttcataatctaaacttgatatgaatatcgattatttcaaatagaatatttaatagttggtaagaaacatgaaaaaaaaaaaagtaagaaataaagtagatactgcttgatgacttttgaaaactttagttcattggttactcgagttagaatacaggtatatattttgctttgaaaaaataataatcacaaaataaatttaaaaacgccaaggatttctttcaaactttagtagtaccatacatttatcagcatccagtaatacaaaacaaaaaagggtcaaacaatattcaaatttactcacatatatttatatagtcaaataaaaaaaaaactcatttatgatccaattttaaatctttactagctagaagtgaccaataacaatatttggagaaatctattcttattatgtctttccattgcatgtatatgatgtagcaaatatttaatgaatagtgagacattaatgccaagagatatttatgttagtcatactatagtataggtacattagaaaaattaaactctatttattagaaagaagaaaaaaattgtagtgaagtaattagacaatattttcataaagtattacctactccctatattaagaattacaaaattattagaatatgaacgaaaaaataataattatatggtgctaataatctccttcacatctcttcgatatactatgtatatatatatata

SEQ ID NO: 43096 - DNA, 6592 bp, Cannabis sativa
gcatttttcaacttacccctttttcctttacataacttttacttaagaggaatgacactatatatattattagtgtcaatgaagtatatctatctattggtcgatggactatattgaagtgccatcaattatatgtggaggttaaagtttccctattttgttgttgttgtttttctttcaattagtttttaagaaagaggttaaagtttctcttgaatgatgacccagcttctctattttttttttcgttattttctcttttcattctagaaacagtttcgaatgtagcattatttctttcaatgaagtagatttgaatttcgttgtacgttttaaaaacgacatattacaaaatgtttatttatctatacataataaatatatcaaatcctattgaatcagtaatgcttcaactttttactgggatatgtctgtagctattgagtctatatttagtattggccaaaccaggcagagctatacttagagctaaacagaagaagagaattttttacttctttcatgagcaacatgctttgagaatgtcttcaatatcaggatcatccccagcttctttgtcctaaaacgaattaaatggctcttatattaatcagaaagtgcacaaacgaagaactttaattgcttttctggggtaataaaaacaaagaatggaaatgggaataggatataaaaaatgaaataaaatttactaaataaaaaatttatattcattttgtattgaaatgatgtttctttctcgttttagaagtaatagttatttcaacaaattagtgaagaaataattgaatgtcattccaatattttaaaccaaagtaacgaaatttcaatttcattaccccaatccccaatcaaaaatgcaccctaatgatataagaataaaaagttactaaccttgtgaatgtacgagatgttagttttgccaggacctgcaactataatcccgccttgttgcctgagaaaataactttttaaaaatctttgtattgaaaacaaaatcaagatagcatacaaacattgaaagacaagtttgattttctctgtcaaggtcaattcgtattccgaattactattgcttgtcatcgcaacagagccaatctttgcagtttgggagcaggcccccctgattttttttttcttaaactatataaaatatcactatagcccgaataaaaagacaaactccccaactaaaattactaatagtgtaaacagtactttctcagtagattagtggtaaagcttaaaagggcattaaactttgttgccttagacaaaaggcaatttatttcacatcttcataccgaaatcaaacaaggaactaaatcaagttaggatataatcaatgaaagtggttcgaatttcgcatatgacaaagaatgtttaagtcaagttcataaattgctaggatgtcatagcattatgcagtgagcttcattggctaaactagtattcaacatccgtatagtatttcttggcagaattttctgacttgattaacggtaagagttaaaagggcatcaaatttgacttctacatatttgcttctttattaataaaaaaaggcacataccagccacctctagacactgtgtccttttgaaatgaaagcttccagtcttgcctgtatccttccatgtagagttgtataattttaacacctgcctagagttttttcaaaagaaactaaatcagaaaacacccatctggattacattgttgttatattagtagtttaaggcatatactttcttactctaggagtgaatgttgttgtgaccccagaaacaaatctcaatgcctcatatgatgagtgaataggatctgcataaacttctgaaatagaattggagatttgtcattaaattgtgttgttggtccctgaagtatggcccctataacaatttgatcctcaaagtttcaatttgagtattaaggtccttaaacttagtttctaccaattaagagtctgtttggttgtgttttcagttttcagaattgtgtttataaaagtgagaataaaaaataaatttttgtcattttaaaaatttaatagtgtttggctcttgttttttaaaactatttattttttttttcttaaaaacaacgtcaatattctacaccataccatgacatgaactcaactcacctcgaactcgatcccagacctggacccgaacaagaactcggactcggactcgaggttcaaggtcaggtcgatccctaggccatgttcgagtccacggccggatcagtcccaaggctaggccgtgtccggggtccgaaatcggggtctaggtcttggtccagggttcgggtccgagtatgtgagtgaaaatgtaaaaaagaatatgttagacaaaaaaatgaaaaattgtttttgaaaatagaaactaatatttttatgtgtctgttttctagtttttgtaactcagttttcagaagttgtttttaaaaaaattggccagatgcaccctattagtttttaaaaaccgtttcagtttttaaatactattatctgtgtttccgaatgaaggacacgtgacaaaaaatagaaggccacaatccaaatgatcaccgactaagtcttcttaattgcagaaggtcacagagagattatgctagctcgagaaaggtctaacttgaaagaggtacaaagatttgttgcaaagaaaatgaccatcaaagacccgaaagccttatcattgttccagttcccggagaagactaatttatctataagtgcaggaagatgccggagggtcatgcgaagagtttaagacggatgccaattgtgcaaggagaaccggaagccatatgtgaggcgagagccgaatggctttatgacggttattcttgtctgacacagaattagatcttgtcccctgtgtctgaccatggtagtgtgtgcaccatcctctgaacattctactttgttcgacgactcctctgagcattttgtccaccaagtgcaaccttttgcccgacacatgccctgcaccaacaattgtccccactgtacgaacgattcgccacacaagaaagaaccatcttggaggcccaatagttagatatttaatgtatttcacccctgttatccgaatttctacactatgtcgtgacatccatctaggcgacacgtgtaacatatttcataaccaaaacgaatgattctacccctagtgttcaccgaaattttcgaaaactagatatttaggagctaaagaaataataatttacagaaattaagagaggaagattttttacgtggttcaggtgttaataaaccttagtccacgagtcagtctattaacctctaagggcgatattgatgtgtttacagtattttgcaggaaaccctaactctttactcttactttccattcgaagaagaagaggatcaagggaaatctcagcagagttttagctatgtgtttttggcttgacccctttgcatgaaaataaaagggtatttataggctaagtggtaggtatagacggttccatgacccacctaagatttttacttaaatcccactgttggggtaaattacatgcaatgtagagctgtttggatgatcccatgggtaacattatgcccgtgtgtgtagcagctggataatgaggactactttgtactacttggacacgtgtcatgcaaatatttaacctttaaaagcaggggagacatgtcactcaaagcttgtttctttaaaagcagaagtccgtagtatccgtctggtaaaaagatggtggtggtgcgagcactaccatgctcggatgtaggggagaagatctgattctgtgaggaaaagcataaccgtcactttggtgacctggctggcgtgtggagaaagtcgatatctgcgagcgatatccagtgagggttgacatccgctttaggcccctcgagtacctgtttggaggtaaatcaaacgagcttccctcttagacccttctgggtctgggaaatacgtttctccttcattctttgggaagcaaaggcaggtttgagtaggcttccacgtgtcccttcgttctggaggtttcttggttcggggaagcctttcagcgatagcgcagtattaaaggatttcgatcaaagaaggattaatttggtgtccttctaaaatgccacaggtcatacctcgtagaaacgcagatatcatttactcccaagctctcgggacgtaacgcggtccaggagcttgcagtacttcgtcgcttatgcgtgacaaatctttgacaagtggtgatggttggactcacggatgtgccccataagctatcatcatgtattggggaaattaactgtagggaccttcgatatggcacgcatttgtcgttttttatgcatctgctggcgacacgcgcgtgtgcgaggtgtcccttgggatgagttgtaatgacggtaggacaattgaggtgacctctgctttaatgcgtacgagacaaaagacgtgcaatgatgaacactaatcgtttgggttgtgcattaaatgcggtctattcaagtaccgatttgtcagatcaaaagatgcttttcagaagaagcaatttggaccgttcatttcaaactgctaggattgccactagattataaataggcatcaagagcccatttctcccttttttcatcatcttcaacctttggaagccttcttgtgtttttcaaaccagaacccttatttcccaatattcttgcctctccgtcgccttcatcagtgaatgtaagaggctctttactgtaattaatacctataaatagtggattcatatcactattcagggacacaaaaatattctgagagagaacactttaatacataaatcctataagtctagtagaactattaaatctggtagataggtgaagtagacagaacggattgagtttcactattgttgtgtcattggcataaacatagattatccagaaagaataacaattatcattcttacaaatgttatagcaaacattttattatgatcttttacatgcaaagttcaatagcgcttcatgcaaccaacatacagaagatttaaaactgattgaagaaacatacctcctttgaaatttgtttgttcagtgaatgcttttgcctacaccaaaaatcagaaaagaagtaatgctgttgattaagagtagaagaaacagatacggttgttatggatttatatcaactcacaattctttttagagcttagttaaaatttctacaactttaaattgcaaacaactgatctggctatgaaagtatcagtcaaaagatctaatttcattgagaacaacctcataagacgaggatgttgcattaaaaattctaatgtaggcacatatgtattaatgtatgatgctattgtaatgttgatacaaataaagtaatcattacataattagtatcattgggtattaagtgttattctaagttgatggagcaaactataaatacctaaaactatatataatattagagaataaattggcagtccctaagaaccaaatacttctttttctcccccatgaagagagaaaatcatagaggaaaagcttgtgttcttgcaagatcaataccctcaagacaatctccgtcaatagattcagatattgtttctgattctgttctttagaaacatgacttagggtttgattttcaagcacttgtagtaacatgcttaggttctaaacttgtatgttgtatttatgttgttatgcgtgttacaagagttttttgaaactctaacatggggactacattcactatccacatgcacaaaatcaagcagtcactcatatgatcacacactttagcaaatacatctatgcatgcttacaatacctatatgctgttttgggttatacctggtcaatgtttccaggtcctatcagaataagtgccactccatttgcatcaaatatgtcctgccattcataaatagattgcaatacatgaggtcttactattctattctccacaatctcaaaacgatgttgaattacaccaaaaaaggcattttgcttagagattcagagtacatttgcaaccaacacagacatgtggaatcccatccccacatgcttgggaatcaatgttttgtaatgacacaataaagttttagtgcataattacaacactttgctacttagtgagtttcttgtgaggataagtagatagtccaaaagagaagtgagtgatcggtttagcacagtgtgtgattcgggagagagatacacactttggcagtgtagttgggagttcgggttgtgagattaagagtactgtaatccactaacttatcagtaaaaataatggtcgtcctctaaaggagataagcaaattttatttgacggaccaatgtttaaattcttccactttgccgttactaatttgaaaccgggttttggcagccaaaagttcagattaggaacccaacaaggaattaaactcaacatagtgaagaacaggaattaactaataataaaccaacacaagtaccttcttagaagcaagataatcagcacgtttgcggcagaaaacacatctgaaagagtacagaaaaagtcacaaaacaa

SEQ ID NO: 43097 - DNA, 1716 bp, Cannabis sativa
aatcatttacataacatgttacataaaccaacaaaaatggcctcgcgcaaactagttgttttgctctatgtaaggtcacatgtgtgaggatgttgtggtatgagaaagttaataagaatgtgtggaaagattctctaaatcaattagacacaaaatgataaggaatttgtagaaagatttagtacaagtacttctctctaaaataaaaaagacaagattgacaatactcttttataataggagaaaatatactcttcacaatgaaattcaaaagccaacattacagtcaagaaacaaaagccaacatttttaaaagctttttccaactcatcatatgattgaatcaaatctcttataccaatatctcgacacctttttgagatcctatagaaatttattcaacctgcatgaaaaaaatgcagttttcacattcagctactctaaatacaagtcaaatcatgtagtacagtacacaagagaaactcaaaccattgtgagtgagtcaaataattatctataatactttgtttaagtcaattgttctctctaaaaaaaatcaccacttatctagcacaataccaatcgactacgtcattgccatcatgttcgatcttgtagactcatttgttttagaaggccttcttttttgtggtagtagaacaagatccatgactttgtttctatggtgaccttcaatttcgaattcattgaaagttgatggttctccatcctttggtttggttagtagacagtgtacaatatttccatccaatatacactcttaagccaatatacactccaatatttccctccaatgtacactcttcagtaccatctatatgtttatcacacactagatttatttttctttctctttctttatatctcaaccatcttagctctttgtcataaactactcaagaaaagcctaaacctaatttttttttttttaaaaaaaaatcactctgtaacgaagcttcaatcaaacgttgttgcgtaacatacctccctattagttgggaaacatgtcaatgagtaccaataatgcataattgaaatgagttcgtatctcaaagcaaatcagtcaagaaaccaaagccaacatttttaaaagctttttcgttgcatttccaaacacaaattatcaataatcaaaattcaaacacgagttgcaatgggcacgttactaactaaaacagactgacaatatcaaaattacaaaacggttttctttcgagaaagcgaaaaatgtatgacttaatcgaagagaaattgaatgatagcaagaacttgaaacagaaatttaaatattcataatataaaatcataaaatacacacacacatatatatagagagagagagacagagaagctaacagtttcccaataattgcgccgtcgacggtctaagacagaagtggagtgaaaatgggcagccttagaaaagtaacaggaagggttggagttaaagagagcagctttaatggtggtatgtctgttcatttccggtggacaatgggaatgaagtgtgaccgagcgggattgggaggaagagaggtgatttagctttccaatcgcagcactgaagccaagctacgtgttgactattgatccaggtccacccataagcgccactgcacggaccttctctcttctctgagttccctcttcctaaatagtaaatatatatggaataaatttgggtgtggctgaatg

SEQ ID NO: 43098 - DNA, 3596 bp, Cannabis sativa
  modified_base (193)..(199): a, c, t, g, unknown or other
tataattgatgccaaaaagtgattgtcctttattgacattttcattcatacaaatacaaaacaaaaatgatttcactacaaaaaagaaagaaataaagaaagaaaaatagagaatttctcaccaccacaccacttgcccaaccaaacccttttgcctctatagataagatcaaatctctctctctctctctcnnnnnnnctctctctctctctctcttacaagttcatttgtgtcgtttctagtaaattatatgcatacaaatatacgtatacctaacctcactatcactattcttatctttcccaattcttatttctttcccatttcaacaaaactttacaccaatcacacattagttacacaaaactaatgcaaaactatgaaaagaaatatatcaatttacattttcaactataaatatttgacatgaaagtgtgtactaaacttagcataaatcttttgtaaaagtataagattagatggagtttatcttcatttagcttaaaacactcctttaatttggggattgagtagtttttggacgtttttgcccctgaattttggtttatattttggccaatatattggtgatgaaacaaaacaattgatgactagtccagttgatgcctaataaaaacaactaagcattaagtcacactttgttttaacatacatattataaccaatagtaccaacaaagttagtaaaacattaatttcaaatggtgtgacttgtgcctgcaatgaaattattattgtaccttatctacttctccatattaatgcaattggatatatatatatatataatatggtacgactaaattgataccaaaattaaagaagagtaaaaatcatgtgtattgatatatgttagtggaattataattacatcagcaagagtcatgatcattccaaaatttatatctctatacaattccaatttccataaaagagtagctaaaagacattatgatctacttgggaagctccaagagcttgaatgacactccaagaaatagaagcactgtatataaccaaaagccctattccaaacaaaccttcaagcctcatatctttccttggcaaaatcaaaagtgcccaaatcaatgctgcagccaaaaaccccattgtttggaaaagtgaagggtctcttgggatgggcacaggtgaagggtacttagaccaacaatacccaactaaggataagcctaacccaaacaaaatgttgaatatgggaccagcatagcagcctgagaatgctatttgagccccttctgctccaccattcaatgccattgtcaaattggtcactaaatctccaagtgaattcccccatgccagaactgtgagtcctaaaatagaagggttcacaccaaatatgtaggctaatgataccaatagaccaaccaattcttgtgctatgatataactccaagtcacactcattaagaaacctgcagttagccaaatcagtatgcatctccttggtgggcttgacttgtcagttgtcagatatgaaacaatcccaaatgttaccccaaacaccaccccaactccatacaccacaaccttcaatgtcttgccatcttcaatttgactgctccaaagggttgagaggagtagtggtgatagagttactgaacccactgcatacccttttgaccaattttcttcactaatcacaggaatggtaagtcttctaggcaggtaaagaggtaactcaagtatggaaagaaaggcaccacaagagggtgttgactcactatttgaatctaaacaaaaccatcttctctccccttcttcctcttcatcaattggagtattaagctctcctttctccatattttgcaagattggaatagctaagtcactgccattgtgagttgagtcaacaccaccactcaattcactatctttgttattggatctaatatgcaatacataaaccacaactacataagcaatataaatggagaaaaagctcaatgcaccccaaacatctaattctttctgaagcaaaattacaactaaacaaagaagaaccaataagaagaagaaaacatccctaaaaagaccatgcttgttaacccttacacatttactcctcactgcaatgctaataactccaaccacaacacatgaaacaaaagaagctccacccaacactgtgttgagacccacttcactagtcccacctcccatgaaggagacaaggcttgagaaaacatcaggggcaccattgccaagagagagcagagtaaccccagctattgttggggacaatttgaagagcttggagagactctcaagggaagaacagaagtactcagatgctgtattacccaaaacatagaacaacacaagaagccataggagaagaagggaatctcccagaaagggaaagttcccaaatttgcaatagaaaaggtaaaggtagtcaatatagccttgttcaacacaagggttgttggattttaagtacaaacacttagctttatagtcagataaagcgtgtaagccctcgcagccttgatcagctgtggattttaggatctgtttattactatttttgttgagaatcagatgagatggtggtgaaagggagtggaaatagagaagcgcaaaagcagaacagagtatgaggaaggaaatgtttaagaaaataacatagtttttgagtttagacatgaaaatcgaagtacccattagaccaaaaccaaaaacaaagcaagtctcatggaaaagatgaaaacttgaaatagttaatgagcaaagaattgggaagaaaaataagaagaagaggcatgggatgggaatatcaaattaaaaatagaaataattaattaattacgttccggaaaagttggagaagagaaataagagtagaaagatcaaacctttctgtgaaaaacttggagatgggattttgaattgattttggattctgtgtttgtgaagaaggaagaagaagaagaagaatgaagagtgaaatgaaatgaataccatatatatataagaagaaagcatagcctctcatctcatatattctcaagtctgtgttataaggcattgtagattccattaatgattccttgaattagaagaaaaaagattaattaaataataatataaaacgtggttagatgaaaaagaaaaggagaagagagttacagttgtccatggtgaatgagaaagtgacgttgacgtggtccgcgtttgttgacaattgacaagacaacgttactacacattactcgaacgacaacattaaaactaaccataatgctgtcgttttcttcttcctcctctcttctcctctcctttgatgtattattgttttgttaataaaaactcgaaaaacaaaaacaaaaacaaacagtcaatgtttgttctttgttggaagaagaagaagaagagtgtttttgtttcaacaatatattttttgttattttattttattttaggaatgatttttaataattaaacctttaatattaaaaactaaaatgtcatatatatatcttgtacgaataataacgcgttttaactacgcttttaattactttctccataagaaattttgttgtatgctt

SEQ ID NO: 43099 - DNA, 2187 bp, Cannabis sativa
ctaatgtgtactcttttaacataaaagcaagatctctcaaggtcaaaataaatgtaagcccacctataattttagtcaccttacctctgtctcaccagcagttgcagctatggaatgggcaacttccatttctctgtcattctcaagatatcgtgctcgctacacaaatatataaacatgcaagaatgagacagaagaagggaattatataggtacacatgatcaaatgatgaagtaaaggatagacgaaatagaacctctaatggatccatgctagcagtagatttgtaaaacttgtctaaaaaagatccatcatctgaaaataacaacaaagcacaccaaaatagttggtatgataaacaatcttgaaacaattgcttatataagtaacgattcattgctattaagggatgagacaaaatgcgctactcaaaaactaggaaaactaaccctgcaagtattttatgtgattttggtttttaaatgaagaaagtgtattccaaaatagttttattccaatcttttgagttattctaaggtcaagaaaaaatatgtagacaaattcatcaatttgaaggaagttttgcggagaagttctgacaacaagcatagttgttcaaagtgtttcgaactatttgaaacagctttgaacaagtctagagtaggataacacaaaattagatacatttataaatgcacccataacatttaaataccaaaatgttaatagatcaccatatgaatatgcaggcaaaatctgtacgaaagaaaaattccaaaaacgaaacttactaagcttgatctctgaggtgatattggcaacagcatgcagaagtccaatggttccacaagcatttcccacagtttgtttcataaaataaactttaccatgaggttcctattaccaacagaaagattaacataaaaccaatttctaaagctaaaacgtacattaatgttaggattcaatatcaacaccacacacctttatttcatttgcctgtagcattctctcttcttcactctggatacaatgaaaaaatttgaaatgagtccatcctcccgtagttaagaaaatcagaaattaaataaacaaagttataactgatacctgtgaggttataggataaaggaatagcacggccagtacaggctttgggaccatttctaagagttcttgatcgaacccataaacatcgtagcattctgcctcagtatcaggaacaccaaggccccataggaactgcatcatgaaaaattcaagctaaaacgaagattcttctttctttttctactaaagatgacattttgaaagcaataagcaaaatgagaagatcataattttataaacaactataatggggttgaaatatgcttcatttattcataagggtttattagcatagatatctttggaagattgatacttcaaaaacgcacaactcataagacgaaaactctttcccacacaacccttaatttattctttaattacctaatccaagctaacttcaccatcaaaactgaagggtcttttctttttcctcaattcattttctaagtttgactaaaaatccagaaatatatattttcaatttttttttttttttgaataaacataaatgcactcttctaagaagacttcgtagcgaatttcaaatgatcgaagtctctttcatcagaggagttgagttgaagaagttctcgaaatttaaatctttccaagcaattaaagtaagtttcaatcgtttaacaatttcgattcttcatctaagactcagaacgcacacacacacacacatatatattatataaatatatacatcataacatggacgaaaaattgaaaaagaaaattaaaatcgaaatcaaagttgcagagataaaatctggaaatggaaaaataaatatataaataaaataaagacctggttcatgacatcggggttagcttcgagaggaagccacctcttagcagcaggagtttcatccaaagtagccattgttggaagatgagagagtgtgggtttggtttttgtagggttctgaagatttgatgaaaggttaaggaatcaggtgagttaagagaacaagtgtcagtcaagtaatctcatttttcttttttatacatatttatatgttatggatctagaaactttctcatttgtcatacaattaagcccatct

SEQ ID NO: 43100 - DNA, 4113 bp, Cannabis sativa
aataatcacgagctcaatggaaagggagttgagtgaaggagaggatctaagaaattaacaaaagtatattctcatagtcatatgtaatgaccccaaatcatttacaaacgagaacattcctttattatttataaaatttttgggatgtgattttgtcccgtaatgtacggaatgtattccgtggtatattagataggacttagggtacattaaatgaatgtcaaagtacgtttttactttttaaccctaattacccctagatcaatctcagtcgtcagatcaaataactctctcatctgacggctgtcgtacatcacggattacaatccatgaaagtacaataacgggacaaaatcatatccctaaaattttaatagtcaatatgaaaaaatatggtttatttatatttctaatttttctaaacttttattttattttggtcatttgaggaagactgaatattttgttttccaaaacttgttgccactagttctaaatgatgtcctaggaaccttatcattgagaaaatgggaaaataaaaacaataatatttatacttttgacaaatatagccaagattaccaagccatcccatgttgttaaagaaaagaaaatgactcaatctgatattatatatatagagtttaataaaggggggatgttacaaccttaataactcattgtgttatcaaggcacaacagttctgcatatcaaagaccactacaaaataatgatacttatagcaacaaattgttatactggtctttcacatatattcttttttttttcactaacttgtatgaagaaatgaaaatatggttgcaaaattctttcacttgaacttacacgctcaaaaggtttgttcacagtttaacatggacatgttgtgacattccaaaattaaaagaatgataatacctaataagatacataaaattttcccaactgtgaacttttgcacatatcactataaacccacaaattatgtgcaggagctgtgactttgcagaataatgtagatttcaaaccctacactattcagatatcaaccgctcctagtcgaaatcgcagcctctcctcctcgatctgcttgccttaaagcctttgtaagttctcgtgcactctgttagcggcaggaaagacacaataacaaagcaattataatgaattcaataatctacaaaaggttcttaggtattcaatactttttacacttaaaggacttcaaacttaaactgtcagattaaaatttctctatagtagaattctataagcatagtgaaggccaataatcattgcaaaatgatttcagaaagattaacaaagtaaataatagagccataatcttgatacaaattttaagtacaaattttgttaaggacagaactttgaccaatttcagacagacaaacaaagtaactatcaataaaattataagaattttgcctagggtagaactttatcaaaatcattacatagataacaaaagatatacttgctagaggaaaaaatgacgtcgtaaaattttaatgatacatcatctaggcagaataattggttaaccaaaactttgggcaatttgtcatgattcccaaagacatacacaaccaaacaacaaacaaaataggccaaggagaagattctgagaatataaacacatgacccaaacaagaaacaaacaaaacatgggtatacagagattattcctaagagaattacacataacaaaaaccagaaacaagcaaaacatatgcaagagaaatcaaatcacataagttattttgagtaaaataatccactcataaacctggttcatgccctttcaacagaaaagtgtatcacctaaacacgatgtacaacaatctgacttttactacaatattttgatccttttaacctttaaaagtaaaaataccacaatgcacaagtatactactgattgaaattggactaacaatttagggtatgtttggttgaatgtaatgaaatagaaacaattttcatttcattcatttgtttggttgctctataaagctttggaatgtccttaaatggcttttctagatgaaagatcattccaatacacagatattaataaattaaattccattccattcctatttcctttctctttccattcctattgatctgttttcaatactcccaaccaaacacacccttattcctttcaaccctaatgataactggaaagtggaaaggaattgcacccaaaatgtctcaaaagcctgagttttctactcactagtttataatgtatgcataatccattactgagcctaacccaattataaaaccataaaagctgctaatctaagtaatgctttctgatttttgtcaccagattcaaaaaaacaaccgttcttctataaacaaaacacaatcataaatcccacaaagttcaataaacatgaaattcaagatcctcaagtgccaacatagttaataaacgataattcgagctaattagttaagagttctaagcttaattaacagcgacttctccattaattcaaacagcattgattactaaccgttgattgaacaggaggagggtcaatattaatggagcgtacggacattttagcgatctctgtaatggcagcctccctaacaccaggtgcatcactggtcaaatcctcataagcagcttcaaacgcctcttgccaaaactttggtaatctgatccgacggctgttggtgtacacatcccacatatgctttaccaccttctccctctcctccatttcctaaacccaaaaacctaaatcaaatcagagatccacaaacacaaacccaagatccaacacccaaaaaaaagaataaaaacaaaatgggggaatactaacaagaacatcaagatcgtcatgaattggggtatcaaaatcatcagtgatacgatttagattaccggcagaccatcggagagttacggttccggtgaacatagaccaaagtgcgagcaatataatggcacccaatgcccaaaacttgtaccttcctttaccaaatgactgacccgaatccgaactttctttcttggtggtcgccgtcgttgtcggaaggccatcttcgtccttcattttccgataacgatatatacagaaatatatgaacagtaaaattccctattttctgtgtaattatttaatactatttttgggttcacaacgttcaattgctgagatttgtagaagaagaaaaatggaaagtcgatctgatacgaaagggagagagagagagaaagaaagagtgtcgctgtgtgatgagaaggatgaagaagggttatattcgaaataatattaatttgtgggggccactatgtaaatattatattgtttttaggttgaccttgaatggtgtgtttatggcttgatgatctactgagcgtctgagatagaattctgacccttggattttaataccttgaaaagtattatttaaatcttgatttgacgtatgtcacctgttaacagtactgactccgaaggctaccgacgctgtacgacgtcgttattgtctatatcttttgttttaagaggatagaaaagagttgttaaataacacatgaataaataattatattaaattcataaaaaaaagcaaattaaaaaaaaatgagttatttttacatataatctcaaaatataatattctattttctttttcatttatattatcttaagctactccacacctaaaattactccaatattgagcatatctaaaaaaaaaaaatacatttatgaattcacacatatcattatttaatatatctttcattttaatatatcattcaaatatttaaattattaaactaaaaaaattcaacaatcacatgaaattggttgcaacaaagctacggtagaagcttcaccaacccacaccaatacataagccccgattttaaacgtgccttaaaaaatttcgtgtatttttatatgagaattgtcgatggtttttaaccgtcggtaattcccatgcttaaatttaatacgttttaaatttaaaattttatttttcgcctcttaagatataccccggcccctccccaaaaaaataagatctcatttttttttaaagtaatttgtaaa

SEQ ID NO: 43101 - DNA, 4940 bp, Cannabis sativa
  modified_base (1588)..(1599): a, c, t, g, unknown or other
cggattggatgttgtttgactaaaaaagtacagattggatcggatgaatacccctaattattagtatccatatatatatatatagtatacaattgatgaatcattccttttttccttattcagtcgcctctacccttttaaacgaaataagattcatgctacaatagtctccacatgcaccaatataagcttagaatgtaatataattcttacttattttaggtacttataaatcaatatagattatagaaggtaatagtttacacatatatattattttcttcatctaaaaattatatatacacctaatgattaatttagtgcaatatttaagtttacaataatatacaataatttttactaataattactttgttatatgtatgtattgatgctttaatttctttatattaatttaaattttcgtgactgattttataggtaacttattgaagaatcttattcaacttttttaattcactctttctattttgccttttttttttcttttctcttatttaattttttaaattaattaattaaatagaaaatatctataacaacaaaaattcataacaaatctcacaaagctctctttttttaattaataaaaaaaataagtgacctaatagtctaaaatcactctaaatagtttaatctattcttttattaattctcttatactttttttttttattttttattaaattgataaatattaaccaattaattaatctactaatcatcaatatataaagctaataatctgtatatctatatatatatatatatataagagatataaaattgtgacatgttactctaagatttctttaattaatattatttgttttttcttaattttctcattttttttttacatatctcttcgtttataggtctctctcctaccgaatcttgacatattctattacaaggaaagtcgtcgacaaataattaaattaattgtatatctcgatttaatatagctttacaatttttaatttttgtgtgtatcaaagatgttggatttcatataattttttaggatttcatattattataatgatcttcttgggtttcataaaattttatgattttaaatcctataaaatactacagcccatgaagcgcgatttgtttctgagagagaaatcttataataggttttattcagctaatgaaatatttcaatatcacattctaattttttatttataataatttttttggagcaataataataaggttgataatgccataataattgtataaaaaatcaaattgaaaaattcaaaatatcttaattttaatatctcttttctaaaacttatcaagaattaaatttataattctctttaattctctcatttaaatatccaattaatactcggtatttaaccacatctaatttttttgttatttaatttttaaaaaatatctctaacaaattattctaaggacttaattaacatttaacctttaacaataataataaattaaataactaaccaaaagtgctaaaatcaaacgtaatgattaggaaattattttaaaattaaatagttttaataataataataataannnnnnnnnnnntaataataataataataaattatctaaaatgactccaaatacttttatttgctctttctttaatttttttcattttttattcatattaaaataattaattgagaaaaatatttatgaaaatattactatttatctatataccgacctaaaatttaagatatatatacacacacggctctttataaatttttcaaggaaaaaaatctaaaacaaataatattatattaataacaaataactaaaatattttaaataaaagtaggaatacgattactctataataataacaataacaaaaataaaatatctatctatatattacaactaattatttttttaaataataatataattaaaaatatatatcaatctatatatatggtaataataatatcctactattataaaagtacgataatagtgtcataatcataatgataactttacccttagtgaaagtaaatataatgtaataaaaagataattttgtcatttcaaaagtcaaaataccaatatttagtcaacacttaactctctctctctctttaattaaacaagtacagtacttacttttgatattctataagcttagtcaatttttttaaacactacactatattattttatctaactaataataagtgtgacaaatatgaaaatatacatacaatcataagcaaccatttataataaaatttgttgataattttattatatatttataatttttatcctcaaaattattatgtgagagagattatttttacatgccttaaaaatattagtttttttttttacttaatatataatctaataattatttttgctattatttatttaaatttactatagttgtgaactaaatttttaaacacattttataaactaaataaaagttacatagtttgatagatagaattgaacaaattctctttctaattttattttaaaaaaaacttatctcaatagtatataattaaatacatatttttgttctaatatgtattttgtcaaaaaaaaaaaaagttatgttttattttttatttacttaacttttttttttttgtgacaatactcttttaattttattttcgattgtaaatttaagacgcctgttaaaattctaccattaaaagttagttgaattttcattgtggacacttttgtatgcgaaatatattttcattaactttgagattttagcagcacgtatatacatgtgtacacagtgacaattccaattaacatttaaatattaaatttaacttgttcttcaaatttgtaagcagaagtgaagttaaagaagtgttgctacaaaaaaaaaatataacaaagagttatgtgtataaaaactaaaacgtaaaagagttttggtcgttgattatcctaataaaaaatttatatgtttccataagttatcttgaattcggatagagaatacaataatttttttttaaaacaaaaaaacctaaatgtatttttcatttcggtgaaagtttgaattatggtaaaatttgaagaaaaaaaattattttagtgatggactctaatttattacataacacaaataaattttttaaggaaaaactactactcacatgcatgcttttattatataatataatgcaacttgatcaatttcaacaacaatattattaattataacataccacactataattgttttgttttctctcaaatagtcaaattaatcttcttattccttccttaataatttaataatttaattaattattaatctgcttatctcttaatctgtccatacttataattaataccacgtaactattattcttattttattttaactttttaacaaaagaaaaataaattatgtgtatcatttttaaatgttattacactaaaaagcattgtgaacagttttttaaaaaataaaaaaatactgtttaaatttttaaaaatttaagaaaaatactgtataaaataaagtaatcaagaaaagtcattattatttattatgattgtaagaattaaattatataaatttttataataattatttagaaaataaaaattaaataaacaaaaatgtaaatgaaatagaataatgagagccaagcacgtgcatttgtacttgcatttgtacgtccatatattataactaactataatatatatgtgttaagtattttgaataacttttctatttttaagctaggtattaaaaaaatgagtgaaggttcaaataatgagagacaccactcaaattaaaattagagttagtattggatttgaatttgaaagggaagattcacataaatatatttgataatctattattaagtaatcaagattcctgtgattcccacttctttttctttctaatgaactgatagttccttcaaaaaaaaaaaaaaaaaaagctactaattttagtaaacataaagtgacaagtttgattttgaatatagtaacaaattttaagtaagatacaatgatcacaataggtaagataacgagtgagatacatagaaaaattaggtgaaatacctgatgatcaggtgagatacaatgatgataacgaataagatacaatgataacaacgactttaaatgatcgagatagaaaaataatacattatgaagaacactttaattttttcctacactatcctattttatttattgttataataataaatttttaacaaacaaaattaaaagtataaatgttaaaaatattaatatacattaatttttattttattttatgaagttttactttttcaataaataaaattattaataataaggtttaattagataatataattttaattagtaattttttatttattattttaatagtaacttcatcggccgagctaagagcggctatattatctagtatatatatataaagaagagatataaaaggtgacatgtcactctaaaatctctctaagtagcattgtttgctctctccttaattatatcatttttaaattttttattaagtttataaatattattgattattcaaataataaaatatttatataaattaaaaaaaaaaaatcattcgtcttcttttaaaaccccacacacacatatataaatcacatatgctaacgtatttttttataacttaaatataaaagtaacacttaggattctcattctcatgaaaactacacatattctctcttactcattctaatgcactttgtcattttaattttttatctcttacttgcttaccaactaaataagtatacatatatatttacattttcttaataagttttaattgcttaccgtgaatttaatttagagattttttctattttagatttata

SEQ ID NO: 43102 - DNA, 4279 bp, Cannabis sativa
ttatttgggttttctttttattgtcagtaattatctgggattccttgttcacatgtgttttgtctgggatttcttgctaacaaaccaaaactaatagattaggtctgacttggatccattcttgtaggtttactgccagtgatggaaaaaagaagctgaaaggaattctaccatcacatattactcctcaggttatctcaggagacattcagaatctgggtcttattcgtatccttgattattctctcaatgacattccaagcaaatcagaaaagtaagcaaattccagatcccttttcgaaagttcttaatttggtgttttgttcttgttttaatctgggctgtgtgggtttttcaactcaggtatgtaattgttaccaagtgtgagacagtttctcctccacttgaagtagagatcaaggaagagatcaagagtgaaggggttggcattctcttgaaacctaaacaagaggatgagatcaagagtgaggtgaaaagagcggatgctggtgttttcttgaagcctaagcaggaaatcatttctaaatcagctgctcaaatcgttcatgagcagcatggaaagtgagtttttttttttttttttatcctttctcccgagtacttcaccatgtcacattttcttttggttcaaaacgtgtaatgctatgcggaaaatcttgttgtgacgtgtgcttatgatttttattttattgtatatttcagtatggctccagctggacggatggccatgacacgcagagttcatccccttgtttctttgaatccttatcaaggcagttggacaattaaggtccgggttacaaacaagggtaacttgcgtacatataaaaatgctagaggtgaaggctgtgtgtttaatgtggagttgacggatgaagaagtaagcaatcttttttgttttgctatatgcccaaaattgtgtaactggtccagtgcttgattttgaatcttatgctaaattctgcagggaacccaaattcaagcaactatgtttaatgaagctgcaaggaagttttatgataagtttgaattagggaaggtttattatatttcaaagggaactcttaaagttgctaacaagcagtttaagacagtgcaaaatgattatgagatgactttgaatgagaattctgaagtggaggaagtaagcagtgaagcagcatttgttcctgaaacaaaatttaactttgtccccattgacatgttgggtccttatgttagcgggaaggagcttgttggtaagaatcccttcttgacgttgcttttgaattcatgatttccattaatgatttatctaacatgttactgctgttgcatgttcagatgttgtaggtgttgttcaaagtgtgtctccaacaatgagcatcagaagaaagagtaacaacgaaactattccaaagcgtgatataacaattgctgatgagaggtaaccctcaatactccttcctgactgtctattattgttgctaacaatatatttaattctatttctgccaagatgccttacactgcttaattgaatgcagtaaaaagacagttgttgtttcattgtggaatgagcttgcaacaactgtgggccagcaattgttggatattgctgatcaatctcctgtggttgctattaagtctctcaaagttggagattttcaaggtacttttaggtttcacgattgaagactttccattttggcagtcattcagtaattaatgcaagttagaggtgcctgtgcttagtgtcatttgacttctcttgcaggtttgtctctgtcaacattaagcagaagcatgctaatggtaaatccagatataccagaagccaagaatttgaaatcatggtaggttactgttgcgtaagttattggtatatctttatggcttcttgtatttactgattaatatccttgatttgttttcaggtttgattctgaaggtaaagaggcctcattggcttctgttggcagtggtatgagcccttcagctaggaatggagcaagatctatgtacagtgacagagtctcgctgtctcatataactgaaaacccatcattaggcgatgacaaggtattatactgttatcatttattctttactgcaaaacatataattatttagcttaggacttggttaatgttattaaataatgacatggatttgtctctttgtagcctgtttatttcagcatcagagcatatattagcttcatcaaacctgatcagacaatgtggtatcgtgcttgcaaaacctgtaacaagaaagtcacagaagctattggttctggttactggtgtgaaggatgccagaagaatgatgaagagtgctgcttaaggcatgcctactcatacccgtccttatagtgatatgtcagtacagctttattgtggttcctttgacttgctaacagttattttttctttacagatatattttggtgataaaagcttcagatgcaagtggtgaagcttatgtttctgcattcaatgatgaagcagaaagaatcatcggctgttcagcagacgagcttaatacactgaaacaagaggtatttcgtgttctgaaaatttctacttagtttataagccttaatatgaaaaaatgagctgatttaatattttaatcttaccattttaggtgggagaggacaacatgtttgaacaaaaattaaaacaagctacctgggttcctcatcttttccgggtcagtgtttctcaaaacgagtacaacaatgagaagaggcaaaggttaacagtcagggccatagctccagttgattatgctgctgaatcaaaatttttgttagaggagatatcaaagatgagagcttgatgataatgttaatttggttatctaatgaagacaccggtctttaggctttagcttatatacttttcccgtaagattatggctccattttgcacatttaggggaagtctattttatcataggattttgttgtgtacctttgcacagttcctgtctaatattcagatcaaaacaaatggttagcgcgtttgaattctagttatgtaaaaatttattgattttcttaaattttctatctttggtaaagatattgcacatgaaatgataattttgtttcaccttagaaaataaatgtagtaaagagataataatttctatgcgacaaatctaatgatttacaaatcacttcaagatattacagaacattatccgtatttgggaagatattaaaaatagctaacgcaattccgaactataaactctatcctctcttgaagataattatttacttatttttattcaatcacaatattaaatttttatatttttttatttataaaaacttgtgcttcattagataagtggtaagtaatataaactataaagccgacaacttacatggaaggtaaatgaccattctaaactaattcattatctaattctaaacttagcttagcaactttatgagccaattcatttgactccctaccaacatgactaatagttcagttcggattgaatgataacaagttcttaaaacaaattattatatcattaagtggactactattccagctacaagatttaagtttatccacaatggttttacaatctgttttaagaacatctacgggaagatgaacatttgaacccatggcataaagaactgcctttgctttagccacgacaggaggaacacttccaacaaagggtcttgagaatcctgcttttacttggttcaactcatccaaaacaaccctaatgttatgtttcctgctttggagatcaatgactgcatcagtagaaacctgaaaaattatccttaaaagagcatgctaagagcctggtatgcatagtagtagaaacacttggctatgttgttgtgcatccaaatacttgaagaaaaagctaacacaccagtcaaaaacctcatcagcaagcatgacactatgtctataaaaaacattatttctctgattccaaagagcccacaaaaagcagtataaaatacaaacataatcattgtcaagaacatctgtaatactcattaaaaatatattaatatcaatgtgtttataattatagtagtaagtcacaaaccttgaagatttctaagctttcctcgatctggagcattccaacaaagcatgctaaatagtttctgggcaaagcttgcaaaggggacaaatgggagagtcaataacatgtttctgaaaaagggaagaggcaacaagaatatcatttgatacaactctccagacaaagtgttttatttttg

SEQ ID NO: 43103 - DNA, 2538 bp, Cannabis sativa
taatgctaacaccattataacataataacgattctcttattattaatacttctttttttttttggaaagaattattaatacttctttgataacttataacatgcgtataacaaaatttgtcatcatatcataaattaagtctttttaataaaacattaaatataactttagttacattgtagttactataaggttaaaagttcgtaattaatgtcaaacaaagaaaacaccaaattgaatttagtggtgtaataactaaagtacctcttaagtaaatacttatttattacacaatgtaattaatatctatcaattgatttttgcttctacatgaatctataaataaccattttgctattccaacttttcttcaaagtctcatatagattaattcaatatgagtgattccatgatgataagtacccaacaacatgagaatgagttatatagctatgaagatcaaaacaaggaaaaagagtcatttgtttcccaactccctaaaaccaaaggatggttaggatctaatagtactctttgcttgtaccaaaacttttggtgtccaccaacaattgttcccaacataatttcattccaaaatcacttccaagctcttgatcaagacataattatagcctcaaagccaaaatcaggcaccacttggttgaaagcccttttgttctcaatcgtcaatagagccaacaccacacttgccaactcccctttgcttagttctaaccctcatgagcttgtacccttttttgagtttaatttgtatacaagaaaccaaaaaaatccccctctaataaaaaatattccatctccaagactattctccactcacataccttatgactctttaccaaaatctattataaaatctcagtctcgaattatctatatatgtcgaaaccctcttgatatcattatttctcattggcattttgcaaatcaagctgatgatagtgatcatctcgaccattgttcttcaaagtggactttagaggagtttgtggatgcatattgcaatggtgaggaagtttatgggccattttggagccatattcttggatattggaagcaaagtgtagagaatcctcaaaaggttatgtttttcaagtatgaagagttgaaaaaggacactaaaactcaagtgaaaaggttggctgagtttgtaggatttcctttttctttggaggaagaggcactaggtataattgatgacatattggagctttgtagtttgaaaaaattgaaggagttggatgtgaataaacatggaaaattcatgccgtattttgaaaataaaagttatttcagaaaaggagaagttggagattgggttaatcatcttaattcggctacagtggaacgtgttgaaaaattagtccacaagaaattaaattcttctggtttgatactttaagcttaaattattttacatattaacaaataataataactacataaatgagagaaagatgtaagttttattatcaaccaatatttatttacatgtttggtccatgaaaagtctatatatataacttctatttggttgtgtattgtattagtgtgtatctttaaaatatttctaaaataaataaaataagtatttattgtgtactataccttactagactggatagttttaatttttcaagttttatattttgttgttaatatattatttgctatacttaacaatgtgaatatcagtctcctcaccattgaccattttattacttgttggatttgggcacaagagttagctctctacacataaacatctcttaattagatgcaattttatttatttggatccaaaagcttcgaaagacacaaaagaagttttatcagtcatggtttgccgccgtcaattgtttgaaccgtctcttcaaagacgcgagtacttaacaatttcggttgatctaccatttcgggaggagaaatcgacaaatcccgttggcattcctggaaacaatattggcattggctaatttggtgacaaataaacttctcaatctttattataggattatagttgttgtgtttgttggattaacatagttaataaaatttgcctcatgtcttaagaattaataaataaatacaacagtcaaacatttgagacatgagtcaaaaataagaaatcacatacacaaaatgttttatatgaaaactatgtaccaaaagttgcagaatattgaaagcttattatgtttttcacaagcttccatgctttcatttcctttttgacatcgtcattattcgatataatctccaacaaattatcaattaaacttttcaaaatagtataaaatagatgcaaaactcaattttcatcaaattaaataattaataataacctaccttagaagtgttattacaagaattgttacactctttgcatttattcgtgctagaaactattttcaagttggttatattaaaaaaaaaattgataaaaatcaagtttaggatcatttttataccattctgaaaaacaaagaatcagaattatcatttaacaaaataaaa

SEQ ID NO: 43104 - DNA, 2501 bp, Cannabis sativa
tatatacatgctcaagttaaaaacttgacaagcagttcttgtataatggtctacaattaggcaagcaccatttattaacctatacatcctattgtccagcgtggcattggaataggagtatagtattaattgattcaaactatttctgttacttcaaagacaaatacatgcctcatcctcaaaacaaatcctaaatttcattaagaaactaaacatatttcttctataatgtactagctggcagcttgtccatcttaatcatttacaatgttcattttagtggtaaagttatttccttgtcatcattcatcaaataaagaaaggtaatggctaaggggaaatgcatgatcagacctcttctctactagcaagcaaaaaacgaagaatgctgggatcagcatcatttatgtactcttcgtcgtctattctttcaccttcagcttccactatctctttacacttagcaataagttcttcaacagtttccctgataatcgtaactgcattttcagcttttatttgccttgggattattttacacaaagctttaaccttcaacaaaagaaaacaacgcataatgattaacgccaaagaatagctaaacaagaacaagagaattaagaaccagtaccttccaatatggcaacaaatctgtggaacgagcctctgcctctttcaatgcagtgtaaactgcctcaataactgggctattagcatttagtgaatcgaaattgtagttgaatatagataaaccgataacatcaagtgtcaactgagaaaaattctcctccatgttcactgcagtgccatttagtgcattagttttaagcttctccaccaacctttccgcacacttacaaaacactcggtcaacaatcagggataagtatttcttatgaagtgaaggaaccacagccctgcgccttgcctaaaacgaatcagatattccttctcaaataagagggttaaaattctaattctaattcatatcatcaacaagaagaatcactaagcagctactcaaagtattttgtaaagttttgggatgttgtgctcttggaacttcttcctagaactcaaaagagtaggtcaagtgatcgggtccatactccatagtatgtttccattaagccctctgagattcaatacctcgtaggaactttacaaggaacttagtagcattttatcaaggcactaagccaattgtaataaatctatcatcaattttcaccgtataagatccacaactgaaatgcatgccatcttagttttagtcacacccacgtctcaaaccaacaaagttggatcctctaccatccaaaatgggcattttttttaataaaaaagatatcaaattttggctaacattgatatataaaagtgaaatttgaaccttctctaaagaataaagaaacaacaaaatagcaatacaagaatcacaaccaaaaatgcaagagaattaaactataccaacatgtcaaaataaacaaagttcgattctttaccgtccaaagtgggccttcggcaattgcaaaaccagacccgaaaagaaactccgagacctcagctacaagacccttggcatacttgccataatttctaagaacatgcttagcaatggcggggtcactgaccacgacaaaattcctaggccccgcggcgagcctgtaaatgggcccatactcattcatccacttgaaaagcggaaggaacaaagcaccacccagaagatcagaaacatcatcaagcttagcactggctatggggataccggagtcgtcgcccttgccaatggtgagggagcgagtgagtgaagtgagccagtcggggctgacccacgatttagagttggtggtattgttagtagaagagaacttggaatctgggtccttgtcaatggaggatttaatggagagagaacgagatgatggtgataataatggggttggagatagaaaagtgggcttgagcagaggagttgaaagagaagagaaagaaagcgagaaagacatggttcaaaatcaaaatcagctttgtaaatgagatatattataagagacagagacagagacagagagagggatgactctttgtttttctaatctctgaaccattatcagttatgtatgtcaatgaccgttatcccctctcataaaaaaaaaaaattagctgtttttgttcccatttaaacaagtctgaactattttatttatatttttttaaaaggaaaatggaaatatccattaataatttaattggcaaatgaaacaaagtctattacatcataatatttagggttgctcaaactgcttaaactgttagcactgcatcgcaaaaaaaaatgcggtttgaaaatttttatagtgcggtcgcgatttgaatttttcctaaactatgcggtgtgttacggtttgctgttttgaattgttaatatgcagttcaaatcgtaccgcatattataaaaatactaatttttataggaataatttcacaaatacaca

SEQ ID NO: 43105 - DNA, 912 bp, Cannabis sativa
atattggagtcaaaaaagatccaaaaatatttttatgagctataaatagcaaagaataaaaaaaatatggtacaatgtcatgaatgagaaaatgaattccgtgctgtgcaacaaagtttgggatcttgttgaattgcttaatgaggcgaggactattggctaaaaagattcattaggcagcattaagagacacaaagtgagataaattgttaagagattcacccaaaaagacgggattgactagacgaagagcttttctctgtatctaagaaagatttcctcagaattatctttgcattagttgctaattttagtttagagttgcaacagatggatgtgaagctgctttctcgaatggtaatttggagaagatgtaaacatgaaacaattgaaaggattcctcttctagtgatagtgagcatttggtatggaagcttaagaaatccatatacatgggttaaaacaaacagtctactaatggtatttaaaatttcacgatatcatctttttctttaaatatattcaaagagaatgttgtggaacagtgtatatactgatcagtacgtaggagtaagatttattttcttgcatccaatggtaagagtttgctatatatgaattgaaacaatatcttttaaagtatatttaatttgagatgaagaatatggatgatgcatcttatatcattagtattaagatatatatcgagacaaatactaagatatcttaagtttatctcaacaagttttagaaagattttggttaaatattcagctcacctattattgaggtgatagattaaatttgagtcaatacaaagtatagttttgaaaaagaggaatgaagaatgtatttgtttggaagcttaatatatgctcgtgtattttaaaaatttttactactttttttttt

SEQ ID NO: 43106 - DNA, 2864 bp, Cannabis sativa
gggggctagggtgaatcaaaagaaggattggtaaataaggaaactgttatgggaacagagggcagtgaaaaaattatttctcaacacctgaaccagaatgtacagaggagtggataatacctaaaagagttggtaattcgaaggctaaagggaaacttgttgtgaatgagcaagctactattgagatgacttttaatgtgctacaggaacaggggaaaggtgatggaaaaaggagttcgtttcatgtaggtggagatggattgtaccaatataataagttagaatgtgagggaaatgaataagagggataagcaaggttatatcttgagtctcttaaggttgaataacattagtgtaggtgctttacttatgaataaacataaaaagaataaagttgatgatgtgatggctaaagtgtatcatggttggcattactacaatggtgatcaaagtgaagggagaattctggtgctttggcataggacttttgtcaggtccaaatcttgatgaatcataaaccgtttgttcattgtttaataaaaattgttagtgtacagttggtttttcatgtcacttttatttatggtttgaataccatagaggaaagaatggatttgtggaaggggctctcgtatgtgttattttttgtaagaacttggttaatttttggtgactttaatgctatttttcatcatgatgaaagaactggtagtaaagttgttagctcaaataagttcattgatttagcagcttggcttgctcagactaaggtggaatcccttaagcgtatgggttctaaatacacttgaacaaataagcatgatgggaaagacatagtttactcgaagattgatcatgctttttctaatgaagaatggattgatgagttgccaaatactatggctgatttttagtgggatgtttcttcagatcattgctactgcttgatcaaaactcataaatagggtgatctgggaattaagcctttcacattttataatctttggacgactcataataagtttcaacaagttgttatggctaactggaataaatctatggtttgttttgggttacaaagagtttttaggaagttttttagacttaagcatgccctgaaaacttttgataggaaggagattggagatgttgagcaaagttatcatcaagctaaaggtgagtattaacttgccttaactaaggctcaagctcctccaacagactctttagctcaggaattggaaaaagttgttgcaacaaaattccaaactcagtctgccgtgttccaaagctttttagtcgagataagtaaagtcacttggctttcaaaaggagatgacaacaacgaatattttcatgcttgtattgaaaaaagggagagaggagtacataattatttcttttcaaaatgaataaggagaaactgtagaggattataataaggtggttcatcattttgtttgtcattttagaagttatatgggcagttgtagttcggctactcaaactattgatgctaggtatgttgagaatggtccttgtcttagcattagtttacagttgaatataataaaaaagttcaagaaagaagatgtcaagaaagctatatttagaatatctagtacgaaaagtccatgctctgatggttttaattccaagttttataaagttatgtggaaggatattagggatgagatttttgaggctattcttggattctttgatactggagttctgcctgaggagtttaatgaagttgtaatatctctcattccaaaggtagagatgcctaacaaagttgtggattataggccaattacgtactgtaatactttggataagtgcatccctaaaatgatttgtagccgactgtctaaagttctttctttgctggttagccaaaattagggagttttgttaaagggaggactcttgctcataacattcttattttttagggtttgatcaaaagctatagtaggaagaattcctttctgatatgtgctttgaatgtaaacttgggtaaagcctacgatatagttgattggtgtttcttggaggatttgctaagatgctatcagtttccaaccaaattcattcattgaattatggtttgtcttcgggatacttcttatgtgtttatgatgaatggtagattgcaaaagggttgcaagggagctaaggggctaggacaaggagatcccctctcgcctttgttgtttttcttgatcatggagtacttaactcccatgctgccatttgccgttgatcatgaggatttcagatttcatcctcaatgtaaaagcctcaagataattaacctctattttgtagatgatctcattattttttgcaaagtaaactgaggtttggtgacttgcgttaagaagatttttgaggagttttgtaatagcagagggttgaaagaaaatctgagtaagtccaaggtttattttggaggaatttctagtgatgacaaggctgctcttcttcagattttacagtttgaagaaaggaagtattttctcaaataccttggaattcctatgagacccacaaaggggaaagcaaaggattgtggggtagtcctcaagaagattaaacatcagctgcatacttgagctactagacatctctcttatgcaaggagatgccaacattaactcagttcttttggggcttagaaattattggatgaatattttgttgcttcctcaaagtatagttaaggagtttgacaagctttgtatgtggtttatatgggggaacaatggtacaagaagttttatgggggaacaatggtacaagaagtaatttccatcttacttcttgggctaccatttccttatcgaaggctcaaggtg

SEQ ID NO: 43107 - DNA, 2401 bp, Cannabis sativa
taatgatcagaaaaatatgcgaacgttgtcactactcatcccaaaaactctggtctgttgtagtagagaaatgcacatgtggactccgcaatctaatttctctggaattacttgtgttttaaatgtcccaaatctacatatacttatgatatatagttcacattaagggctctttttttccttttgcactactcaataactttctgaccttcgaagtttgtaaattagacatgtattcttgcattaattttacctattattactgaaataattgattttgtatagtagacattatttattgggcattttgatttttacatattttccgaatccaacaggaagttcatgctgcttttgtttcatttaagtcacgactgggtgctgcagtagctctgcacattccacaaagtgaaaatcccactgaatggatcactgagagagctccagaacccaaagatgttcactggccctttttttcggcatcattcctaaaaagatggatcagcaagcttgtggtgattgttgcatgtgttgcacttacgattcttttccttattcccgtagttttagtccaaggtctcactcatcttgaccagttagaaacctggttcccttttctaaaaggcatactgaaactgtaagtggaagattttaattcattttgactttaattaaaactatactatactttcatcgaaaccatgcaatgagatcctcaacaaagactcttttaatgatactggcaaagatgaccatatatagaaatttgatatctttgtgtagaatgggtttaatgggtttaaggaggtgtctcttttatttagatttatatgttgctagttttcttcttactcttccttgtctgaaaacgattacaaagaactcccaaaattgtaacttgtagttatggattatattgcaggctgtaggtattgattaaattgcagttgtaggtatctgtgccagtgtagattgaatttgttgattttatgcagcctgctcttgagtaaagcatgatattaatctgtgctatattttaaattgcagaacggttgttagtcaagtcattacaggataccttcccagtcttattcttcagcagttcttatcttttgtgccacctaccatgataatcttatcttccatccaaggatacatttcatttagtcagatagaaaatagtgcatgtaagaaggtactctggtttactatatggaacattttctttgccaatgtactatcaggatcagctctctatcaggtcaatgtctttcttgagccaaaaaatattcctaaagtacttgctgaagcagtaccagcccaggtgagctttgagcaattataactttttttatatatacttgcattggactccaaattctcgaatgtgatttcccttcttttatacaagaaagtattttgctttatggtttctatgctgggcccctttataacactgatttaagtgttagatttccagaggaaaataaattaaatagaatgcaaattaggcttagcatactctaaccatataatggatacactccattattcttctccttttcccactccttttggcagtcttcaaaatgatatttacaaatattgaagccattgtatgtgttttgacatcaggcagcatttttcattgcgtatgttgttacatcgggatggaccagcgtatcatcagaacttttccggctgatgcccctgctttgcagttatataaagagagtatttgcagcaggaaagtctgatgatgaatttgaggttccatcaatttcatatcacagtgaaattcccaggctcctcttctttggactcttgggtgtgacatactttttcctagctccacttattctaccatttcttttggtttactattgtatgggatacgtcatctaccgaaaccaggttagtaatgtgtctgcttttggctgatcattgatgttgttttggatgaaaacaaagctcagtttctgcaaaatgtctctagatgaatcttcctagtttattaatggtaatggtattttcattaaaattgaaagcatgttaggatctttagatatacacaaatggttcccatgttagttcacacataacgtggacaggcccaactctataagctgaatgaattattggtagttaattgttctggtcatttttgaggatagatgtgttttgacttataataactctgtataaattgaatgaattatgggtagtctattgatctggtcattttctgaggataaagtgtttgacttataatcgattggtcttcatgatttttaatacaacgaaggataaaagtgcatttgtatggtctcttacttcattaatcacactgaatctgagaaaaacaacagaacactttatttaaactgattcgatgctaata

SEQ ID NO: 43108 - DNA, 5632 bp, Cannabis sativa
  modified_base (4070)..(4076): a, c, t, g, unknown or other
  modified_base (4142)..(4152): a, c, t, g, unknown or other
taagcgggctttacaaaaacattaagcagcctcaacacacaacctgcttctctatcatttgcacgacagttaagatagctatcatctgtaaataacatatgtgaaatgataggcgctccgtttgccactttgcaaccatgtaattccccttgtctttcaaactttttaatcaatgatgtgagaccctcagcacacaatagaaacaggtatggagacaaagggtctccttgacgaagaccacgtgcaggagtaataggacccatctcacgaccactattaacaaccatatattgagcagatgtaaccgtggtcagcaccaagttgacaaaagggtcttcaaaccccaacttcagcatcatcactaagatccaacttcagtgccatgtagccttctttcccctttcttttgtgtttgagataatgtataacttcaaaagcaaccatgacgttgtcagaaatcagtcttcctggcacaaacgcactctgagtatcggatattacttggggaaggataagtttcagtcagttggcaagaactttggtaataatcttgaaaatcacattacaaagggatatgggtcgcagatctcccatggttgtacgattcttctttttggggattagaactatatttattttgcacagagcattaggaagcatacccgtatgaaggaaagtttgaacctgagtgaccacatcatttcctaccacactccagtatttttgaaagaatcccggtgtcataccatctggccctggggacttattggggtgcatttggaaaagagctttgcgaacttcctctgcagtaacatcttggatcaagtcaacattttgctaaggagatactaaaggcaccaaaccttccactaaattattagccatagaaccacttgtcgagaatagattagtaaaataatccattattaccgattgtaatctagtatcccagtccacccaacacccgtaagcatcttttaacttatgaatcatattatttttgcgtctagaagtagctttggcatgaaaaaatttactatttttatcccctgcttctaaccacagctgtttagaacgttggcaccaaaacacttctttttgagtgaagaattcattgagttcctcctgggcttttttgtaccgaaccaaggagtcgctgtcactagctttcttcaactgtcgtatcttctttttgcactcagcaatccgaaacttaaagttctcagtgtaatcttttccccaaactgataacttatccccacatattgatattttctccaccacagaatcattctcgcatagctcccaaatgtcctttaccacctggagacacatcggctctctaagacatgcattctcaaaccaaaagtgtcgtatgggctgattaaagttcatcaccatagtttgaagtagaagagtacaatggtcagacatagacacttcaagattgagtaactgagatgaattaaacattcaagaccattcatcgttaaccaacaccctatcaagccgaacttcaacccagctttcagtgcccctacctctttcccaagtgtatggataacccgacaaatccatatcatgaagattgcaatcatttaacacttcttgaaaaccatccagcaacgtctgagggtacgggctaccccctcttttatccgagtgagactgcgtgttatttaaatcgccaataacacaccaaggcaaagtgtgttcagtagagagggaccgtaagtgattccaggtcttgtaacgaaacgatctattaggttcgccatataagcctgttaaacgccaagcattaacatcctcaccccccactttgatatcaacatggcaagcagagtatcccaacacccaagcatcctcatcatgtctccataacatcgcaactccaccactatggcccctcgcatcaactgaaaaagcaccatcaaagcccaaagagacccgaagtctctcaactaactcttttcgacttaaagtttcacaaagaaaaacaaagttgggtttcttgtggaccacaaggtccgttaggaattgaaacacccttgggttcccaagcccacggtaattccaacttaaaatgctcataatgtacggtgggcctgggaacccgaacccaccacagacccattttttgagcccaaattcaagatcacagcctctacttcagcctccacgttaccacaagtcatctcctcatctgtattattcatccccattggtaattccccactatgtgacagctttctccgctttatttttgtaatagtaagtccttcttcatttattccaataaagtctgcatcatttaaatcaatgttctctcccccaacattaccagttggtgtatcaatcacctttaaaggtcttttatgatggagattgtaaattgcagttgtagacatatctccttgattaatgggattgagatcagattgtattggcctgctacgatttggtatgccatcaattttggcatcagcattcataccagtatggctccccgttgactggttatgaccaccggaatgtctctgcaaaagacattcagcttcaaggcgtttatcaaactctgtatctcccagttcagtacgcaaacactttgctccgataagcttcgtctgtcttcgcagtggtgctttcatgaaagtgccataaggtttgattattttttctgtaggagtatcaaacaaacgcatacagaaacgatctgaatgacccaacagaccacacttaaaatagaaagtagggacatttttatatttaaatgtgatccatatgaactctgtcttcattttccacaatttcattttatgctacaatggtttattaagatccatagatacccgaattcacatataatccctccataatcctaaaaaattcttagtatccgcctctttgaatttaccaatatagttccccacattagtaagtgtccgttcagtcatataaccagtttttaaatcatgtacctgagtccataaatcaagagtattcaggggtatcattctcgggtcttctccctccatcagtcttctaataatcagagctttacgattgaatgtccatggaccgccttctaagacacgagatatatcgatctcatggtagaactgaaacaggtatcgaataccaccattgagctccttaatatagacccccatacctggtttccacaaggcagctagagtctgctacattgctgagaaatcgaccgcaccttcattgagaaatcgaccaaccaggcaccatcgtgcgtcaaacgctactgtctcctcctcctgtatttcctcacagaacagaccaccagaatcctcgtcttcgagggtaatatcaaccaagtcttcattattattactactagatgccatgaaaacgccaagatgaaagacaaaagccaaatcagagaaacctcaacaggacaaaaagacaaccttaaacggaacaaaccatgtcagaggacaagaccacgactttctattattaaagtcatcaacattattgattcccagcaaacagaaacaacgcaaattttctattgaatatagaaataatcctaaatcttaaaaaaaaattatcattccaaactaaaaaacaatatatatttatatataggaagattatagcaatatcaaagtcaattctcaaaaaaataatttaaagatacccttaatagttgatactacatatatgttaaaatactaataatctaaattttgttctaattaatcataagaatcaaataataaataactaaatattaacagaagcttattagaattcataaaattgattttaccatagttattattccagatttgcaatgccatctttctagaaaacttaatctcttgatgatgaaaattcaagtgtaaaaagatacgatacaaaataagaactattacttattataactacaatcaactttattttaagggtaaataccattttaaattttgtattttacaaaagttatcaattagactatctattttgttaaatgacaaaataaaccatgtattttctaaaatatacaaatagtaccctgaactgattttttnnnnnnntaaaacttaataataatctgatctatagagatattatgacaaaactagttacattttctgtatctnnnnnnnnnnnaaattgtcttaaagttagttatttaaaaaataaaattgttgaaaatcgagctcagtgtcttatttttaccattttgaaaaatataaagttcattttgtcatttaacaaaataaattgtccaattgataacttttacaaaacccaaagtccaaaatgatatttactcttattttaaaatagaccacataattttaactcatttatataataactcaatacatattttataaaacacttgtagccctaaataaataaatttctaacctatgagccaatgcgcgcagagaagaaatgggatgttgtggtaaacaagaattgatttaatatcaaaatattattaattagttcatagtttttccttgaaaagattgtttttaaattcaaaattgccagtggatatatgcgaatataaatttaccaccaatatatatgttaaaggttttttactttttaactcaatacatatggtaactgtattcactttaatttatatttgtagcaagtggattatatacagagtctagggttaccactgaaaatgggcatgaagacgtggtgaacagataaaagcatgtgtatggaaagtgttctataaatggtggaatttgagttggtttccactgtcatatattacaccactatataactaatataaattatataaaaaaatatcatcaattttattattaacttatttaattacttctttcatggaaagcaatttctttatgtttttcctttataaagtatgaagaaatgagcacctaattttcttcgatatgtggtagcatgtatcattcactttaaagaacaccactactacttttacatgagttctatatgcctatttatttaaactccttattaggttttgacttctttaccaacaaaaaaaaaaaacaatcacttttttttataaagatatatattttttgggacaggaaatctttattttatatatgtttaataaatctttattaatattttatgtatggtgttccaagtgcactttttattaaacaaatagatctagtaagtactaatttttgtctttatacttattgttttctattggtggaatttaatcttgaaacttacaattgatattattaataatatttatatagctgcttaataaaggagaatatatgaaggcattttctttggggcttatcaatttcttgaagagtttagctacttaaggttttgcaagttttgtattttaacatatatatacctatttttattagattcaacaattgctaacatataaaaccactagttgtcaaatggaaaatagaaaacagaatacataaaataaattaattgtaaaatgtaatattgtaagagttttgaaaagttattaccctaagaaacactacaaaaaataattatttttagtgataattttttaatcacaatataaatttttttgtgactaaatatttaatcacaaaaaaaattacttataactaaaaca

SEQ ID NO: 43109 - DNA, 3269 bp, Cannabis sativa
ccaagttccgaacccacaacctcctcctcttcaaattctacaatggagacccccatgtttcctcccccccaacaacctacttcttcagaaccccaaaacgaacctcccgttgaagaatcccaatcaaaacccctcaactcccaagttgcgaaaactggtgaacccggtggcaagcagagttgcaatgagtcccgtcaacatgtcgttccgtacacgattcccccttggagtgaacctcccggccacaatttctactttgaagttctaaaggaaggttctatgacaaatcaagtccatgtgtaagtcctttactttttattcgtcgaagaattggactttttgttgttcattaatggtgcatagctgaattttgagttttgattttcagatacgagagaaaggagcttatatatttgggagtgtggacctctgtgactttgtacttgagcatcccaccgtttctcgctttcacgcaggtaatcgctttcattcccgtttcaaagaaacttgaaattgagctcagatgcttaactttttcaactgtaaaacactacattctatgattgtgtcaaatgtgtgtgatgatatgaaattgaagtgattaattgaaagttattcacgttggcttagttagcctattactttagtgttaaagttgggcagagcagctgttcgtttagtgagtgaggcattatagttgctccgatgttctgagctaagattatccctttttgaatgagctagttcccagtgttaatttaaggtctgtcagtgatgtaaatgatttctgcacttttttactgttgatcacttcccacatgattgttaagtgtcctgcgttagacgcaaaattcttctagaaaaagctccgttttccctttaaattttgggagataagattttgaaatacccatgatttctttgatgcgtacacacacactcatatgtgtatactttagcttcctcatactcatgctaatctgtttcctatatgtcagttctccagttcaaaagaagtggagaagcttatatttatgatcttgctagtactcatggtactttcgtcaacaataatcaggtattctgcacaaacaattctagtgcattgttagcctgcatcacaatttatgtcttttattttgtttatttcatcaatgatatatttttaaaggttttaacattaattaatttgtatattcattgattgtaactgggaaatattctttagaattttaattggaggaagttatcttttatatgacttggcttttatcaatcaaattaaagaagttgtattaccatggtaggttctttgagtttattatgcaggtaaataaaaatttgctttaattatatttgacgtcttttttgtaatctaattactattctagttacataagcctgtgatgtgtaatacgagtttctcttctatttccttgaggtcaggtgaacgaaaagagctatgtggatttacatgttggtgatgtccttcgatttggacagtatgttatctgtttcctaaacccccacttttttatttatttagatggtcattaacctatgttttcttgaaatttggacactggcttatgttttttcttctctcaatttgcttttactaagatgattagtataatttcagcccacctatccaatcctatcctacctcctctatcattcctaaaagagattgtaaaatgttgtgtgatccatgtggagcttacttagcaattagaatttgaattatggtactaagttgcagaatgcatagggtactcaaaattttggcagattttgtccattaatttcttcttagtgttaaaaataaaatgctaccatcactgccctataagctaagctctccacaggaacaccttcactagaggtttttccataaattataactttgacgagtattagaaggctaatattcagattagattgctagtctaatttttgattgcaaaaggaatcaatcttgggaagatatttatattcggatttccgctcagcatttcttattgcccttgactaattttaattcttaattttcaaatttgaagaccaatgtatacaatacaccattactttaatgaccagcctccttcaacattcatttgaagaagtaataaaaaagtttgagcgatatctgttttaatcttctttgacccgattcttgctgctagacacttgttacagttcaataatctcagtgtttattttgtacaggtcatctcctttgtacattttccgaggaccaccaaatttaatgccaacagtaagactttatttgtgtttgaatttattttttggtttcaacagtttacaatagtgaattttaaaaaagaaaatcatcaagttctgctttaatttccatcttctccaccttcgcgattatatttctttctatcttttattaacactgtggtcctacataggagaatgacttggagatgattagaaatattatgagcccagaagaggtgctagatcgggaagcttcacttcaacgagtaagacgtgaagcatctgttggtgatggtgtctcatggagcataggagaagatgctactaaagaggctaaggtttataagctctcaagtcacttcgtattaggatgtgatttacatataaatgctcattgaattaccataggcattataatttatttttattttaaagtttaatctcttgatttgatggccatactaattcatatggtgcatataggagaacacagatgaagaaacttggcagacacacaaaggacaacaaacacagaagcaaccaaaaacccgtgaaaaggatataatggaggaggttagtttgctctgctgtgccatgaaaatgcctgatatgacaaatacttttttcctttctaacatcaagattattgtgctccctcatatattacatcactctctccaatttatttctctctattacattattgtttttgtggttgttgttggtatgtgcatgcaattaaatttacactaaatattatttttggtaaaaaatttacactttcacgtttaaatatatgtatttatatttttacgttgttttataaaaataatatgaaaacaggaaacccacacgaaagtaacaggaaaacaacattcaaacaacatcaaaaaaacacaaaataaagaatattggtgacaaaactacctcagctatacaatttgtgacataaatcgattttttggttctgtttgctatttactccttctgttcaaaatactctgttaagtgcaacagtgaac

SEQ ID NO: 43110 - DNA, 4968 bp, Cannabis sativa
  modified_base (50)..(59): a, c, t, g, unknown or other
ttgttttttaattttaaaaacagagaacaaaagtgtgttctgtaaagttnnnnnnnnnntttattttttgattttatttacgtcgggtctaagttcggggtcagattcgggctcaactcagaggccaggtttagcactaaggcctggtgggatttggatccgggtctgatcgaagtccaaaatattgattaagaaaagaaaaaactgttgaaaaaatattaaaagtatttttttttgttttttaaattttgattctcaattaaaaaaattgaaaagtaaaaacaattttctagcacttgtttttaaaaaatattttcactttttcaattttaaaaacagaaaagtgattaaaaaaatattaccaaacgccatctacatgttgatagaaaaacagtttaacatataaacgatagattgtctgtgttaatatgtattaaactgttgaattttaattgaatggttttattgttttcggacattaagacagacaataatggttcgtgtaattttctggtgacagcaacaaaatgacccattgatcttttgcaaaacttagactatgggatgattattttcatttaacctcgaatgtaattgaatattatatttcccatcttgatgatgggtctctttgagtttggttattaatgaaattcttctttaaatatatatattatacatagtacatgagttcctacgtaagacctgatattattgcagcctgcttctagcatttctctattgtaagttataatatctagataggttaattaatgaagctaggatcgcctataaatagccatgaaaccctctttcataaagcacacacacaactactcaaacttgctacttgtcatatcttacaaaaggagaagaaagatatgaagtatttgagcagccttatcatcacattatgtttggctaatgtattatgccttggattggtttatgcagatgaaagacccgatcaccaatgtgggcctaatctaggaaatcctccatgtggagacggaaggtgttgcagcatccataacttttgtggtggcggatctagttactgcagaggaggaaactgccgataccagtgctggttcgcagcagcaccgactggtggtctccctcgtgataattctgttactaaaatagtcaccaaatcactctacaacgaaatgtttaaacatagaagtgattgtcaaagccagggcttctatagctacgaggctttcatcactgccactcaatcctttcctggctttgctactactggagatgtctcaactcgtaagagggagctcgctgctttctttgctcaaacctctcaactaaccactggtaagttacacgtacataaagattacgacatcatttatattgtgaaaattaatcatctaaccatgttttattgttcacactaaattggtaaccaggattgagaatcaattagcaatgagtggagtagcccatgttcttatatatgactcaattctctaccatttattctacgtgggacaatgttcataatataccccctcaagatgatggctactttttgctcatcaattttgaaccgtattatattggacatgatcactatctgtatagatgcggatcggatatgatcacttgcccgcaagtaatatggctctgatacaagttgagaaattatttgagagaaagtgagcttgagtaaaaactgttactcagctataaagaatgattgtatttatatagaaagttcaataaaatgcataaacagaatactactttgattacgtattataatttgtaatttcatgctatgcttgtacaggctatggtcctagtgatccacatgcgtggggatattgtagtatcaatgggactgttcacacaacagctgggaatgattattgcacttcctctaagtggccttgtgctccaggcaaaaaatatattagcagaggacctatccaactcactcagtatgtgatatatatataaatctcaatagccagctatagtaaattaatgaattaattaaattaaatcttatcgatatttaattttataatttcatattaatattattcatgtttcagcaactacaactacggacttgccggtaaggctcttggagtagatttgataaaaaatccagatttggtggccatagaccctgttgtttcattcagaacagccttgtggttttggatgactaagcatgacagtaaaccagcttcttgccatgatattttgatcaatgctaattctaaaactaatgatcaagtgtcctcaagctacgttgccatagataaaatagtaaacgacaattctcaaatagtccaaactgagctcggcgaaaatagcagagtttctaatagcattgggtactataaaagatattgtgatatgttagaagtgagttatggaaagctcatatgataatatgtatgagaagactacttataacctattaggtactacgtagctcaagaaaagaaataaagtgatatggttctccccattttcatataggagagagatcatgtaatataaccttactatatgtatttgtgtcaagtgatcatatacatatgtaaagtgcttgaatatttatatgctgataaaataaatgagctacataaactttttacgtaccttccaatacaatgatacataatgagttttagttattcttctttaattattattaataaactcgatagaaggtgcaagtggatgatatcctcttggttcaaccaaatcatgaacgcacatgtcagattggaacaataaaacagaaagtgtaaagtactggtccaaaaagaacattgctattagcagatgtggagccaagactagatgtcaaggtggccaaactatattaaaaattagggtaatttgcggtcaaaccttctcatgtttactttcgcacttaacccctattgtttatttttggcggccaaactatcttaaattagttcggtttgcaattttaatatcccgttatttgcacaccgatatttgcctccttgacacatcaaagtcagccgaaaatgcttacctatcactataaaaaattatattaagaaatgaaaagaaaatacaactgaaatcgtacctaaaaagaacttgaagattatgagaacaagaaaggcaacttcaggtcttctgtaatctatgaaaggattgttttcttaaggattgttttcttaagtttccaccacctgagatttgtgcgatagaggttcgaaactttgtcgtactggcggtggaagctccatctggtggttttcatggagaatttaagccatctcaaaagtcgttgtaagcccataaaatattcatgtataacttgctggaagtatcctatgagttttcatttttcttagtcacttatctctgctactttaatttttatttttgcttgctactactataaatttagatgttgggttttggcaggggggttttgtaatttttggaccctcagatgtgtgatggctcaagagaagtgatacatgggtttcttaagaagattaattatttgagagtgaaatatcttccaggagagagatttatgaataaccaacatatttaggaggaaaatgcacaacatgtcccattccagatgttggacataaatgagaatgagtcatttcttaagatctcagttgttgaatgttatcaaagcaggcccattatggaatgttatgagaacaaaagcaatcaaagttacaaaaaatttcttgtcatttgtgttctattagttaagatattactatatttcaaatattaattagtaattgagaatttttttggtcagaatctgtgtattggtaattactatattgtagttatctgatttagtatgtttgatttatattaaattaggcctctctaattttgtatggaattagtaatattttgaaataaaatttagcatgacttttgaatcatatcaattttattaaagtgcaacaataaagcctttcctttattatttttaccaatcaaacaaattctacattatacattactataccactaactatacaagaaacaaaaaatgttactgcgaacaaaattacaatgaaagctaatacattatacattacttacaataaagtggcttataaaaaattaacatctaaattatcacttttgttaacacttaatcaaattaacatcatataagaagacttctaaaaatatatatttgtatctgatgcatataaatgatttaaacataataagctgcatataaaatactaaattcccattccttaagcattgtttgtatttgatctacacatccaaacatcatgatctaattgagttttaaaatgcatcatgataaaaatacatcataatctaatcaagttttgcaaaaaccaaaaaaaaaaaaaaaagaaaccagtaaggaattgcaagacttgttcttgattaagaaaagctaagttgtctgcagatgcagaacaagtacatggaattcgtggtctaagttcttgaatctcatcccacatacatttgagtttggtgaagtaagaacttacagaatcttcgccttgacgcaaggtgatcaacgtttctcggagctcgaaaatccggggtccatttccttgatcaaatcttgaatggagctcagtccacatttcagcagcggtgtcgaggaacatgatgttgcttttaatctcaggggtcacggagtggaggatccaagacatgaccatctggttgcaacgattccaatgattgtgaaggggatctggttctggtggagaaggaagagtgcctttaagaaaagtcttgtttctggcgcctacgtataactcgaaatcacgacgccatggttggaagttgtgatcggacagaggcagagtgaccaggatcaaaccagggtggtcaccggagctgagataatagggactggagctgtcttcgtgcgcaggacgaggaatagcaggaagattctgtggaagagtttct

SEQ ID NO: 43111 - DNA, 2934 bp, Cannabis sativa
tcaaaatatgagattacaaacaaagcaacttaagacattattgcttctaacttagattagtggtttgtcatgttttaaatatgcattatactaataataaacattcaccagaattgtttgtttccttattacgaaactagttactactactaatatgttagtttcttctcaaaaacaaaagaaataagcaacaaaaccaacagctttcatatcaaaattgggacccaaacaactttaattatgaatgaatgttatttgtttgtttggaaaaaattttcttcttcaaatcctgccaagcttcaggaccattaggatgacgatttacatactgcttaacaaattgggtctccgagcaagcaacaatggtgctcagagctagcacgggatctgccattccttggcttttaagccaatcatacatagataccctatgcttgaccctttcaacagtatagttgagaagtgaagggaatacccataaagctgatatgggataacctagctcctttacaagaagatcaatcttggtctgaatcacactcttcgtctggttaagaatttgaggtgaaactttaaccatttcacggacctcatcatgttccaaaccataactcattatgaagtcaaatctctcttgaagctcccctcctttgcctcggaacacctttagcgccttcttcatttcattcgagtcttctacatatcccaagtttaacaaaaacttgttcttgtgcagttttgattcggagtcttcctctaaactcggaagtctctcaacttttgctcccaaaacaaagttcttcaactcatgtgggttcttctggatgtaactacaaagtcttttcttcccaacacacaaatatgtaagtaagctattagcactcttcaaacaacatgaacccaccagcagtgtgtgagaacgtaaaaaattccccatctttgttgtctccatctcgatctcattcaggaagccgaagcatctcctcaaattcgaaacaaactttccaacttgaacctgtggaaattgcagaaacatggggcctatttggttcattgagtatccaaatttcaatagaaacccaattagtaaaattgtcctgtcccctgaatcctcaaacaaaatatctgggtgctgaccaagcatttcagccatctctgcatcggtcaaccccatcttgctaaaaagacataaaagttcaagcatgcggctccaattgtaatcatcatcctccaacaaattgttctcgaaccatctggtttcaaatccaaaactcttgattctctccaataccttaataaaatctgcatttacatttccaatcaaaagataagggctagaaatgattaactttactacagttgattgactaaaacccagtttctcatagcctctaagttttgacaccaaaatctgaacatcagagtggaatacttctgtagctcctttataaattttacctatcttatggcgtgcaaatccataaccacacaacacataataattctcaagcaacaaacgagcatcagttaaatacatcaaattacggggaagaagatgagcatactctgaaggttttaatcccaagctttcaaggaaaggttcaaactcattaacgggatggtaacacaaaaaccttgcaatagaccgaccaatctcagcctcagtattgacctgtttcaaaagctttgacaagaaaagaggcgagtttctactcatattctctgcatcaagaaactgtaagtttctagttgaataaaaatactccaaaagtgcagcctgggcttccttcttaacagcacgaggaattctaacaaccttgtcaatctctaattggccaaaaatttcagagtcctcggtttgagcaactctttttgttctataaagcctagtatttggagaaatgaaagaatacccagatgaccaaactatggatttagaggaattaagttggttttgaccaaaacttgaagaagcccatttcagtatagaggtgcttctgcacttttgcaaatgggtcatcacaagtttgaaaaggatataaatcaatagtaatggagttttaagggtttaatatgaatagaaatcggtataatcctctaaagaaatcttacctccgccattggtggtgagtaggttcgcaaggaagagcgtcagaatgagagaattagctagctgtgcgcgaatgtaaaaccctcttcaacctctccaccactgcaattgaagttgaaacttgaacgaaaggggttttgcttaagaagcccgaaacgacagtacttcccacaactaaacgacacgtttttaggggtcgttttggtacgtacgatatatattattgaatggaaaattactaacttttattaactatcgaacgccacgatcaaaaaaggtggctaaatcaattaaaactacaatctatatatctatatctttctatataaaaagcgtctatttaacattatttgttggtttatttttttttttcaacgattttttttttttttttttttttaaatttaaccttacacgattaatttaacagttaacgttaaacccaaaaaaattaaataattttttttttaaattaaaaaaaatcatcttagacacatatctctctaaccaaccgtatatgttaatattgcacgtgtaagatttcaaatttcaaaaaatttaaaaataaactcaataattaaaccaaaaaattaaacaatatttttttaaattaagaaaatcatcttagtcacatatctgtctaacaaaccgcatatccccaatttttgatatttttttgttatttttttttttaaattttgtattatttatataatataaaaaccatacaagtaaccatgatatttttttttcattaaaatttaaaaataaactcaataattaaacccaaaaaatatctatctcttctttactatcgactaaat

SEQ ID NO: 43112 - DNA, 4817 bp, Cannabis sativa
aaacaacattaaattgtctactcattgtttcacccgaacgtgcaaattgttgtctcacaattctattcttaatgtcatgagatataatatgtaaaaatacagcaaccatttcttcaactttcatattctttgtttccttcatacccccgatagttctaagttggtgacacaaaataccaaatattttcttatccatacgagtattttttatacaagctaagtcactagcatgtattattcgaaaaagatttagttgacgtaattggtacctacggaaagaactttcaagaaacatatttctacttatacgtttcttataacaaataataattacttgaagtatgaaaagaaatgtcatcttatttaacatctccatatattgaagtaaaattgctataattttttttttctttacaaccaatagaagacgagtcatatctgcatcaaggtttgaaatagtaacatacttatatgcattaccaactatgtaaagtaaaaagtatgtaaaaaagaaaaatcacaaaaaagaaataatgataaatggtggttacaatcacatcttaatgcatattgaactcaaaaaaataacagaacagacacataacatacacataaacttattattgaactcaaactcaaatataaaaagctacttagtgtgtgatagagtatttaaaatgttaagaaaaagaataataataaaaaaaaagttgtactagcttaaattatagctagttacctatatatggaggaaaagaaaattagaataatgcaaatttaatataacataatagcagttgtgagtggtaagtagtctattgagactgagagaggaaaaatacaatataagaaaaaaaaaatgtttagtgatatgacttaagttagagaaagatttatgtgggtgagtgataaaagaagtaaaagaaaaaaagaaattgtaatacataaaagtagttgttaatatgtaatacactaaaaaagaaaaaacaaaacaaatgaaggtatatttgtaaaagaaaacagtgttacattacaaatgttataatctactttttctaagtattctatgtaaaatattcccattatgattgctttaaaatctaataagatatgtgggcatcatacactactatgatagatatgataaatcatgatctttgcatggaaggagtcaataaatgtataagttctgttttcagcttagtgttatgaggcagcctatttcatttgatgctgaagtaatcaatatgcatccctaaatttcattttataaaattttgtttattgttctcttctaacactaactatatcctactccagctccttaatctaaaaatacaactaggagaagcactgtgtcatgattcataagttcaatgctgccaatagatcaaaatcacttctagatagtcaatgaactatctccttaccataccagtcacgtgcaaaagtttcttaactttttttgccatctgaaaagatgaaccaaaagttcaaaccccataatagccttagctagacattgtttgttgcactcaattgttttcaattcaatgcagtaggtgcctaggtgatctttattcactatgcctcagctttttcacttttgcaaagaaaagttgtttgcaattaataatgcaaaagtgggaatagaaatttcaagtgttgtgtgtggtgatctccattctctactctctagggtcactcaagaagagcagagtataaaactatctgccttttgagaatattgacacatccctacccagcaaccaaaaccctctggaagatggtctctgtcttttagagacacatggggatgatgaggtattaaaccatgatcacctaccctattagatatcgaaagtgccaaaatatgatttttctagtgttatacatacatcaataacagagtggtaaaaaacttggaagatgcaaactatatgcatacatcaacaacagagtggaaaaaaaaacttggaagatgcaaactagatgcaaactttgagtttgtttcaaagaaggtaatctaagacataaatggacgcttttccatagatcattaactacaattcccacaaaaccgaaagctgaatatcataggacctcaaaaatccttgacccatttgcccaagatatcaaactccgaaacaacaaatatatcatagtaaaatccaattaaaacaaactccacccaacacaaatgatacccaaaaacctaaaataaatgctcaaaagacatggcacagcgtcagtgagtttgagaataatatactgacctaaaaagaggtagatcgacttgaagatgcttgacagcatgctggcgtttccttccttcttctttccctgtaaataaattatacgaaagaaagtcatttgagccatctttggttaacttcatcagttaactcaccgatgagttcaccaagctaagctagcaaatcttaattttccagacaaatgaaacacaatgttttgagagatgttaaggtagcccactgtaaaatgaaaaccccctccaaaaaaattgaaaatatataccaaacataggttagacttagttttcccattcccgagtaagaaaatctctgtaccaaacagccccttagctgtttcagaaactctgaacaatgcaactggcctactaaattggagaaaattttgtatgcacgaattagttatttttacccacatctgttatttatcaatatatatacatatttatacatgtaagatggttaattcattttgtaagagtgggaattcttggttgctcactaatagcgcgtgctgtttaagttttatagagaaaagcagcattcaaattcaattgttcttcactgacaatttttgactgcttaacaggttgcactggccaagcagagagttgacgaatacatatattctcagttgatccaaccagctggcgctcaacaagcagtaattaccctctgaaagtgttaacatctcatttctaatgtgttttacttccaatcgataatataactaaaaatgagaaaatacattatgtgagtagtacccttaagttttgagaaatgctaaggggtactttaaagaggtggcatacccgctattggtgtaattcatcaaagggtcttacacattttgatttaataaataacatagtaaaccgctaacaattcacaacgtgctacataggtatagtgttggatactttaaagtgtttaataacaatgctcttgtggctttactttcttgttttgagaagaccttataataaaatcttgggtatcttactgtcttgcttttagttgagtttatgctatacaatagcctgaatttcgtcttaaaactgaatgggagttttttcttttgaagagcagagcaacaatactgagacaatgaagggtggacccaagaacttggaccatgaattcagttgtatacttcatgataaatatccttgtattttcaagtcttgcattgcagtttgctggccgatgcggtttccgcctctaccttgatttctgatatgtgaaattagttgttataacatcaaataattgtacttgaaacattgtttgccttttagaggatactttgattgttttttttctttttcttttgggtctgtacattcacagaaggtatttgacccttaatcaaacaactaatgagcaaatagaaactgaccctttggagtatttttttaaaatttttgaaatcttgcgccggttaattagccgtaatgacccctgagttttgcaaagattctcagtttagtccctgagttatttttctcagcaattagattcatatttcaatttttgtttcaatctccgttaaatttttaacagatggcaattttttttttttttgagatattaacagatggcaattaatcatgtcttttagtttaagttactactagagaattaaatagctgcaggttcgagttcgaccgacttttatttatttttcattattattttaatgtattttttttttttatttaaaataaatagcattcattaattttgtttagcctgctatcatttaggcaacaataaaataatggagttgtaaaatgtaaatacatgatgtttttatgatgtttttgaggaccaagaagccactcaaaagagaatcatctttagattataaaaataataaacttctttctttaaaaaagaaaatacatataactctataatttataaaacattgcaaaaaattcgtaacttgtcgcttgtatccctaataatttatatatatattgaggagatttcaatggtttgataattatatttacttttagccgttaaatcattattaaacatttgtgattaatttaaaaatttattaaagataattaataaattacttgttgcttgatactaacctgattttatttatttccttaaaataaaaaaaaataaaaaaaattaaagggttttttcatttggattgaaaagtaaaatggtcctaaatttaaaaattaagttaataaatgtccatttttataaatatttagcaaaatggccatttaattaataatttgatgataaaattacaattataatcttccatcatacataaagaagctttgtaataggaaaacaaatattatagacagcacgattttgtcatttgtgtaatataatcacctcagtattgtttgattatctattgaacaatttatcattcgttccatttttttttaactttcattgttatataaatttagacaacagctattaccatctatatactattgaaatatggttgcaaggaaatttttactactcactagttgatcaactttttttttttttttt

SEQ ID NO: 43113 - DNA, 1547 bp, Cannabis sativa
  modified_base (1051)..(1057): a, c, t, g, unknown or other
gttgttaaaactttatgaaggctctttcgaatggaagatacaaaagttgtttgcaccgagcagtggttaatagcgaagagtcaagaaaatctctggcattctttttatgtccagggaatgataaagtggtaagtccaccaggtgagttagtggaccattcaaaccctcgtgtttacccggatttcacttggcctatgtttcttgagttcactcagaagcattacagagctgacgtaaagacactacaaaacttctccaattggctacgacagaacaacaactgagagagataattttcttttttgacatatacaaaatctgggcttcttatgggatcgatctctccctctctctcaaatccctacaagtaaaatgttataaaaaacaaacagaaaaattgatgttgaggagagtgatgattgagatgaaggaaaaaagttgggttttcttttttctttatttattaaatttcgaaaccacgaaagaagaatatatttttaatgtgtcagtttagttagctatatagctttagggattaaaaaggtacgacagtgaggtatatgaaaccaataaaaaatgctgggctcaacaacagctaagttttgtaatttttcttccatagttttattatataaaaatatatagaaagcttatcattagctagtaatattataaactactgtcttttgaagaaaaccgatgagctattgcaattagaaaaaagctttgcccagatcttgatgcacaattaatctgtttgtgggtgtcgtgtccatatttgatcagaattatacttggaagaaaatgaaaaaaaataatgtagagagagagatagatagatagtatttatagtactagtggaagtagtgtaaactgtctcagttgttaaattgattcaattttgtttttcttatttcatgtaaaattaaatgtgtagatcgatctgatttctcaaatattgtagatacaatattcatgttctcgtttctaaacaaatttaaaataatccaaacaaattatataatacaattttatgcaaaaaaaaaaaaannnnnnnaataataataataatatatatgcatataatataatacaatgaattaataattactcgtagggcacgtgcaaaatttttaattactcacttataaaatagggtgattctacaatgcacactcttaaaatgaatgtactgataccctcttaacttgtaaataactcatcctaagatcaacccaaccatttttcttactcacttataaaatagggttattctacaatgcaccctcttaaaagggaggtactgatacactcttaacttgtaaatagctcattgtaagatcaacccaaccacttttcttactcacttataaaatagggtgattctacaatgcaccctcttaaaagggatgtattgatacactcttaacttgcttcggtctcgaaaaagattttttagtctaattatttttcatattcatgtacattataactatttaagataatctaccaaattttgagacatttcgaataatttacaatataga

SEQ ID NO: 43114 - DNA, 2269 bp, Cannabis sativa
tgcaccttcaacacggctacagaagccgcaagcgcttacgacgacgcggcttggaagcaatatggcccactggccaagctcaacatgcctggccgccaccatcattatcctcagtactcgtccactactaccagtacgagttctggggcagagtctgagtcagcaggctctactggtggagcagtagaacctgcggagtcggaagacaccggcaataatttgatggagggtttcagttggccacaagttgcttttggtgaggataacgatgatgagtatatggacctgatgatgatggatagcaaccctgagcttctgtttgttggagaagaagatcatcagtgtgtttttagccatatccatggagaagatggagcagcttgtaatattagtttagaataacgagtcagccacgtacgtacatcaaccttagttgttttttttttttctctttgtttcctcgatttctatatctctgttttgttcaaagtttgcgtagctagcctagcatggttaagttgtacgtacgtttggctttttgtttatctatatattatattaggaaacaaactgtgtactttaagtgttgttgtttaaattttctggaaacactattagcaagttacctttattactccataaaagagaacaacactgaaataagagaacaaaccataaaagagaacttcaccatattaaacttaaggttatacagctacaacctaactaacaatgttacaatgttatttcagaggggggcctctcgtaatattattgtaacattggattatttaccaataatgttaatatttgtgtacaactcttttgaaaggaagattaactaataaagtgatcagaagtaaattagcagtagtcaagacatttagacagagtgtggtaaaacttattctataattagaaagttgcatacatactgatctatgcaaaacccctccttggccaggctatgggcctcgtgaattcttattctgctgcaaaattttaaagagacaataccaataagaaaatcaatatgttgtataggccatcattgagagtatttgtgcaatcagataagagaaccacattagtaaagtttaattaaaaatagagaaagaggcctcgatgaatagccgcatcatccttgacaaccgcactatgctatgaaataaggataataccatcaaaaacttgatgcagtttggcttggaatcgaaatctttggtggtaataaaattctcatgcattgttgaaagttttttttttttttgttttattttctagtgtgtttgtaaactttcatcaaactttcaatttagttggaaaaaaaactacataaagagaccaataaaaaaaatagtgtaaaacattataaattccaaaataatctcaaataataatgatgaaaaattaataatttctacaataaaacaaaactacttaataataaactaataataatgtaaattaactccatatatataataaaccttaatgaaaacagataataacttaaacacaagagaatgatgatattttggtgtacttactttctctccatgaattaatgatccgataaatggtggcatcaagcaaatgctaatgctatgaggatttaaaatttttggttgaaaattctaaattgaagtattatatagatataatgtttttttaaaatagatatttcaaaattagtattaaattgtatatgaaaaagattaaagaattaatattaattattaaatataataaaaaattataaaggtgagagaattaagaataaaacaaataaaagaatttaaatatatgtataatattatttttaaatatataatctattaataaataaacagaggtatataatttatattaattaatatttatgaaactaataaaaaattaaaaaaaaaaatattaaggagagaataaataatattatatgtcactgtcttatatctttcttttatatatatactaggaaacatgatgcgtatcacgagcgattatttaaattttttaccaataatattaattaatatcatcaataactattaaattattatttttattgtcaattcattataagccttattaatttttttcttactttagaatctttataaagatatattataaatcaatattcttagaggttataatgagtaaaagattaaaaaaaaatccatggagaactttaaagcaatatatataaaaaaaaaaaaagttttttcattttcactttaaaacagggtttttttttttttttttt

SEQ ID NO: 43115 - DNA, 6492 bp, Cannabis sativa
cacgacctttatatggagactatgaggcatatgtctggtacaggcccatcttctccgtcgggtggtgtccaaccgtaatcttccagctgacctgtttcaaactttgtttgatgtttaatcataattggtgatttttaattttaaaaaaatattgtattatttaataattactaattaaatattaggaatataaattaatttgaaaaattatttatttaaatttaacatttagtaaaataaaatattatcttaattataaattataatttatgtaattaatagtttaaaattaattaaattaataattaattaatattaaattaatcattgttaaattaaaataataagtaaaattattatcttaatttaacataatattaaattaataagtgcataataatatattaatagttggtaaaatataataaaataataatataaaatataaaaaaatagttaattattactttaaataatatgtgaaataaaattaggagaaaataacataagatattgtaaaattgtataaaacaaaatttttatcttcacttaatctctttggttataaatcaaagatagatagaactattgtatttatattatcacatagtgatattttttttattattacttttacacatgcatgaaatagcttagacatgtttggagaagctgattcagtaaggactcttaaatatccttctccaaatctaagattttttttatccgcatagatagtttgggcttcttttatacttatagtttgatctattacttatttgattgtttcattagtagatattttaatacgtgtttcattacgcgttcttataagttggcaaacttactattagtttgtttacttatgagaactgtgagtcggtgctgccgaaatttttacaaaaatgaagtaattttaagagcatagttgcactatatgtatattataaacttgaatgggataggttctttacccttttagtaatggagtgagaaggtagattaggacacttgcacattttttttgttgtattttaaatttttttgttaattactttatagaggaagattacaaccgatagaagttggatgactatgaactgacgctcagtcgagtttcaaagttgcataaatgagtttattgtagttgttagaaacctcgtaaatcttgtcagattatctcaatgtccttgcatgtagtgtttgaatataaatttttacacacctgaaaatataagggttcatttgtttgtcagtaggatccaaccttcgtacaacccttgatttttccatggggagtctttttctcagcctactgttcaacttcctgaagatgaagaagaacaaatgtcaaatgtgtttgcggacatgttaagagaatatccggggtttaacgactctactagcactatgaattctttcaatgaacccccaattaatgaaaacaacaagtatgatgatctgttaaggagagaggatctgagttatatcctagttgcaaaaaatcagccctcaatgctctggtaaagcttatgcattgcaaagttttgaataagtggactaaccactcttttgatatgttgctctctgtcttgattgagctattttcagaggggacaaaattaccgaagttgcattatgagtcgaagatgagttacgcaatttaagtttaggttacgactcaatagatgtgtgcaagtataactgtgtcattttttggaaggagaatgacaagaaagattgttaccctatatgtggcgaatcccattggctgaaaagaaagggtgaaggtaaaaatgttcctcacaaagttgtgcagtacttcccactcacaccaagactaaaatgactttacagttcaagacatctggttgaggacatgcagtggcgttactcaaagagaccgaaagaagacaatgtgcttacgcatcctgaggatgctgaagaatggaagtggtttgaccagctttacccgtctttcttcgtcaaacctagaaatgtgagattggatttggctactaacgcttttaatctatttgcgaacatgagaaattcttatagcttgtggccggttatttgtgccccatataacatgccaccttagaagtgcataagatcaaaattgttattgttgactttattgattcaaagtccatcttctcctggaaaagatatggatgtttttatgagaccgttaattgacgaaatgaatcagttgtgggacacaggtcttcaaacccgagatgcgtacactagaattatattttcaatgtgtgtggctatgttgtggacaataaatgatttccctgcttatgctctaatgtctggttagagcatgaaaggatacatggtgtgtcccattagcaatgaacacactccttccattgacctaaatagtaaaattagatatgttggtcatagacattttctcaaaaggaatgatccaaggacgaaaaacaaaaaatacgataggaagcctgagaagagagcaccaccttctgtattgatgggagatgatattttatcccaattggagcaaatttaatattatttgcatagaaaacacaaacaatttgggggtgtcaaacagaagtgctctgctcaagagctaaactgatcaataaagagtacattttttgaacttgattattggaagaatttgtccttacaatataatctcgatgtaattcacatcgagaaaattgtgcatgagagtgtactaggtactcttctaagtatcgatgggaagctaaaggatactgagaaagcgagaatggatttgcaagacttacaaatacgacctgagttgtggttgtatgaaaattaaaatgggaatggaaaaatgcatcagctatttacacacttaatgtttaaaaatagattgaatttgtggattttataaagtttgcgcgattttcctgatagttttgctgcaaatttagacaaatatgtaaatttgaataccgggaagatttctagactcaaatcccatgactttaatgtgctatcacaacatttaatgttggcaagtattcataagtacttgaagaaagaaatctaggacacaattattgagttatatgtgtatttcaaacaattatgttcaagaacactcaatatttgtgatttggaaaacatgcaaataaatattctaagtactttacacaagttagaaattactttcccaccatctttctttgatataatggttcatgtaattatgcatctccctaaaaaaaccatattaggtgaactagtgcagtacagatagatgtgtcccatcaagcggtcaacatctgtgaacaaataatatgtcaagaatcgttcccgtttagaaggatctattgctaaatcttatgtggttaacaagtcattcatgtttgtgctttaaaaaatgaaaactcgattcaacagtcctgaacaaaacaatgatgtcatctcaaacatgccagaacaataatttcctgattcaagcatgtcattggataagaagacattaggcaccttaccaataataagcaagcataaattagtacatattgaataattgcatagaagttgagctatatatcaagtaagttgactttcaattaaaaatgatgtatcaaattactattactttatataagttatttgttatttatttttattaaatatctaaatatatcacaattattcaatagtaaatagctgaaaataaatgtaactatcattattacaaatttaatataaccattgaaattttctatatataaagtaataataagattagtttcaagtcttaaaaaacataaacaataaacattaatgagtatcaaaatggtatattctcatatataattcctgttattttgttcataaaattaataatcggcaaatgaatttgaaagacttttaattaattattaacattatttttaagattcctcaccaaatttacaattcaatgatacaatgaacatgggttttgaattaacacctatatataactacctaagatcgcatcccatatcaggttgagaatgacaaatatatatatttatttatataattttgggttgatgaatattttatattataaagtgtcaataaatttagtatataacactagagagagtaataatatacttagatctcattgcataattgggtggtcctcgtttgagctaacaaaaattaagtattaattaattaaacaaataagaattctttagcatgggcttgagatattgtgttgtaccctaaatgtagaacaagtcatacctggactttatctctttgtttttttcttcatataatattttaatcagtgctgagtatttatgtgtaggaaagatggagatcagagtatatcacaagtaattatactttaacgatactaaaattgtaagaactatatatacaaaatgctcacagatatacattacaaagttataattttttttcaactatttaaatctatatatatataactttccataaaatatatatttaaaaaaaccacaataaaatatatattactgtatgcataaaaaattaatcacacttattaaataacttcctactcttttcagaaaaaacaaataactttctatactaacatatgtataaataaaaatatatatattacgaatttgcatgtcacacttatatctaatgaaatatttaaagagcttactcacaataataataataagaggatctttttcagttttaatcaaaaaaaaaaaaaataacaatattataaaaatattttgaactgaccaaataaataaatatataacctaaataaaaaaatttacacaaataccacttacacacaccttcaacccaggatccatgattcataaagttcaaaccatacttagaccccttgttatgcagcaatggagaggaatcgattgatcatgacctcttttttgcttgttctttctcacaggaatgcttaaaccagaccaagacttggctgcattggaacgtgaatttcaattccttgtttcgtgctgtcaaatggctagacaaagcaaaaatgagaaaattcaagaagttgccattggttgacgcacttccagccctggtgtacatcatttggtgtactcaaaacactaaatattgggaaaataaagcagagaatagcaacacagtgtttacacaggttaagaatataactaaaagtcgaatcttatatatatggccaaaaaaagtttctactagtgataaagtatgatttgacacattgtaaataatatagtctcttaaggtcctctattttaattgaggatgcttgtaggttgtacaaattgagattcgcagtaataaaacatcacccgattcatcaaaaaaaattattttttttaataaatattaaacaatttaatattgaaaagtaactaatttaaaataatcgatcaaatacgtacttttaattggattggatttgaactattgtccgaattagattgaatttaaaatacgaaatccatatttagtgcagatcagatatactataagtaaaataatgtagacaaaattaaatgaataccctaatattagctaagcgaccagtgttacatgaaaactctcttcggatgaaaaccttgataaatatggagtaatttaattcttatttaacattaattcttttttaaaagggtagtaattttatattagatgattctctagaaattttattttaataactaaaaataatttggaccaattaaatgttgctacataaacactgacttgtcaattatttctaccttcaaaatatttaattaagtgttttttactataaattactctttaaaaaataacaatttctttttttctttatctcatttttaactattttttagcagtaaaattatgtttcttttttttttttttttgaaagagtaaaattatgtttcttaattgtataaataaaaagaaaattatcgtctagttcctaaattcaacgttggccgaacgaattaggtgaaattatggagaaaataaaaaatataaaaaataaaataaaaaattaaagaatgaattaattttggcagctaaatatggccttaatatctataaaatcttcacacgtgtcaattacatcgctcgtaaagcggaaaattcttctaaaatttagaatacgataggagggtagtttggactattcggtatatgcgcagcagcagcagaagtgttcatcaaatacaatcaaattaatcgaaaaaaaaaaaatccaatcaaattaattacttttaatattaaattattaagaaaattacctcatgtactattttttttaacttttttttttaaatttacgatttgggtttctaaagtagttgcagcacttgtttcaataggggtttccatatgagttttttgttgcagcgctagttgcaatagaagtttctatgtaaaattctgtaaaaatacaaaaaaaaactgttttgaagtataaaaatgaaaagcccctaaattatttaatatttattaaaa

SEQ ID NO: 43116 - DNA, 1302 bp, Cannabis sativa
cggtttttttggcggcgggtcgggacgggtagtcgggttttccaggtttacgggtctaaatgtgcacccctactccacaatatgctaagaaacatacagagtgcctaacataaatgatagaaactatactaaatctcatcgatttaaatttctctatccctcattttattcacttgtgtatcatagaagacattaatttgacaagaaaatcaatcatacatacataataacaaggaagagtcaggcatagcttggatctgtttactaaactcacgctgctcatttgaaaattaacttaattagtcattaaaaattaaccacaaacgtgagaaaaattcaataaaaaaataaaaaacaataaataaaaaaagaatcaccatacagatcaaaaccacaatcaaatttttcaaaatgttatcatttattattggtgctatatatcatccaaaagctgatgattgttttgcttccttcattgttacaatttgaagtagaatattattataccattttatcacacatttacaacaaacattaatattattacatgcttaaagaatatcagacaaacataactctactcaatcaataaaagccacaaggcccacatctggtttctcattgtaaactaaacagagtcaataagagaaatgaaactctcattagttgactgtatatgaattactcaaactagtacggtatcattaaagcagacgagctaggaagaaatgaatggtacagctattcccaaatttcacacaatagcatggactttatagattattagaaaagcaaatttcagattaatggtacaaaacaaatagtgaggcattcaaaggtctttaaacaacaaaatgaaagagcaataaaggcaactccttttgattactgacgtctcccctatttctcaaccccacctcaccactagacaaacccattgaccacatgttacaaaacatggtaatagttctctgagagatcaaatgctggacacttcaaatgggagatggctatgtattcaaaactcaggctatatttcaccaagattttgttttcctcttaggtttgctcagaaaatttgttcatgttctaatttcttgttaaaattacattaatggaatcaattcaacatcagcaaacgactttaaatttcgttttgttaaaacatatattattagcaaaatttgaaatagttcctttattatggggaaaaaaaataaagataacactttgtgttttcaatttgttcaaacctttaaacactccattaattactattttgtctgttaaataaaacaggtg

SEQ ID NO: 43117 - DNA, 1836 bp, Cannabis sativa
ccattctaatgatctctgtttttggtttagtaataagtataaagttttactggttgaattaaaatatattgttatttattttgttaaacgttcaacaaatttattagactatgtatttataagagtttttagtttataatttgaatgtatttttagtatgggaatactaaatgaattgtttccttatttgataaaagaatttgaaggttaataaagttcttgattaagagagacacatgtatataactcatttttatatataaatattaaatatatagataaaatgctatcaacaaaattattattatatctattttcaatctcatctttattgcaattttatattgacatgtcactatacatatctttatatatatagatggaaactaattaattagaattaattcattatatccatttcaatctcatctttatagcaattttacactcccacattactaccacgtacttaatttttttaaattaacattatatatcccttatttttagattaaatgtatccattagagaataatttaagaatattatttatcccaaaaaagaattttatttattgaattaaagtgataaaattctgttaaaattcttccgtaatatatatctcaataaacagttataccttgactctgttacttctacttatcatattattattttttttaattattattggattttagttacaataaccaacaatatatccgtattaaaatttggatagagattgaaatattccaatattgtttcaaatttcatctataaaatactctccaaaaccctaaacaaaatccataatctcataatcgaagcaaaacaaccatggcttctatttcttcacatttcccaatatcattattattattaagtttaatttcattactaatcccattatcattagcagcagaagaaacgacaacaacgacaatcaaaaatgtaacatacgacgctaaatcgttcatgatcaatggaaaacgacaaatcattttatctgggtcgattcactatccgagaagcacccaacatatgtggcctgatttgattcaaaaggccaaagaaggtggcctcgatgcaattgagagctacatcttttgggatcaccacgagccactccgccgtaagtacgatttttccggtaacctcgatttcgtgaaattctttaaactcgtacaacaagcagggctgtacggagttttgagaattgggccttatgtttgtgccgagtggagctacggtggtttcccattgtggctcaagaacactcccggaattgtactcagaactgataatgatatttacaaaaatgaaatgcagacatttgttaccaaaattatcgatatgtgtaaacaagcaaaactctttgcctcacaggtatatttatatttatatttatatatatatatatatacatttataattaattttttaatattgttttctattttttttatttatatgtacatttttattaatgtgaaaaagtaggaaaaagtttgtataattttaaccggtagaatcaaatatatattacaggttaaaattattgatttttttttaatagattattgatttaataaatttttttacaagatattatattattataagtttttttttttttgaaaatttatgtacacttacaacaatagaattgttaaacataaaatagaagtgttttttttcaaaataatttttaggtaatgttgtaaataaaatttacaggggaggtgcaattatcatagcccagatcgaaaatgagtacggattaaatttttttatatataaattataattaattttttaatattgttttctatt

SEQ ID NO: 43118 - DNA, 2184 bp, Cannabis sativa
aacggccaaaaatgcacatggaagctagatctatgaaacgaactaatataatatctattaataataaaaataataaaatattacatttttttaaacaaaaacaacaaaataatatcttttttttttttttttcttgaaatggatataatatctaatttaaatttaactaaacgtatttatttatttttgaaagaaactaaacttattcttatcatattagaattaatttaaattaaacagctaatcctatttccactcaaattatatatatgtatctatatatataatataacaattgttagcattagggtctgagcaaaagaaattattaacgttattcgaagcaaattgtttttgtgtttagagagatgaagaggtcgatagacgaggtttataacatggattctcatgaactggaggagccaccatctatggactgttctctggaatttgtaagggtgttgaaggacgtacttattcccaacaaaatggataaatataatgcctttatgaatgccatgaaagagttcaagaatcaaagattggattatgaaactttgataaaaaagataactcatttatttattgaagaccatcaacacttgatttcaggtttcaataccttcttaccaaaacagtatcggattacagttgatcatgagaaagatgaagatgaagaggaagagaatgatgaagaggatgccaataatattgatgcacttgaagaagctgaaacttttgtgaacaaaatcaagaccagatttcaaggcgaaaacgatgattatatgtatagatcattcttactgattttggccaagtgcaaagacgtaaataagccacctatctcacaagtccataaagaagttgaaatattgtttaaagattatccagacttactcgtggaattcacaaattttttaccccttgaagttcaaaaacataataataataataattataaacttgaccttaataagtgtgtgaattgcacaccaagttatcgtcttataccaatgaattatccaacaccttgtgttagccaaaggacaaagcttggtggtgaagtgttgaatgaccattgtgttttattcagtagttcagtaagtgatcaagagtatcaatcatctaaacatgggagcaaaaacaaataccaagaaattttgtttaagtgtgaagatgacatgtttgaattagacatgttgttagagtctgtgaaatcaacaatcgagcgtgcggagaaactcatggaaagtatgaataacaagttagtaagaggctgtattgaaaatcacttcacacctatgaaccttagatgtattgaaatgttgtatggtgactatgggcttgatattttggaccaacttaggaagaatacttgtcgtgtgttgcctgttatattaaatcgtttgtaccaaaaacgacaagagcatgaagcatctcgttctagttttaataaaatatgggctaatgtatttgcagagaatcatcataagtcactgcttcatcgtaccaagcaacaggacaccgaggcagagatagaagaatcagagagaagttagaatttattaagtggttggttcaatgtaggtaacacaaattttttggttgttagagtacagtttatggatcttaatttttcttttattatatgaggcaacttttattgtgttttattatatttgggattcttagttcaggtgttttggatatatatctaattcactaattaattagattgtgttatttgatgtttatgtattttagatatgagtttggtaattcttttgttttttaatttttaaatcccaaaataaaagtaaaatttttatttttaattttgttttttaattttaaaaacagaaaacaaaaatgtgttctataaaatttatttttttatttttatttaagtcgggtctaggttggattcgaattcgatgtcgagttcagcaccaaggtcgtgggggaaatttgggtctggtcggaatccaaaatattgactaagaataaaaactgtttaaaaaaaaaattaaaattaactttcttttttgtttttaaaattttgattctcaatttaaaaattgaaaaataaaaacagttttatagaacatgttttttaaaaatatttttacttttcccgttttaaaaacagaaaattgattgaaaaaataataccaaacaccacta

SEQ ID NO: 43119 - DNA, 1310 bp, Cannabis sativa
tatatatatatatattatacttgtaatagacaactgtttatattattattattaaactattttaaaaaatttataaatatatagtttcaaataattataaagtactcctaagaaaaaaaaaatgaaaaacatgagaaatacgacatacacgttacacgcatcataaataatttgtaataaatcgaaaagaaaaagaagaaatttgctaatcgtagtttttttgggaaaagaaaaaaaggaataaagaaaaaggagtagttgaagatataaataaagttgttggaagaaataaatgtatataggtacagtgttgtataaacactaactagcaatcacctataaatacaactgctcttgccgatttgttatcaaaccaagttcttgctttgctttgctttggtcgatcgatcaacatatataataatttaaattaagaataatggcaacagtaacacgtcagccaccaaaacatggccaaatggtcactattcttagtgttgatggaggaggaatcagaggaataatccccggtgttcttattgagtacctcgagtctcaacttcaggtatatactaatattggtacataattaatatgaaatattgttaagtatgtggcaaagcgcaccacttataattgtattaaacatttatatgaaagctctcatagtacatgctataaatgaatgaaattaattatgtacatttataggagctagatgggaaggatgctcgaattgctgactacttcgatatgatatctgggacaagtacaggagggcttatcacggccatgttaacagctcccaaccaacacaatcgcccattatatgctgccaatgaaatcgtaccattttatcttgagcactgccctaaaatcttcccacagctaaagtatgtatatctatatatatatttttggaaatatatatgtatagtactaattcacacgtgtctaattatataatgatgaaaaatgcatgcagtggtatctttggtattcttgatccagtgagaggtgttgcaattggaccaaaatataatgggcagtatcttcatgacactgttagaaagatattaggtaccacaaggttgcatgagaccctcacaaatgttgtcattccagcttttgatatcaagaaactccaacctgtcatattttccactcatatggtaataatatttatatatctataatgttaattaattaattaaggtaaattattactcatgtactatttttttttatttttttttcaaatttacggtttggatttctaaagtggttgcagcgctagttgcaataagggt

SEQ ID NO: 43120 - DNA, 2862 bp, Cannabis sativa
ataattggttacttaagaaagttaacctaaactgttttttattcatattttttactctttattttaaatatttcccataaaatatttctttttcttttctttttacaaaaaccatatttttgtaaaacttacccaaaaaaaaccataaaataagtaaccttaatgttacttaatggatctgataatgcacatataaatagacaggcagataattttaaataagtgagatatatcttacattaatatgattggttcaaaatttaaaaaactcgtcaaataaatccaatctttttgctagatactcttttgtggtggtggtgttgtgtttggcataaaacagaaggcctcaaaatccatagtcatactttttcaatttatttccccaaatctacaatgtaaatagaaaataggtatttttgaaattaatagaaaaaaagtaagttagcccaaacacgagtataagcccaacccactattctttctttttctttgagaaaaaattggttgaacaaaactattccacttctatgctacacacatcaaccctattttttctcttgttcaacactatttgagttaaaacttaatagattaagaaacaaaacaacacaggcatcacgttaaaataaacttagaagaaaataacttctaatttgcaactcaatcaaacaataaagaacaatagttataataaaaaaacaaagaaaaatactccacgggctcgtttgtataatgttgtatatggtattgtattgtacaatattatgttgacgtcgaccccaaccaagagccccagaagttgactgacgccaccataacagaccaaacctactaccccggccaaagaagcaccgggggaggccaaaaaccggatccgaccccaagaacccacccagaacagaattacaacccagaaaccaaaccaccaaaaccagaggcaacctaaaacctaaaagatgccccaaggaaccagacaaggaaagtgagtgaaggatggtgagaagagaaatggcaaacgaaagcaaggtgaagagaatgatgaatgaccatccccctagagagcaattttaaactaattaatagaaaatatagatgagaaaggaactttgattgagagaagaagaaggaatgggttatagaaattatagagaaaaggcacaagaaaacggggtggagagggtgatggaagaccattctcccagaggtcttttccttccggcgccgacatcaacattcacactcatctctctctctctctttaggactctctctcacgacatcaacattcacgctcatctctctctctctaggactcttataaatacataaccattcaatattgaatcttccttttgtattaatattatttaatacaataatatgtttgatattaagttgtattaatagattatgtaaaattataatatatttacaataaactcgaccccaaccccgaccctggcttggacttggacccagatcccatccccaaacctcgacctcagacccgagacccagaccccaaccccggcttggacttggacccatatcccatccccaaacctcgacctcagacccgagacccggaccccaacccaaactcagaccccgacccagactcgaataaggacccaagacccgtaattggcctcaaaccttggacccgaaccccaaactcgaacccgagacccgaacccagacgagaacctggccctaaacttcggaccctagttcgggtctaggcccgaggtcgggtctgggtctaagtccagggtcaggtttgggatttgggttcgggtctggggcaggtttaggttcgggtctgaggtttgcatttgagtccaggttttgagttcgagatctaggactggagttcatcccagaccctttgtaaatattataatacaaactaatacacactatttgttatgtattaaaataatatggttcacattgtattaaataaggtcgtaatgattaatacaatataatattttttcaaatatagtattatttgttatttaatacatacgagtcttatacggcctaccaaatgagtcccttatatttttttgcacatctatataaagttcattaagattggaaatttgattttatatgcattcattaggctaaaattggtatactaaacataagtttatcaaaattgttagaataggtcaattttacattaaatcaaaaattacccctcccatttttcaactcactctcatctctctccctctattctctcttgctccctttgctagaattgaaccaccacaaccaacatcccaaccccaaaaaaccaccatctcagattctcaccaacccacgaccacccaacaacgatcacgaacatctcgaactttcaccaacccatgaccactcgcgaccactaatgtctacggtaagtgttcgagccctcccttttaattttgttgtatttttggatgaaagggtttataggttattgatttagggtagaaatttataggtttattgatgttgtctgtgatctgtgagttcactactacaaaaacaaattttctcgacgtttttaaacagtcgtttaaagtattcccgtcagtttctataactgtcgcctatacgaccatcgtaaaatgggcaaaatagacgacgattaaaaaccgtcgctaatgtggagttcccggcggtttaaaaccgtcgcctataacaaggtataggcgacaattttaaattgtgtcctatattataggcgacggttttaaatcgtgccctacactataggcgacagttgttgggctagtaggaatttgtcatttggtttccatgcccaacagatacactcagttatgcttagaattagaaatttctaga

SEQ ID NO: 43121 - DNA, 1481 bp, Cannabis sativa
ctgataaaatatttccaacaactccaccatatatagatagagaaacttcaaattatgaattctagttttagaaagtgttttagcgagatacttaccaatttactactaatttgacttaggaccttcgatcgtcaaacagatttttactgaggttgactagcatacctgaatcaggatttgaggtaagaaaaatattcagctgcgcatatgcacatgtttagttacacatgtatgatattcccatataagtagcatattagagaaaatagtatatatgtacatagagttgcatcaagatacttatatctagtatattagaaactattgaatagtatggattaatgttaccaacatcagtacgaatagagtgttggaattagtttagtattatggttaatcatactataggcacaaatatttagatgccaatttatacccattagatacggttagtagacttatggtaaatgagtgtatgagcggtaaattttcttactgagtctgtcgactcacaaatatacttttatctgtaggtgtaggtaaagtcaaattacaatgaaagtagagcttggtaaagattgtacatatctatttgtgtaaatccaaatggttgtaatctcaaacgctaacatcttttgattgtgtcgttagaatgtgaaattaaaaattattattttatttgtaaattgtaaaatctcataattcaatatatatatatatatatgaatatattaatttatattatatattatttgtaattaaacttatatattttcattttttataaagccttgaattaatttttaacatcaaaattattaattacttattatatttatattatttttataatatttgtatctacctaatcaatatatataatttataagttataaaatgtacatttttatgtatagatatatattatattagtataaattttttaacctttttacctagtaataaaaaacctttttacccagtaatagaaatagaatagtaaaaatatatattttatgggtttttatactgtttttcactttcaaaaaaaatattttgtggaaaaaaaattaaaatacacaattaaaatactataagataattgattatctaaagagataactagttaccccttgttcttttaaggtaattatacactgtaaattgtattcctcataatttttttatactttaaaatatatatatatatattttttatggaaatcctcgtaaaaatctttaatcgcaacctaaatccatatagcaacccatatagaaattactggaaaaactacccgagccacccaatccgtaaattaaaaaaaaaaataaaaaatagtatatgaaataattttcaaaaaaaaattctaataaattaatttttgtaaaaaaaaaaaccatcaaaaatgaaataattccttataaaattagagaaatttacatggtatactaatttttgctattttttacttttttactgt

SEQ ID NO: 43122 - DNA, 4934 bp, Cannabis sativa
aagagtcccaaccaaacaacaatgaagacaaccctacctagaaattacacgtggacgggtcagctacagattaactgtttggtgcagggattgcccttgtcacacttggggggcaacatctgcacggggcagtcaagtttggatttaaagcttccaataatgaagtagagtatgaagccctcattatcagtctaaaacttgctcgggagctacatgttgaacacatcgagattagtagtgctcacaattagtagtgaatcatgtgtctagagaatacgaggcccgaaaggagaaaatgatagcctatttgagcaaaatacatgatctgcttgcacaattcaagagctatgctctcatgcaaattccaagagaagaaaatacaactgctgatgccttagcccgacttacaagcagcaacataatagataaggctaatctaatcctaattcaattccttgaagaacccaacatcacttgtgcggaagaaattaaaatatttgacacaacaccgaactggatgacaccaatagcagcctacctcaatactggagaacttccaaatgacagaaatgaagctcgaaagatgagaagaaaggctggacggtatatcataatagaaggagtcatgtataggaggggactctccatgccactacttagatgtgttacacaagaagaagttacacagttcttgtctaaagtacacaatggattttgtggcaaccacgcagccgggcaaagcctatcaaagaaaatactaaggcaaggatatttctggccaatgatgattggagattcaaaggcctatgttttgaaatgtgataaatgcaaagattttcaaagataccccgtgcaccgcccaaagagctaactcagatgcgaagtccttggccttttgctatttgggaaattgatctaatcggacaattgcctaaaggtaaagggggagtacagtatgtagtggctgcagtgaattatttcactaaatggacaaaagccgagtcattagcaacaattgcatctaagaaagtgctagactttgtggtgaaaacataatatgtcagttcggactcctgtacaagatagtctcggataatggcacacagtttgacagccaattattcactgatttatgtgcgaaccatggaatcatgaagatttttctctgcagtggcacacccttaggaaaatggtcaagttaaagcagtcaataaaacattaaaatataccttgaaaaaacgacttgagaaagctaagggaaactggccggaagaactaccagaagtactatgcattactacaaaagacacttttagtgtcagttcaagtttcatttaatttaaaaaactgacactatagagtattcttagttttaggtgttggtttaaaactgacatttaaaaagctcaatggtgtcggtcagtaaactaacattaaagctaaaaccgagacttaaaagaataaaaaaaaaaatcgtctcagtttaaaaccgacactaaagatgatacaaaactctttagtctcagttgcaaactgagaccaaagggcatatatatatcaatatactcatctcattcccagaccctcatatctctctcaccctcatctcattatcgatgacgtctcaccctctctcatcctcgaagagttcatccctctctttatcgtaccctaaaccccaatggtcgctctagaatcagtggcagcggtggcgaggcttcaacgttggcaacatctttggaaccgggggtaagtctctccactttccacctcgaccaatggggaacccaagcattgcctctaccaggttcatttcggctcctaacacactaacggatcctgtttgggatacgatgaagagggatctatcaaggattgtgagcaatttgaagtttgtggtattttcgaactcgtatcgtcaggaccccgccgaaaaggcattgagggattaggatctttggggttctttcttcttcatagtgttttaggtattatatatgatctttatattaattatttctttcgattttaaaaaatacaatttgcaaattaaataggtgacaagaagcataaacacaatttctacagtggatgcaatagtaaaagcaaagttatgatcatcattagtataatattatttctacaaaatttcaccttattcttttctataatgtaattaattttgaattttcgaatatgattataattaattacaatataccttgcagtgaatatccattgtcaataattttggttggcgtagatgatgtaccttgggtcttaatccaaaagttcgatgactttgttacatctcgggcttttgacaattgccaggttagttatataatatttcgcaccccataatattttatcattatttagtttttttagtgtactctgaatctcataatgatgattagtttttatgtgtacatataataattgaagctcgtgaattcacaacgataatggtgaaagacatccccatatcttataatgaaacagaattttttgtggaagcattgatagaaataccatctcagtataaagtaactatggagctctaacttcttgggtaatgctgatcttaaattatacattagtctattaagataatttataattcatgtttaaagactgattaattaagatcatatataactgcatatgtatacatacttcttctaacaatcaatccatgttgagatcaatatggtgacttttattcctcactcattaattttaattaatcattagatgttattattaattattataattaaatgatggacgtggctagttaataagtaatgtatacatatataagtactggaatgagtagaaagacaattcacaaactctccatatatacaatagttttttgcttgtcatttacaaaattctcctcatcctctgtgtattgtctacaataacaatttggtctttgactatggacaagacttggtgtattgtcttgcatgcggtgcccacatgtataaataatactaaagataaactaaagtatatttttattttgtacatttaataaattgcaccctgtaatctttaattatgcacttaaatatcatgtgcttcgattttaatttgaaaatattgatagttaatggtaattacaaattagaagtatgtttatcaccattctaaatagccatatttcaacacccaaaatttaggaaaattcgatattaatttatactaacaatagcataccacatcagaaaagacatagatagtagataccttaaagtgtcctttggcaataccccaacatataaatatatataatgcctttgcttcaaagcttaatttcagcaatgccaattgtattataaataattgtaaattttcttataattaaattttattttatatttgtattttgtgtatgtctatattgtatatagcagggccagtatactttgttccataatttttgacattgagataataaactaaatttaaataattttgaactgggcacttaaggtatagtatttacaaggatcttgctgttctactataaagtatagacattttcaatttaagtatttttaataatttatgtgatttcatttcacttggaatggtttgttgtgtgttttattatgattatatctcagtgtggcatttgtgctaattgtaattggaatgacaggtgtgggcattgtaaaaaacttgcacctgaatatgagaagcttggagcaagttttaagtaagtaaaatctattctaattggaaaggtgagttgacatttttatatccttattaatatactatatggttaccgtttgattttattagtaaggatggttaggtggttgtgatttatttcatgagttgatgcgatttttccatgtaattgtattttggttactagtgttggagcaattttatacctgttaagttatctaatataatttgagggatctttctctacactgaatttctaatgaagacatgaagttcagaacaagtggtttaatattgaacttattgcaatttctttcatattatagttcatgccattgttttaagctgtaatcagaatgttttgatgttttgtggtaggtggattgtgacgagcacaagagcatttgcaataagtattgtaattttgcatatcccaatcttgagtggttttcaaaagggtcactcgaacccaaaaagtgagtacattcctctttccatcacattatagtgtttacataaattttagtcaaaaagattgaccacaatgtcaggttagcagtttgtgaacatattattcatgatatatgagtgctgaggccaaggttcatcaccaaagaagaaaaaaccaacaccaaaacaaaaacaaatatagagattacatattccatgtactttaatctgcagactgtattagataaattttttcttttttgctctctttataataatactttttatatattctgattagatttttcatgatttaggtatgaaagccctcgtactatagaagctcttgcagaatttgtcaataaagaatgaggtatttttcaatatttttttatcaagctacagtgctaatgcaagtttgttatgtatgtatacatatggattatttttttatgtagttgatttagtttaattgtttaggtttgttatatatttttgtggtagtgaataaatatgtttataatttttatgtagaataatagtaggtttttttttaattatatgtaataagtaaattattttaatttattgtaaataatatttatattatgtttttaaatttctttttgttgattttataattttttttaattttttaatccactttaagtatctgtttaaactgacactaaaagaaaaaatatatatgtatactttaagtattggtttagaactgacaccaaaactcaatagtgtcagtttagaaccgacac

SEQ ID NO: 43123 - DNA, 4298 bp, Cannabis sativa
atgctcattctaggtatataataattaacctcttttaagtttatatattgctttaaaccatattgttattgtttcaaaaatagaatttatttattgtatatgaatgggtaaattcattttggaccattttgtttatcgatcagttttattttattaaatggtaatttagactctgtattttataaaaagaaacataataatacctgatcgaggtctaattaattttggtcaacattttttttttgttagaaatagagtagaattgaattaccacaattgttagagttagggaaataaaaaattttagggttaggatgaagattgaagacgagttaggataaaaaaaatagttcgaccaaaatcgaattcatgagtgtattagatatgttccttattgcaaaacaatagaaccgaatttttcttttaacaaaataaatagaatcataacttgataatttttgcaaaatacaggatctaaaatgatatttattctatataatttaattttattttattcaattttgtttgtaacgtttgggtgtgcatatatcgatcatattacttataatttaactaaatataaatttgagagacacttatgaatatgatcgtgcaggaacgtttgcgtttgaaaatttggcgacgttagcattggcggtgaacttaatcacatacttcatagcattcttacacttccaagtagccgatgctgcaaaccaccttacaaattttatgggaacttcttatatcctctcaattctcatggccctcttagcagacacccttgttggtagattcagaattacactcatttccgcactccttgaactcatggtacttaataaattaagggataattacataaaacactatttttttttttaaacaatttatatttttacgtttaaatatatatgtttttttttttttttatatttttatggtattctataaaaacaacacaaaaacaataagaataatatagcgcaagtgaacctaactaataagattacgatacaaataaatgcagggattcacactgctaacaatccaagccagtatgccgaagctgaagccaccaccatgcaacctcttagacccaaccgcaacatgcgaggagatctcgggaggcaataaggcgcttcttttcgttggcctttacatgctagcatgtgggagtggcgggttaaaggcgggtcttccaacacacggggcagatcaattcgaggaaaatgacccaaaagaggcgaagcagatgtcgagtttcttcaacttgttgttgttggcgttgtgcctaggtggcgctattagcttgacacttcttgtttggattcaagacaacaaagggtgggattggggttttggtgtctccacaattgctattttcttgtctatcattctttttgtatttggaatgcccatttaccggtttcaaactattcaaggagataatcccatgtttcaaatcatacaggtacgtaattaattaattgttatttagttcaattaattaaatccttgatctttttttttttaattagggttttgttaacaaaatgtgtcatttatgattacttgtattttaataaatgaatacaagtaagatatatatagtcccaatctagacatgtttaatattgctaaaataggttatggtgagtattgacctaactgaggcatacaattttcttttctaaaaaataattaaaaaaaatctaaataatttattgtacttaattagaattcaaatagtttgttgcatatatgcatgcatattctttcaaaatcaagatctcttattaaaaattggtgtctcatactgtgttaaatttatcaaagtttgacacatcaattaatctaatttatattaaatatgttaactacttttgttgactttattagaagtttaatttttttataaataaaaaaattaattgacgtgtcaaattttaattgattcaacacaatataagacaccacttttaaccggagatcttgattcatcttttcgtttcttttttatgcgtgaaagacgactgtttacactttaatacaataaattatttttaaatttcttaaaattttgaagaaaaaaacgtgttataattacaataaacaccataatacaatttagggaaaaataaatttcaggtgtacgtggcagcgattcgaaatagaaatctaagtcttccagaggatccatcaaacctatacgaaattaacaaagacaaagaagctgctatccaagctaacttccttcctcatacacaagcatttaggtgtgttcttatatctattaagtagaaatttaaattaattagatactattattttgatatattaattaatgagaagcttaattaataattatataggtgtttagacaaggcagcaataatacaagaaacaactacttctccatggagactaagtagggtaacacaagtggagaatgccaagaccctcctaggtatgttcccgattttcgggtgcacaataatcatgacactttgtctagctcaactccaaacattctccattcaacaggctcaaactatggacagaagtgttatatcaccatcctttaagattccaccagcctcactagctattctcccagtaattttccttatcttcctcatccccatctacgatcgccttgttgtccccttccttcgtcgcctaacaggcatccccacaggtgtcacacacctccaacgcataggagtaggcctgatcctctcggccatctccatggccgtcgcagctatcctagaagtaaaacgaaagggggttgcccgagaccatggcttgctcgaggccatacctcaagtccaagccctaccaattagcatcttctggctctcctttcagtacttcatattcgggatagctgacatgtttacctatgtagggttactcgaatttttctactccgaggctccaaaagctctcaaatctttctcaacttcctttctttggacttctatggctttagggtactttttaagcactattttggtgaagattgttaatagtgcaactaagaagagtactagaagtggaggatggttggttgggaataatctcaacaccaatcatttgaatctattctattggttactttcaattatgagtttgattaattttgttgtctatttgtttgttgctaagaggtacaagtatagggttcaaataagtacaagtccaaccaatgtggactattatcattccaatgagattgagcagaagagcaatgcattgtgatgatgaaggagaaaaaattggaaaaaaaaaacgaaaaatatttatagttatgattatgaatgtatgagtttactttttataactagtagagcttttttttttgttaattaattataaaatcaatttgatatgtactagttgttatgttttattctttaagtttaatttatttacatatttgtcattgtgtagagagaaaagcttgccaagagtattctatgtattgtgttgtacttgtacttcaatcttcatattatttaatatttaatgatttaattaccagttattttataacaactattgcagttttattttggaaaaggtacatatattgctaattctttttttttaattttttacacttatttatttaaattgttttattttttatatttttataatattttataaaatataagaaaataataagaaaactatgtaaaagtaataagaaaacaacaataagaatatatatgtaaaaaataataataaaacaatataaaaataatatataaataacaaaaataaataaataacaaaataacaaaagtataacataaaaataaaaatatatatgcaaataaaatctgagaaaacgacaatattgaacagaacaatattttgagaaaacgacaaaattaaggaaaaacgacaacactttgagaaccaagattcaaattaaaacgacaaaaatctaataaaagaaaacacttataatacatgcaagctcttaattagcatttagcttttaaccaaaaaagagaagataaggtcctcaaaacgaccatttaacagaaacaatagtattttcgattaaacgacaataatacgtaaaaacgacaacattaaaggaaaacgacaatactttaaaaacttcaacgtaacaaagttcttacgtaatgtttcatacataatctataaatgcaagaatatcctttattaatttacattcgatttcaaagaaaagaacaacaaatttcaaaaaacgacaaattttcaataaaacaacaaaattttgataaaacgacaaa

SEQ ID NO: 43124 - DNA, 5781 bp, Cannabis sativa
  modified_base (53)..(74): a, c, t, g, unknown or other
gtgtttaatttatcgttttagaaatttcttatttagggtgttaataaacatannnnnnnnnnnnnnnnnnnnnntggtaaaataaattccaacaaccgtatttttcctttttgatcatcgctgcaacgagcattctcttctcctcgcattgatcaattatgagttaccatgtacctcgcggtagccctcgcctcttcacgtcctgctcttcttcctaaggtttgattcgtctcgttccccctattgggatttgtgcgagctcctttcctatgagcttggagagaacgttggcgatccccgactgatgatccatgtatcccaggctgtgttcccagatttcccttattcttatggggaatttccagtttcttggttcttggttgattatagggcatctcaccttcaaggtatctctcaatttcctcaggttgtctctcttgagagttctggggatacctttgggttgtctcctcccccctggtttgcaagtcacaaggtttgcctcgtgtatctctttcttcaaggtcaggttgattttgggaactattctcttgtgccaccctgactgtagctatctcacgctctaattcagcattattacgccagtttgtttcttccaatcagcgcctaaaatggcagttttctaactcaacgtacgataggtatgtacctggttagatcatagacgccatcctcgtcaacttgattaagaagagaccggccgttgcttatcctaggccaataccactgaactaacacttaaaaactactaaaaaataaaaacccttaagtgctagtttataacttacagacacaacacaaaaataggttaaatttttaagaatagtttataattaatgacgtaaataagattcaaataattaattacaaaccatcgaaaagctttacatatttaaatttaaaatataatatatttggacttattaagttagattttattgcattgactacacatataatatagtaacttaaaaagcgtggcaaaagttacatacttaatattttgtatacatattaatcaaattgaggaagtgatcattgattgaatataagggtcacgctcaaaggaggccatgttgtctttacttaaagtcaagtaaacctctactccatccccctcttttgtgtccatcaatgtcattatattttcataagaaatataaggtggattactcgcccaaattggcttaccccaaccaaaatcaatctcataaaatccaaaattacaccagctcgaacaaatgaaaacattcgcatcatcttttctaaccaattctcctccttcttcagaccaccgagataacacctccaacccctcctttcctgctctcaatttttttgcttcgttctcactatattctatatttcctttcctcaacttagccaccaaatcacaaaattgatctgatttattataatcttcatcattagttttacaatctacactcactgagaaatacccaacaagatttccaactaagttttctggaaaaggaggctcaaccttttttcgtagattcacacactgagccaaaactgagaacctatgtcgcttatttgcatttgtcgcacaattccaaacgaatgcagtcacaacttcaactcgagtagggttattaaccttagtggctttggccttaagatgaactattttagttttaccaaacacgtacctttttgttataatatctaccatgttattcaactcagagtccgcagcaggcggcaatgtcaccaaatctcgacccggaaacagggacgcagccctgtaatccgggtctaatgcttgatcgcagcagccatctctgatggctgctttgataggggttttagcccaacttttcatgaatatgctgagtgtggctgcatctgcaaacttatgcgacatgcagacaccgacggccaagccgccacaatcaaaggaagtcacttgaacgagcaatagaggccaagtactagttgcctgatcaatggataccatattattagccggaaggaattgcttgagtaactcaaccacattattgtgtgatttttgctcaagaaaagttgagagagagcctttgaatttggcttcgaaaaacggaacgccttcgtctgtgcactcaatagttgtgttgttattaattctaccggctagcggaaagaagctacgagccaagatttttgagagtgttttctttaggtagccatgatgatcataagatgtatcaatgaggtcaatatgattgttataattctttggatagaaaagaacgatcgaagtgtatattgctggggcaatttgatcaagaaaagagagattgaagtgtttttggtgaggaggagttggataagatggttttatggtttgtcttctaacaatttcaatcttattgatctccataaatatatacaatgtttccttatattactagctttttctttttcaagatgagagattggtggttttattttatcatttttatgaatgcataatgagcagtactttaaatagttaattattacgtacttaattagggaatagggttttgtagaagtgtttataattcgatcgctagcttgtttgttatatagcagaaaagatttgtttcaagatcaaattagttatttatttatttaggaaattcttaatttagtaatggatatatggcatatattaattgttatttattgctgacctaattatattcaatagatagatacctacccaactacttgattgttttctctttgaactaattaaaccaactacttataatatttcactacaaaaatcagttagtttaagtaataatttttattcacaatataaattttttgtcacttataaatatgacttttggtcacaacaaaaaaactacttataactaaaatatagtatttagacacaagttgtcattaatttatttttagtcacaataagtattgtgattaaaaccacatttaatctcaacgagttgtaatttttgtaattaatatctctagctataaatcttttagtcacaatataaaaatgataattaataattggtcacaatttttttatttttagtcacaatttttgtatttgactaaatttttcatagtgtcttccatgaaaatatttttaacttgacacacacaaattatatactatatgtttaatgctttattaatttatctgacatttaataatcatttcatttattaaagaaaatcattatagctacatctggctgtagtatagccatacatagcacacagtagaaggtaatattacaataaacatttttatatatatatatatatagatatatatttatatatatatatttatggagaacaaaattattctaattaatcttcttgcccccgatggagactgaaaccaaatattagaactttcaaacctgtgagttcaaagtggatggataagcaaatgcaagaagctgagggtcagtctcaaacaaagccatatcctctttggtcaaagaaaccgtagcctcaacaccaccctcttttgtgtccattaaaatgatcacattgctatggctttcggcagccggaacagtcacccaaataggcttaccccacccaaaatcaaccatcttataaagctcaaagctacacaaacttgtgaaaatcaacaccttagtatcttcacatccaaataactcaaaagtttctttcatgtccctacctatcacctcacacgccccatcttctcgaagcttttttgctttagtttcagcatattctcttattccattccttaacaaagccaccaaacccttgagtgtgacctcatcatcatcatcatcatcatgccctaattccatccgtgcaataaagcctccaattacgttccccaccaagtgttccggcaaaggcgggtcaaccctttttcgtatgttcatggattgagtcaacgcaaacttgttaacaccattagggtttgatgatcttgttgaagcagccatgaaacacttccaaatcaaagctgtgactacctcaaccctagtcggttggtccacactttcgctagctgtttcagccttgagtttcacgagcttttgtttctcaaacacaaacctcttaactactgactccactttcttcaacaccaaggcaggtctctggtcggagatttctatgggagggaagtaggaggcggcgttgaacaccgggaacactttttgtggagactcgtttgatatttcagcccaacttttcataaatattcccatacttgttgcgtcacatgatttgtgggacaagcagatacctagggctaaccctccacagtcaaagaaagtagcttgaacaagtagctgaggccacgagttcgactccggcgattggctttccgaggccaggagatgttggagttgggctaccgatagttcttgttgtagaaatgttgagagattaaggccgtggaatcgagcttcgatgtatagagctccttcgtcgttacaatcaatggcggttgtgttgttattgattcttccggctatagggtagaagcgagttaaggtttctgataatgatttcttaagttgatgtgatttttggtcgttggtggtgataatattgatgtcgtttttagtgttttggtagaaataaattacttggccgtatatttctggttggaactgatccaatagagaaagtttgtggattttaaggtcaggtggagttgaagaagatgggtttatggtttctcttttaatgatctcaataactttaacctctgccattattgattatactccgacctcgatgattgtattctttatttgtttcttataataaaatgagcatacctatttaactcgtattaatgtgatatatctattaaattaaaataaagagtattgttattaaatattagtggtgtgctcagcatcttctacaagtggatcccaataattaaatagtaattttacttaaaataagagaaatgctaaaagatattagtagtgtcaaattcgttcctacgtattaatatcgctattagtttaattaagcgtcaggctctatttagtttagtataataactttaagggagtatcactagttagctactcaaaatgtgacacatcttaaggatgttaggcactactaatgtccaatgacaatgttcttaaaataattgaaatctcatattaattaattacaccaacggacacttgacacttaaaagacgactagataccaataatatatctttttaaaattcaaataatatataccttgtaactcaatacatttagttttccaaataagacaataatatatacctttgttagtcaatacatttagtttgagaattaatacaaagtgagaatattattattagtttataaagtaggaagccggcaccacatattttattcatttaattgtgtaaaagtatctaggaaaacttagataatcactatgctttttgttttggtgaaacgtccagaaaaactttattaaccatatacatattacatccttataagattgaaattaatattattttaacattattttatttttttggtgataatcactatgttgatgaaataaaatttatttcttaataacattgatattaacatatttgtatacacatatgcctttactatattatattatcactaaaaaaatataaatatgtgccgtttcataacactttttaatcagttttttatttttaaaattaaaaaagtgaaaatatttttcaaaagcatgttctataagattatttttacttttcaattttttaat

SEQ ID NO: 43125 - DNA, 2459 bp, Cannabis sativa
  modified_base (2364)..(2369): a, c, t, g, unknown or other
agtaatagcagggacttagttagaaaattagttagagggttatgttaagagtgtggctgggggttatgctacaccataaggaatagaataaacagagggagggcgttcatttgtcggttgtggagaagttagtaagggctgtaaccctttgtgggagagattacaattctggtctattatttccctaatgtttgtgctattgagatagatttgtgcaggggttcctatcagattacataagtaggcagtgatattacattaagaaactctaaccatcttgaacctccttgcccccacaatcaattaacacagaaagtcaaccgacgatggaacaaaagtttctaagtaaaacaagtccttattgtgacaggctccaatctcctaattaatctggaagcatcacttagaaaagatcatctcaaaacattgataatatatacaatcagacagaaactggccaattgtataataacaattaaacttattcattcagggaacttcgtgacttccgcaagaaatataatataagatgtttgagttatagctgacctttgtaattaaagattccttcatctcagccacagttataaagttcacacgtgcagcctcactgcatgaatgagtgcataattttagtaagagaaatgcatatggaaacatattgttctaattgtaacagggtcaagaaaataattaaaaattctcacactggttttggtagctcatccctttttaacaagccatccttaacaagctcttcaagagatatcaagagagtgttaccacaatttgcatcctgaatattgatcatcaaagacaatcatccacaagtgtgcagtgcaacagatacaaaaggactagtacaacccaaacaccaaaggatttttaagaacaatttggagtcttctagagtaggttagcttggtcaatattggtgaatttcaaaattgttagaattttcagtttgccaaacgaatcaatcttatgttttaaagaagaagccaattacaacacttcatgttacctggcctgagtaaggggacccctcttcgttcgccctcctccctggaggaacaagaggaagaacctgaaacaagaatatacatttaaccataaactaacaaccaaactccaaaaatattaaactaaaagtgagcttttatccataagggaaaaaaaggaaatcattatttcaaggaaccaatcacggcataacgtctataatgtccaactacagttacattaaaccaatatctcagcaacgaaatagtgttgtctgttaagatggaaattgaaaattcagttgctttcgttacagttcaagctcatataaagcacttgagtctcgaacaaaatcggatttctgcttaaacagtttttttttttcggaaaactgcttaaacagttaaacataacataaaactagtaaatgttctcggcagccaaacagattagtatgaaggaagttcacacacctgccaaacggagcaaccagcttggtgaagccagtcaataaaacgaaatgcctcatctccaagatcgccaattccgtgaggtccatgaaacgaggtcgggtggagcaacacaccagctcttctgcgaacggtaggatccggcttgggaaagcgttcgccataatccaaaggcaggtcttccccaacgccgggaagcaccgaaacggtgtcgttcttgaattgacaacggagcaagggaattcttggtcggaggtgcaaacgagataatggagacgtagcggggggtgaagagagaggtgaattgtaggttttggaagcggagaggagagagaaagacggggagaatgagagtgagatggccattgttgaagtatgagagagagagtgattagagttgcagtaatcctcctgctacctaccagtggcagtggagcaggaggaggagaaatacacgtgatgcgggcgctgaggtggcgagtttaatggcttctactcgatctcaatcacatgtcgttttccttttttttttttttttttgttaaaatgacaaaagttttgtaatgcaaatttatcataaaataaatattatttcaaatttaacgtaatatttagagtaatttaacttaaatttaattttcagttataaataaatatgtaagtttaattttttggtaataatacttaagttataattttagaacttttgtagatacttcactgttaagtgttaagtaaattgtcacatgagaattcttaattggtctaagttattaaatttttatttttaaaaataaataatttaaatataccagtaagaaaataacacgtggataatgatttaatatttaacagttaagtatctacaaagtttcaaaattataacttaggnnnnnntaccgccaaaaattaaacttagatatttatgccgtaaattactcttttttgttttactaaaacacagtatttttataactttaaaacttt

SEQ ID NO: 43126 - DNA, 5007 bp, Cannabis sativa
  modified_base (3526)..(3526): a, c, t, g, unknown or other
atttttttctaaccttgagaagatttactgtattgagaccagaaggacgacctttgacttcatgcttttctgatacttcattgacttctagaattccatcttcagttactaacttttgaaacattgtggcagcctggaaagcaaaaaacataagaactgtaaaaagggaaggtgaaaagaattaatttcaaagcaagaaaagtgcctcacatctaagtcaaacaacttctggcgttcccaatctagttgaagctcatagccactttgtaaaatgtagggacgtactgaccaaaacttctctggcttaaatgtaccgatctgtaaataccgttgtacacagaacccaagggttggagtttgacatggtccatagctgaaggtaacaaaattcattaattcaattagatgacacaaaattacaaaatctaattgaattttaatattgtaagagacagacacatatatacacacttatcgcaacaaatgacttatgcctaatagagtgaaaaagcaagagtggcgtataattgtgaatgtacgtaaaatatgccaaggaaataagagaacccacgagataactctagaatcaagatttccatatttcccttgaaagtaatttgtctgaaaccgtgtaaatgcgaccccaactttcaaatcaatctcttgtcgagcatcaactgctagtgactcatccttgttaggttcagctagattttccatggccttcaaaatgtctttttcagtaacagaggaaaaacgtgcacgataaacctttcttcttgtatcatttacaccaaagccagtgcactcaataactgcaataataaatttatttaggtactttaacttgttaccagcatttattcgtcttcaaaaaccatatcatatggtcaaagaatgttcaacatcttttcatgtacttaaagacccaatagagctatcactccaataattctcacatgtgatttagtgtcatgattttgggttgatataactaatattatgaaagtgtcaagtaaatcggacatttcatgatataagaagattcaacattcaacatcatcttataatgtggcatgtggtttcaatctagaagaatttaataaacagcctcatcatgataccgtttctcttagtcaaagaaattttttcaatattattattgttacactacattaggaagtatttcacaacaagcatcaactaaataaaatacgtatttaaaagataaatctaataaagtatcagaatgctaccttcgaaacatatattttctccctcacggtcacaatccaaccacaaaaccaagtaactacaaccacgagcttcttgatttaaatgcctacctatatgagcctacacatcaagaaacagtcaaaatgcatgtgatttttgggtttcaattattttatattttattccacatttcttgagggactgatttaatttgatgtaatattgatgttatcgatgacagcaaatgcatcatgaaaattagattcgaaatcataaggtcccaagcattatataactcaaagcaacagcaaggaacaaatgtacaataggaaatcaattgtttaataaaataagacaaagaaattataagggaaaaacatatagaatgaaataaaagcaaacaacagcaaaagtaccttaggatttgattcattcttaacgattggagcttcaaaaagatctagaggatcggtcaaattccagtcttgatatttttgtggaaaatctacactagattgacaaacaaaagtaacaataattggaaagaggcaaacttattactagaaaaacacacaaaaggaaaatcgtaatatcatctatttcaaggtgaaaagaaacatcaattacatgttaaacttgctagaaatgtaataatgaaataagagcctctgtcatcaacaaaatttagtttacatcattccagttgatgtatatgataagcaacatcctctacagatgatttattaataaaagaaaaaagtataatgaaagatagtattaggatagtaaaatttgagaagactaatctaaagaacataatttaagaatattggaggccaatagtgacaacaactctaaaagctctgcacaccctctaaataagactagtagttgataatgactttatctctccctattaaatagtaaatgacaagcaaggacctgaaaacatgtccaatcacagatgtaactctatattgtgctctgaatccaagaaaattcccatcaaattcatgaacatctgtactacccctccttgtactcatctgtacaatgcaaacattcattgtatcatgaatctcataatgacataaaaaagaattaaaagaaaatcatttacataacatgagaaaaactaagataaagcatgcactagcaggaacacaaaactaatccccactacttattaataaggtgttgaggcatattcaactacataaaactacaccaaataaatatacaaaggaaaagcatatatcacttatgtttttagtgatactcaagtttatgtaaccacagtaatcgataagaaagagaaagaagaatgagtgttcctaaagaacacagcattttcaacttatcattgtccttgttatcagtttcaaaaaataacaagaaaaaacaaagctttaactgtctgctattcttaactatgctcagtaatctgcaccataatttcagcttagttaagccataagaagatcaacaaacttattcacagccatagaaaaacttaacaacattacaaattcaaattccaatagattcaacagttccaaaacaagtatcagtaattcataaattgtgattaaccagaaacatcatagtttcagcatatcagtaattctctactctaaataacaagaaacactttctccgcatccaaacactgaatccatcatcaatacatacatatcacatatatatagacaaaatagagagagagagagagagagagagagagagagagtacatgagcgcgagagagagcgttagcgatagagagagcgatgctaggcttctcagcaacctgtaaaaaaaaacaaaaagaatgagttgttttcttcacagggaaaaacaaaaggaagaacccttggccttggccaaagccacacaccataagaactttgggaggagccatggcgatggtggttggaattagggctttgatttgagaagcctttgtgtttaagccatttcccgactgaactgagtgaagaaagagtaagaacgttacttcctttcgcaacgaagaagatgaatctatgggccgaagagctggactttttcccaaaggggcctaaaattcttaagcccaataaacaaaaataccaaaaagcttaaaaagcacttaaaaatacggaatattacaaaaatatgaattctaagtttggggtgcttgcacacctttaaaaaaaggtacatcgatgcaccctttatctgtttcagcattcgaaagaattttttagtctaattttttctgttgttatgtatgttatagttatttaanacattctgtaaaattttaaaaaatttggaataatttacaattttaagcagtattcaaacaatctattttatatgcgtataatataaaaaaagtcttgagtgcaacaaactatttgaatcctgatttcggtgtttaatttttttttttttaatttatcaaaatttgaaagatgtcttaaataactacaacgaagacgaccatgaaaaaaattagactgaaaaatcattctacatcggaaataagatagaagtgcatcgatacacctcttttaaggagatgtattgtaaaaacacccaataacttttacatatttgtaaattatttaagtaaacatttccaacatatggtatttggcagcatattcccttgttggactgagataatgagaaatccaaataagtggatttataaataaatggaattatttcaaaaaatatatgtatataaaaatacgcttgtatggaattttaaatatttttacagtttttaagattttatttatgtgaaatacgattttttgatatatttttatgttataaatttattattatgttgtcgattttttattatttgtatgttatttttcagttactctcatgtagtttttttgttgttttttttttttttttttgtgtctatacttatagaacacctcaaaaaatttactaagaatagcaattatgtaattttccctaattaaatcccttgcaccaaaatcaaaaatagcccactaaagttttaggctttcaaaccacttggctagccaattgtgttcaatatcatggatctattaagagaacattcttattagtaattgccaatttgataacaaaattaactgctttaaaagcaacaaagaaaagataaaattatccctaaaagaaaaaactcttaaaattagagaaaaatataaacttaagggtgtctctataatttaaaatttatttattttaattctaaagaaaatacatagcatgtagtttaatctcttattatgattcatgtaagtcgagaaaataacttaatttacgggtaagttgaaacatacatgtttttttttcattagttaatcaaaaataactttattttaaattcaattaaaatgtgcccacttatataactccacattaccaattatattctcacaactacacaagttagagttgaatggagaatcagagtatctttagattatagaggcataattggtagagttgttgaaaaaaaaaagtagaaatgaaaaatatagaaagagggggagaaaataaaacacaacttaaaagaggtataccatctaatttcctccttaatttatatttattaatttcaaagatatttctataaataacaaaaaataataaaaagtttacaaaaatacaggtttgcaaatttttttatatttttggcaatttttaacttttttattttacaaaaatataaacacttatttcatattgctactacataaaagtaatgtataa

SEQ ID NO: 43127 - DNA, 1153 bp, Cannabis sativa
atacataattttgtatgtatgtaattaacagaaacttaactatctaactaacctgtccttccataatctatgtaatccagcagtcatcacatcattcattagatcatagctggaagcaacattgctgaagacattacccaccaattgactcttttcatcttcccttacttctttaaaccctgcaacacaatttgttcaaacaatttcatgagtagaccagaaaaagaaaaactaatcactcatccaatcctacttgatccaccggactctgcattgtcctcatttcatattatgtatgaaaataagggaactagagagttgacacaacagccttaaccaaccccaacaccaccacacccgtaaaaaacaacaaaaaaatagagagacccaccaaagcttgtggcatgggaatggagaggtgaagcagaagaaagcaagggcaatagtctaggagcgacctttcttgttaatgttctcaaggccattactgtcaagaaaagggttcaactttttatgagaaagtgataataatctcaattttcgttgttttttttttttttttttttctcaaagacaagtgataattcttgcgtaacaaaacggagagaaaggggcgagcggcggtgctagctcgacggcgattggaaatgggcagcctgcgctgagtttgtgcggtgcgagactgtttaggttttggggaaaagaggaaacgatgtgtcgttttttttttttcaatattattatgtactgtgtttctttctacaatgcacgtgaaagaaaagtgcgccgatgcatcgccaatgtttaggcatttaaaaaaaaaatttagtctaactttttgaatggtagtataaattatagttatttaaaatatgttgtaaaattttaataaattttaaataatttataagcagtgtttaaatactttttttacatacggataataagacatggatcaaggccctaacattaaaattcgcacttacagtagaaagaacactatttttaccaaaaactacacgaatttagtgaaagttgtcttcataaaaaatataagaaattaaattatctttccatgatataaagattgtaaaaaataaattaaaactgagagagttatgatagttttactgaaactatttctgagaaggaa

SEQ ID NO: 43128 - DNA, 1316 bp, Cannabis sativa
tccgtacaagcatatgtatctcttatctaccatctgaaacatatgtgcatacatatattattataataacatttctctttttcacaagtggtaaatttatgttaagatagtatgctcctattattgtataaatatcatagttgatctcggcaactatttacaatacactaatcggtgcatcctctgtttaagtattccaaaaaaagtttaaaaaaactacaatgtatactagcataaaaaaaaaattgaaataaaaaattttcggaatacccaaataaatatgagatttatccaaagtaattgacaaagttttaaaaattattttacttatatatctatgatgaaagagcatctattacttaagtatatctattatgatagagcattgttataaaagcatatgtgctgcctaacattttaattaaaataaataagatttattcaacataataaattatttccacttttaagttatgcttctcttgttaaaaattcatctttaaattattcattctattgagttatgccttatatatgtctattttaatcttacttatgtgactaatatactgcttatattgtattttattggtgcctatatgtaacatatcactacatgcaacattatgtatataattaaattaatatttttattttttatttattattttaatttttttttttattttttaatttataattttaattaattaaatttaatgaagtgaaagtataatacccaattagtgatgtctgggtggaggcggtgaaggataaagttgaagttccagcaattgttctgctcccacaattctttttctctaacatatgagaaagggtaagctctaatgccccatatgcccatcatgtaaagggcattgtagtgcacatattgacctctctcatctaaaaccaacaccataggtttctcaatattgaacttccatttctttatgatgcagctgattatggcacgagaaagtgccactctattgtagaccgtgtaacactccattttctctctcatggtcataaacaatttaactagatcgttgtcccagaatattttgattggggcccagactacttcatacttactgttacactgcatcttttctaagtacatctgacacatgagtaagtattcatctctgtttgtgagtccaacatctacatcagtaatgaaaaatgctacaactttccccttcagcttttccaagtcatcatactgtgtttcacaaaaacaatataaatatatatatatataaagtaattataattatgaataaaacagagtttgaaatgtaaattaaatt

SEQ ID NO: 43129 - DNA, 1741 bp, Cannabis sativa
ttattgtggattttaagttattttgaaagatgttcttttaaaattactaatttatttaaaaataaatttaatttaatacaacatataattcatatacaacgtacgtagcacgtgaaaaatttactagtatagataagaatatttgtgtttttgtttcttgcacttacacactacttgatagtagcccctaataagtttttgttgaatctttaataatttacataatttttcttttagtttatgctttaagatattagtttgtcaatatatttaagtttgaccaatctgatttttatatcttacatgttataaatagctattacattttatttgtgttttaagacattgttgtgttttaataaattttttaaattaaagctgtaatattccactactcaatatttctgaaacccaaagcctcttttcttttaggaagaaaaatggtatcccaagcaattttgccaactttgttcatctgagtagaagcattcctaaagaatgatctacaaatactattaattctataaatgatataagtaaccaaaactgaaaattgtttacctagattacaattcaaaataggctcaaaacaagagataggttgctacagatgggaatttcaggggaggatcagtgtgtattatacttccaacacagagaaataagatgccatcttttctttgaatgttctgttgctgtagaatgtttgaaggctttaaaggatttgctgcaatggcatgctgcaactgtctcattgcctcgataaataaggaggataggaagagctaaaattagcaaattcaagatccaagttcttgcagcatcaattgcttgccttgtgtatgttttataaagagcccgaaattccaaaatctgggaagactcacattagggtacagattgcttaattcagaaaatgcacattgtcaaataaagaatcactctatgttagcctaagaaagttattcaaagggacaaagaatggtttcaaagtttgtaaataatacgagtcactacaagaatgccaatttttgccggcgctattaggtaattacgctggcaaatgtcaactaatgccggcgcaagtcaacaaatgcaccggcaaaggaactcaacaatttttgcccacctcaaccttttaccagcgcttaatatcgccggaaatagccaatattgccggcaaagtacacaaattgcgccggcaaacgtttgcaccaaaccaccaaaaggtgggaattgttggttgttcgagcaatcttttgtcggcgagcttacatctaccgaaaaaactatttaattatttatttttttaatattatgtacttttgtcggcgccaaaatgcgccggcaaaagtctaaaaaaaaggcggtcaatttccctcgcagtgaaaaaacgtgtgtgcaaaagtaggtggggacttttgtccgcgcatataattgcgccggaaaaagtggcaactgtttgaccatgggacacgttgcatcagcgtttagcttttgccggcgcataaaagccttgaaaattttggcggtcaactacccgcccaaagaaaaacatgtgtgaaaattttgtgggaaacttttgccgacgcacgtaggtgcgtcgccaaaagtcccaacttaaatgaaacgcagcatctcgtgcgtttttattcaggaaagacttttgccggcgcacctaattgcgccggcaaaagttgaaagttaataaaacctgcagcgaacccttcttccccatttt

SEQ ID NO: 43130 - DNA, 3794 bp, Cannabis sativa
gcccgtactactatagctctcttagtttaagtatcactttaaaattatttatatcctttatgataaaaaaaaatccttcgccacaaaaataaataagattataatttaatttaaaaccaaaaaagaaaaaaaattaaatcctctaaaatcttcttttgaaatccataactattcggcttccacgtgtccactacgcgtgtttaatctacaccgtcaaaatattcggatacagatccaacggccaatcaaactcccttcacctataaaaggagccctaggaaccgcctagcattactttaaacggcatcaaaagattcgctctcaaagaaaaacgaagaactcaaattttcccgagaaaattttatcataaaagattctaaggaaaattttaaaggccatatatcataaaaatttcacgattctcccatcttaaaattacatctaataacattttggattccgttggaaaatttcaagaattttttttttttttttagggttttcagattttgggggaaaagaaaaagatgaacgatcaatctcagatgatgaatcaggctcaaatgatgagtttgaatcaacaatctcagatgatgatgatgaatcagtcttcttcttctcaacctctgatgaatcagtctcagatgatgtcagcaggtcaatctcaacaacctcttcctcttcgccatggctataataaggtttggtcttctcaacaacaacaacaacaaaaccagcaaaatcaacagaagcaagacaagtttcagaattcatcgaagccaaatttctctgctcaaaatcaaggaggaggaggaagaaacaattggaaaggaaagaaaaattcagatccaagaagaaacgaaccagttcttcctagtggtccgaacagttataaacctccaactcttcacgaattacagtcacagaatcgattaaaagccaggaaattctatccaaaaaagaagttcaacaatagatttgcaccttatgcgcctagaaacacaacatctttcataatccgtgctaagaaatccggcggaatagcttctttggtttctccatgtccggttactccggcggttcttccgacgccgatattttctccgtcgagggagattttaggtgatatggctaaggaagaatggggtgttgatgggtatggttctatgaagggtttgattaggcttcgttcacctgggaatgataatgaagatgaagatgatgatgaagaaggtgagagtgatgttgaagaacatgttgaagttgagagaagattggatcatgatttgagtaggtttgagatgatttaccctaattacagtggaatggattataataatgttttggagaatagagttgatgatcaagatacccatatagctcaattagaggaagagaatttaacattgaaagaaaggctttttttgatggaaagggagttgagtgattttagaagaaggcttcagtttcttgagagacagagtaatcttaatcatggtgttgttggtgatgttcatgaagaagttgttgagaatgaatctgagaatgagagtgatggtggttctggtgctcctgatttgtctggacatgaagggagtagagatttcgatggcgattctaaggaaatggaagaattgggacacaatgacattgttgctgagactaaggatgaagaacaggttgctgttaagactggggaggaaggagcagaagaagctgtggtcgaaatcgaggaggaggaagaagaagaagaaaagggtaactcggagatggcgatggtggtggagaatggtacttgttcggagaagaagagcattggtgaagaggattaatgtatgtctgcatcttctgaacagataacccaattggatttcggaatattttgcttttcgagttctggacataatatgatgatgatgatgatgatgccttttgttatgtaaatgaggatattacattttcgtaagaactggctttgttctccaaattctaccttagcaataatgatagggggaataaacaaacatatgtagggttttgtttttaaattttcttagtaggtttgcttttttttttttattgctttggaagttttattatgaactttgtgaaattgtaagaacactatctactactactactactagtacctaatagcctattatattaatgtactactgatttcttactttttgtttgacatgtcttgtgttgtttataagggctttagttacttggcctgacctgcattttggggtaattgattgattgaaactgctggtgtttgaattttaaaaaaggttgtatccctcatatggtgttgttttacaattgtaaatttatggaatgccttaatgttgtttatgtatatctttgtttgtttttttctagtctgattgatgggtctgagcatgaagagcttttttgcaagttctagttgagattggcaagtaagtatatccaagttttatcttggaaactatacagtctcaagttgagaaatattatcggcccttcaggatgagatggatttcctggaacaaaagctctcaggatcatatgaatcgaatctcgaagtatgttagaacacttcaatatgtttgctttgctaactttgttgtcaaatggccttcataagtgacttggtttactttaaccaagttattatgcagtttcttatctttagaagtagtatcactatcatctgaggatgaacttaaaactttgctatttgagatcttcagcatgattacagactctacaatatatggaagtggaaacccagaaaggtttcggtgtcaggcaaccctttcttggcccggtaagcttattattttcctaatgaggaaaattgtggatggtcttgtatttttttgacctgtactatttttcattcattttcaacattttgatccctcgtatgttttctttgtataatttattgttgttgagaaatttgactaaatctactaatatttccaggggaactctatgaaggaacacttgctttgactactttggaggagagtaacattcatcagagcagccatttattcttggttcaaatccattataatactaatttgggatgtggattgtttggaaccatttttcattttataatatttgctgtttttgaccattctctgcttaatgatattttagctctattattctagcatgttaaataagattgggttaatacctaatacaagctattaattggactttctattttgttaaatgacaaaataaattctgtattttttaagatagtacaaatatgatcgagtttaattttcgataattttttttaacatgaacaaacgtaaaaaaaaaaaaaaacataactaattttatcatagcattttttcattgagttattattaaattttatttcacacaaatcattataggtcctatcctattagtaatttttttgcaaacttaagatcaaaatagtacttatccaataagatttggttcaagttattcttctttgacttgtctaataacccttcttgtttaataagttaattcatatgccttgcaatgttaattaactctcttatcataaaacttgaccaaattaactttgctgctttttctttagattgtgacctagtccaactagtctaaaataaaaccagttgtcttggtgtacaaggtagccaaataaagccttgtttggttgtactctaaagtcgaccccagattttggtttgggggttacgaaaactatcaagaaaagaacactgaataaatatataattttgtaaaaaagaaagttttta

SEQ ID NO: 43131 - DNA, 2156 bp, Cannabis sativa
tctaagatcctggtaaaataaagttccaacgtctccaaccatgatgaactccggtgggcacattagggttccattgagatatccatgaagtctgtgacctctaactatagtggagaccattgtcttccatagtgtgaaattgttacggtcaagtttgagtgaaaagggcttgtttagggttggctgggcgaaggcatttgggagctgagatgtctagttggtgttgttgttgttattcgaagcagctccggcaacaccagagttggccggtgaacttgcagctgaaatgggttgattgtcttgtggagtagacatggcagaggccagcaatggctctgataccaagtttagattttaaggagaaggcaaaatatgaatctcagctcattttgtgtatgagcgagagcaatttatttatagcacaattcataatacaatgcatctgttaggcatgacatctggtagtgattacatgagcaaaggactagaatattcagcctaaatattcccctaatgattacacaatgacaaggcataacagaattcacacaagacaaattacacaaattcagttacaaacaggggactactgaattgtatggctgcaatgtatattgttggtgtaggaatattgatgcagaaataacaaatgggcatgtcgatgacattaacttgatttcatatggcttagctacgtactattactaacatgatcatggggatgacggtcgcttgtaacttaaaatttgccaatacaatagtgattttgaaggttttacatactaaacgtaaaatctggctaattaaatgtaacaaaatgtaaagatatatttctatgtacgtaatatataaaaagttaataccagcagctacgacagttatatattgctcgtgacatttgaaactatatattttgcaattgcaaatgatgttttaaaagttatattattaatatatgaaatagtattggggatacaatacaccacaccttaaattaaacgatatgaataatggagggtacgtaatggataaattattgatagttttttgttgtctcaagaaacttggtaaataatataagcacatcaagcacacttatcaaatatatagagttccatttggatctacaaaaagtgctataaattcaattattactatgtataatttctagctctatataggatttaaaaatatcatatggccttcccttcaaattttctttctctttcttttttggtctttttatttatttattttttttatgaatcataatagagccctgaactttatatatacatggtccataggattattagcataaattgtttttttaaataatactaaaaaattttggaagtacgaaaagaatatgttatttataggcactcgatggctaaataagacaagtgtattgattaattagatttccatgtatataaaatttatgggatcatttgtcaaattttgaccagtttagacacttttatttacaaagtaaaataaatatagcaaaatgtaggaccactttttcagccaaattcccatcattttgagagttaacaacatagcttatattgttttctcgaaaacttttgttaataatttcatccctaaacatctttagataaagttcagattccttttctgattcttcccttcttttaacacttgctattgagtatacttataacctataagtattattcatatatatatataaggctgtacgcgcgtgcacattgctaggtgttttctctgaatttacagatcatatctatatattgaattatgtggttgaatgaaactttaaagattggtatctcttttattctaaactcttttgcgttttttaattatacatcatcattaattatgcttcgtttctccttatatagttgggcacaaacggccatcaatatctttaattaattcatacatcaacaacggatttttttttttttttggaattactctattatactgtttttttagtttttattgttttcaaatttacgagcgctacttgcaataatagtttctatacaattttttattgcgatttaagttgcagagctaattgcaataagggattctatgtagaattccttaaaaatacaaaaaaaaaaaaaaaaaaacattttaaaaaaaaaaaaaaa

SEQ ID NO: 43132 - DNA, 3206 bp, Cannabis sativa
atattttcaattataataataccagtttgtttataatacagaatgaatacaaatatatatataaagattacaaaaattggtcaacaccgcgcgaagcgcggctaagttctctagtttgttataagatagtttgaatttggtttgttgctttaattaatatttgtttgggaagtggttgtagttgcttaaattaaatatttgcgcgtatttacaaattattatatagttaatgacattgtcttttgtcaacatgaagacagagagaaaagaaaaactcttatctaaattttcaatcaattatatctatgtccattacctttaatttctttattttggttttcctctttttctggaaactttttagttttgaatataaatatgagaattaggttaccaaatatttgttagatgaaaatgtctttctaaaagcatatgtttagcaaaaaataaatataactaatttattataagaagtttagctcggttagactgttaccagttaaaaagttcaattaatacagagaaaataacatgttgaagtcgataaaaatatttttgatatattatcctgacactaattttccttatcaactagttaaagaaaacatcataattcttaccaaatattgatctcattattgttggaaagttcaacacctagaatatgagcgttaatacatgtatatacaggatatattgataaatgtgtaatttttgtaagaaaaaagtcaaaattaatttataccgaatgacaacgtataattaaaactcagtggctgccatataataataaggtgtgaccatataataatataagatttatttatcaattatatccgtattacaccaaggattttaattaatagaacatcatttgtggtccaaacctattagtttcatatagcctttacttttcctattttttttttttactgaacgattataatcattcatgaatttacgatgcagatgtttattaccggtactgaaatcttctcgaaccaggatagctcatcgtctaaccgtagagcatgctttgccaaaccatgggccgctaaaatctcagagtgaaccatgcacataggacaaaattgcctccaaaaacttagacaataaaactataacatattgatccaatttttccataattatatagaaacacatatcatatatatacctacctattataaacttatagtcatctagcattttacttgtccaaattgaacttttgttccagcataaaaaagagactttcatcaacatccaaacacatgtctcttcacaatccatcaaattggtcgttcagtactatacatatatgtctacttgctagtagttacccacagctagattcataatcatataatttataaggggaccatcaaatgtattatcatttaccaccactagttctcttccttagacttacactttgaattttatgttaataataatgacaaatgaaattaataaaaatagtcttcatcaataagactaatgttagctatactaataaaattacacaaaaaaactattaatatttatatatatatatatatgagagatatgagacggttgtatgatgttctaaaatcatttcaaagccttttttgtttctccttaatttttttttttatttttttgtcaagaaaattaaaaaaaccaaattccttttaaaaaaaattaaatataacaaaccatacacacgccttaaccacataactatttctaaaataactattttttaaataatataaataacaatatgtggatgataacccattatatataaacttaacttgaaatgttaattttcaaacggtttctaactatttttcagttacaaccaattatttaaaaggaaaatctgttatgttagttgttgtcggtttagaactgttaagtgttgggattgtcagctactaacatatataaagctttattttctattcattcagaaagtgagaagaatcagacctagacagacacagagagagaaagtgagagaaagggtaagaagatcaagacttgaattggctgaagttcatggtgtcatgatgggttggggagctcaagtattgagtgttgaagagccaatgtatcttagatcgttcttggtgattcagtacatgaattggtgtttgtaacaagttgattcagagtggagaaactccttgggggagagctggagtaggactcaaattgagatccgaacaaagataattttcttgtgttctcttttatttttctagtttttattgttttcagtttctattattttggctaacatgttttcaaggattacctggatagatgtgtgatcgtgtttatcgatgatattttggtatattctgaatcagaagaagagcatgagttgcatcttagagcggttttgcaacggttacaggatcataagctatatgctaaattcaaaaagtgtgaattctggttatctcgtgtctctttcttggggcatatagtagataaagatgggatcatggtggatttggtcaaaattaaagctgttcgggattggccaacaccaaaatcagctattgagtttagaagttttctgggattagctgggtattatcgtcggttcattgagggtttttcaaagattgttgtacccttaacggagctgacccgaaagaacctgaagtttgttaggactgatcggtgtgagaaaagttttctggagttaaagcagcgcctgattaccgctccagtactaacccttccttctgataagaaaaagtttgtggtttattgtgttacctcgagacaaacttcttacctgttcagcttgcataagcacacagccgatcagtccaaacaaacttcttacttgttcagacaaatttctccattgatcagtatgctaagttatatgtcagagcaattgttcgtcttcatagtgtcccaaagtccattgtttcgaatagggatccgaaatttacatgaagattctgggagagtctacatcgagctatgggtactcagttaacgttcagcataacatttcatcctcagacggatggacaatctgagagggctattcagatcttagaagacatgttacgggaatgtgtgctttattttgaaggatcatgggtaaagtaccttcccgtgatcgagttctcttataacaacaactatcaggcaactatcgggatggccccttatgagattttatatggaag

SEQ ID NO: 43133 - DNA, 3880 bp, Cannabis sativa
tattttacatgtaaaaatagttcactttgcaaaaccattttttgtagtgcagttttagaaacttttgtaattgtactctgacccatactactttaacatgtgtgcaaaatactgcttttatatgagtcaaagtctaatgctacttaattcataatatacacaatgttattctgtttctctatgtgtgagattgtgggatagatgaagataatggtaaaacttgagcgttagtactttactcacttgagaatcaagaaatgtgcaagcagcctctaaagcaacttctaaagccctaaactcaaagggcaaatagtcaggagatgtatttccgaaaacattgtcaaaatttctacttcccctcctccgactcaaatcagaattgtctgattgccagacttccggtaccccagatggagttaatcgccgttgtagttccactacatattgcaatacacagctatccagggaattcagaattaaaacctcatctgctgtaatgatacaccgaatttgttccaaattaacaacaatagctctctctctgccaaggatggttgaaggataaacaaagagaggatcaagcaggcgcagatcgcgagcaggtaagtcacagcgacgcatcatggtaaatttgtcaacctcaattacctgagaattaccagatgagtcaacccgaatccaagacctgatgccctggccccgcttcttcagtcctacaacatcgactccttgaaaaggttgccttccagagggcgacggtctatatgaagattccctcaagttcatagcagatgcaggtttcggaggaagcaaccgctctttgaggtccgccatcgaggaatcagctgtaaattgcttcaacatcaaaaacagataagcctatcaaataattcttcaactaagaacacacacactctactaaaaccaatagatccacgaacccacaaattcttcaatatagaattagctcttcaactttacaatttggttttcaacttcaaatgccattctttatacccgggcaacaaaattacaatggaaaaaagaaatccatatcttgaaaattaagagcaacccaaaaataaacaagcatctattaagttatgagaatggactataagatcaaacacagaacaattctagagttctcatcttcaatcattggtccaactaaacaaacacatcaacactcataagcataatattccacaccacatcaggtgtaaattgcttcaacatgaaaaaacagataagccaattaactaattcttcaactaagaacatacacacgatactaaaatcaatagatccaggaaccagcaaattctcaaacacagatttagcataggttttaaattctaccctacttgaaatgccattctttacatccgggcaacaaaaatagaaggtaaaagaataaataaatgtagtacaatatttttgaaaattaagagcaacccaaaactaaaaaactaaacaagcatcaattaaattatgagaatcgactatgaaaacaaaaacataaaaaattgtagagttctcagcaccatacgtttgtccaagtaaacaaacacataataaaacactcataagcataatccacaccaccacctctaatgagaaaataataagcaaattgttcgtaaggccttatgcgatagaaattcagaaatagtgtttgattgtatactcaaattataagaaaactaaaaagagtaaacaatgaagatacagataaattgggggataaattaatcagaaataaaaccctagattgaaaaagagatacctgaatgaagagagtgaaggcttatgaagcgatggcgatggggataataaatgaggctcaaaagccaaaggaagaagaaaagggcattagtgtatgtatgtatgtatcacagaattgaataaagcttttctttgttttaatggttctctctgatcttcacttctggcggttaacttacccttttattttatttttttttattgttttattcaagtaaaaataaaaaccaaatttacataaactacttgtatttttttatacactgttacgtgtttatatatatatatatattttttttttttgaagaaaacaaaaatatttttatattttcataacattatactatatttttttaacgtgaaaataatatttttttttaaataacctaaaaataatagttcataaaaaaattgttaaaaaaaaaaagcataattccatgaagaacttaaaagttttattatttaggatattaacaataaaattacttgaaaaatttatattttttcacacaagttttaatcatccaagtaatattaattaaaaaatataattttaaatgtttaaacaatttaaaataaataaatttgtttttaacttttttttttcttctttctttctttttctttctaaaaaaaccccaaatctctctctctctctctttctctgacctccctctccttctctgtgaggccctctttttctctctttctctctctcagctctccctctccttctatgtcagggcctctctttctctctctcgatcttctccctctcagaccctccctttctctttctctctctcttcgtggtggaactcgccagagccaaagctccatgactctgattgagccatctgccctctctttctctctctttctatcttctccctcaaagagcaaaaacgaacaaaacggaataggaattcagtaagttttatcattaaaattttaatttttgtggttaagtcttaaaaaacataaagttcgagaaattttaccaaaaataataactaacttaagtaggggtgtttacaaattgatttggtctgaattttcaattttttcaaaccaaaccagtattacgattttataaaaattcaaaactaaaccaatcaaaaacatattggttttgtttgaaactatgatttgtatttcatagttgttctcaactttttttacaataattgttcattttttggtaacttatttttacttttaataaatttattatatataaataatgataaaaaattatcatcacaacaatagttaatatcaatattttacttaaaagttgttcctaaatattaatatttcatctaaaaatatatatattaagtctatataaaataattatacgtttaatttgaaccgctattgaaatttttaaaaatgtgatcaaactagagaatttaaaacaatctggattcatcaaattatttacattggatttaatttgaaaaggactatttctataatttttaaatttaatattaaagaaaaaactagttagggttattcgtgtaaaattcttaattggtttagttagagagattttccttttaagaaataaaataagaaataacaagtggagtggggtaccttaaacaattgttttgtcgtttaccgttttgtattaaaaaaaattcaaatcaaatctcaatctcttatttcacaaaccaaaaacaaaacaacaaatttaattttataattgaaatttacttagagatttattattagataaacattgaagattctcctgcaaatgggaaatcccaataacaaattagagtggtgtcattgattcactatttatatagtaaaataatacattattgtttaaatattcttaaggtagatctttaagatttgtggcttggacatagtacatatttattatacagaccacgaaagaaaaaagaaaaaaatactcaaacgaaataaaaaagaattaatactatttagattgtatattttataaaaattactgattaaactcttttttttgttaaataataaattagactatgtatattttaaaatagtacaaaatattattctaatgttaatttttaataattttttttta

SEQ ID NO: 43134 - DNA, 2270 bp, Cannabis sativa
agacaaagccatttatgaggataggtttagtgtccaattggagtaaatataatgtgaaactacactatatttagtgttttagtgtcccattaaagatggccttagtcaagtaaacaatttattttaatttttattctgatgtgaatttaattctcaattaattagactcttagaccatctccaataggagttgtctattaaagtggtcttataatttaatttttaagattaattttgtaaaatgttactcaatatagataatggccacataatttttttttttaatttttacttgaaaaatcattaatttttagagttgtgtggagaattttttttatttaaatattaggtgaatgagagaaaagtaaaaaatataatattttaacataatttgtgtattttaacaactacaaatgttgcccccaatggaagatgtcaattgtgtatttatatataattaaactcaccatttcactcaattaatactgtatttttttttcggttgaaactgttacattattactttcttggtttatattttcactaatgaaggaaaaaacatgttaataaaatgtatagtgttctttaaaaaaattgattatagtattacgaaagaataacgttcccattaaacatttctaatttaatttcattatttttaagtttatgtgatttactgttttaagattgtttcactcatagtaaacaaggtcctaaaattcaaaacgccatgagaaaattggacaataaagagtttttgtttgaaaaaagtcatttagacttgagtttgatccaaaagaatcattcattttcattagttctaattaacattttgtttctcaaatagtagaaagaaatatccatattatattaaactgataccccacttaaccaaaatataaaacttacatacaggaaatggaatgggaaggagttttcatagaaatccagttcatcagagtcataactatatatttgtagtagtagaagtagtaggctatataatatataacttataatagataaatatataataagccaaggtgttgttcttcaatcattacacaaaagaccaattcatgaacatgaatgccaagcaatgattggagtcctcatcgttcagaactttccacgcgacagcctgctcgtacgacaccggccttcccatgctcgacacgcatataccggctggtagataagcaaaaccctgcaattgtcacaaaaaagggtattagattatgcacaagatgtactcagttgagttggctacagccccacgaatctgaattacctgctgcatgattttggaaaactcagagcacagattcttccgaccgccttcgtcaaggatcttgtcgagcattatatcttggagggcaactagagttgtttcaagcatgtcaagtccagcctggtttgcaaaggtgaaaatgggagacgcctgcaattgtattttcaagtttgttaagttcagctggaaattcgatatcaagaaaagacgagtttggagtcaggctcgggttagtacattggttttcacagagcagcacattattgcgtcggaatggttccagagtcgctttaaaatggcatcaccagatggcggcgaatccatttgaaaaagctctcctccagtgtgtatcctaaagcaattaaaaccaaaatgagaatatattacgaggaaaagcttcattttgttaacttatgtagtgagtaaaacctgtagcttcggcaaatccactgtgtcaaggttagagcttcgggagattgaggaagggattttggtcctatctgtgagccaagctgagagggagcaattgccattgcaacccgctgaacggacccaacaacactgcgcacgtactggcgagccatagcagccacattgtctcgtgtatggttctcgaaagtgaattggaaggcaatagtcaggactgacctgagattgtaacttgcgtcagcttcactagctggacgggcactaccagatcctacttcaagagtagacgccaaatccagtgttcgggtagcaccaggtgtatcctgcaaaaaaagaaaatagttcacaagactttaagaccaacagggaaatcctttcagatgaaaattaatgaattaaggtgaacaattttactaaccgcctttggatccaatggaatgacacgaaaaccagatggtaacaatggagcttcatcagcaaaagattcatcaatgggtgcaaaaacaagctgagcacaggaaccaactgcatttgcatcaacaccactgca

SEQ ID NO: 43135 - DNA, 948 bp, Cannabis sativa
aaaaaaaaaaaaaaaaacccacattagccaatgacaatccacttttggattcacccaatatctaatacatacttcactgcttctttaatttcctacacatacccaaatctctttgagtcttcaactctaaaaaacaataataaaaaatggcagcaaataccttaatgagctgtggcatcgccaccgctttcccctctgtcctttcctcctccaagtcgaaattcaccacatccggccagcttccctgtgccaatgcgtcgtcacggttctccatgaccgccgactggatgccgggtcagccccgccctccttaccttgatggctcagcacccgggtaactggaaaaaaaaagtgttatgtgaagtgtgtgattatactaatgtattcaactttctctaactatattttggttgattttggggttttagtgactttggtttcgacccacttcgccttggtgaagtgcctgagaacttggagaggtttaaagaatccgagttgattcactgcagatgggctatgcttgctgttgtaagtctttcaagttccactcttcacctaatcaaatttaatttcaattttatatcattggctaataaaatcaaacacgtctgatagtaaaaatctgtagcaaatataccttaatcactacaatttttgtttgggcaatgagaacctttaagttttgagttgattaactgcctctgaaaatctcaaacatggttgtccttaagcttttcctgcatgaaattttgaaaatttatctatttctgtgtcaccatcaaacgtttgttttttaagtttacaaaccaatctttttgctgaaaaaaactataatataacaggggagtagtagctctacctgagggtgcaaatgtctacattgcaaacaaaataaatacgtacggatcccaaccaagtctcatatggccattataaaaaccatga

SEQ ID NO: 43136 - DNA, 1880 bp, Cannabis sativa
ttgttttggtttgtttgtcttcgtataggaaggagaagtgggttttgagtatctgttaagactgaaatatggatcatagtggtgtagaaggaactaacggattacaggagcagagtacgagctgctttgaagttccgaccgaaaacgaaggtgatgatgcttttttcttttcatttttttttccggttacataatttaagtctgaactttaaactatctgggtggcaaaactgtaagggacatgtaatgttgatttatttattattctattgtattttcagacttgagaactataaaatagtaagataagaagttagtataagtttctgtttcttttgtaagtgaacaaaaactcattaactcctgatttttatatatttatatatctattaccaaatgcattacgatttacgacaatgagcattttagagaattatcatttttttttagaaatataatttaacttagattattttgatacattggatgttttagatttttggtgctgtttgatttatcttattttagatgtgaaagacccgttgtccaatggtctatggaaggcatgtgcgggtcgtcaagttcgtgtccccctccgtggggaaatggtgtactactttccacagggtcacattgaacaggttctgctctgcttcacatctttcttagttaatatttatgtttaaattttacttttaaatgtataacaaacatattaaaaaggtatatcatcaaagtttgagtatatatgtataacttttcaaatgccaagcttcttatttgattaacggaattgggtgtaggttcaagcttatgctagcgaagatggtaatgtggaaatgccaatctacaatttaccctctaagatcctctgcaaggtctctaatatcgagctaaaggtacaccacttatgttacaatctgcccacttaaatcatttacattcttctatttttccataatgatgagttggtgtggcttaataactttggttagtttatggaactctgcagtatttttatattacctcatattgtgttacaggccgaggttctatcagatgaggtttttgcccagatcactttgcttccactaacagataaggtagctaacaagtgctcttgtggttttgtttgaaagaatgatgttaatactacaaaattttataaatccataaatatgaaaatcattgcaatgttcatatagattttattacattgtcaagatttgtgagttgttattaaagtagcttaatttccctatgctctcaaatggtaattttcctttttttgcattaatgaaactaaacaaacttcttggttcctggaatcagcttgagctaagttcaaacgatgtggatatcacagcattgcccaagaaaactaaagtattctcttttagcaagattctcactccgtctgacacaagcacacacggtggattctctgttcctaaacgccaagctgatgggtgcttcccccttctggtcagtattcttgtatgagttacctaaacaaagatgcccataaatactttaatgtgtgtgtcaatgatacataatatgatttggaatctttcgtttctgtagaattttcgacattgtaagtatgttgttttcaaataaaactagcaaggtgttactttcctcttcatcatgctcctcgtccaagaacacttttgattgatataaatttcatgacatgattcaactcagatattttgccactttattcttcttttagaattctaatgtccaattcattttgcttacaagttgtagttgttattgtaggatatgtcgcagcaaccaccggttcaggaactggttgcaaaggacctccatggatttgagtggcactttcgtcatatatatcgtggtat

SEQ ID NO: 43137 - DNA, 2337 bp, Cannabis sativa
aatgggcattcgggaagccttgagctggctaaaggattactcattctctcaggccatcatcgagaccgatagccttgtttgtgctgaagccattaggagtgcagaagcttttgtttttgcgttcgggctgctggtagatgaatgcaaaaatagtcttaattgtttgtccaatgtttcaattgtatttgttaaacgttctgcgaattgtgctacgcactttgttgcccgacactctgtttctctagctgaacgtatgttccctatcaacagtgttccctcagacttattgtctattcttgcgagcgattgctcggtttaataaagaacacttattcaaaaaaaaatgttaatatttaatattggggacttaatgttattaaagaaataaaaatttgaggatcatttactaaaatataaagtttgggggaaaaatttgggcctaactataatttaaagaccttaggtacaaagcctttataatattgtggaaagaaaaggttttattaatatatatagaatcagttgttggatttagaagaactctaaagtcaactatccatggcgggtttgtttgataagcaagcagatgtatatgcggatgctcggcctacttacccaattgaatggtattcaaagttggctgctcttacttctcaccacaccttggcctgggacgttgccactggaagtggccaagctgctatcgatgtacttttctccactccatctctcacttcattttctttttaattaatacaatcattcttgaaattatttttggattttttagtttttaattcccatgatctcgttcttgaatccttgatcacatgactcctcttggtctatatatatcttttatacaaaatctggattttttttttatgaaataaaaaatctggaattaagtgaaaggaaaacctcagatatatacaaatgcaatttttatgatgaattaggtagcaaagcactacgaacaagtaatagcaacagatgtgagcgagtctcagctagagcgagcaaagccccacagtcgagtccgatacattcacactccactgaccacaaacgacaacgaaatagtgtcgttaattggaggcggttgtgaaaactcagtggacttgataacagtggctcaggccatccactggttcgatctaccgagcttctactctctggtcagtcgccttctgcgcaagccaggtggagttattgccgtatggggctacaacgacatagttgtgagctcctcatttgacgctgtattgaagaaattccacgacacgacgctgccatattgggacagtaacattaagcacatcttcgatgggtacaaaacgatgccgtttccatttgaagaggttgggttgggacgtgagggtaatccattggatctggatattcctaaggagctttcgtttgatggagttttgaagatgttgaagtcttggtctgctgtgattactgctaagagtctaggcgtggatctgctatgtgaagaggttgttgaggagcttaagagtgcttggggtggccctaatttggtcaggtctgtttgttacaaggcttttatgattgctggaaagttaccttaagttataagtagttacaaaggaaattaaactcctttcactatccaatgttccactgctcaaaggactctaaactcagatgcccacaatcttgccaactgccaagtcttatttctgctttgttttcttttttctggttttagcctttcatcattggactttgttattaccgaaaaagaaaaaagaaataaaacaaattattacggaatgaagtttctagctctgagtggcataatttattttataattaaatgattttttcagttaaaaataaagtaacactagtgcgtaaatcttcatctgtgtgttaaatagtagctgtcacacctggaaaatggctatttttttaaaaccactcacaatttaatttcacactcactctcctcgaaaatggctgccatagctgaaagataggtcgagccaaatagaagaattattaaccagatagaattgtgaaatttatgttttatttacataatatttttgttaaaaataaaaaattcaaaatttattcatatgggttaaagatgtataaaatttagacaattaatttccttttatatatattgtgatattttaacgagcatcaaagatttttttagagacttaacaaaaataataactatttatgtaagagataaaaataaattgagatatttacataactaaaaaaaataatagactgtacctatgtaaaaataatttaaattaatttttttttaaaataataataattcaaattaaa

SEQ ID NO: 43138 - DNA, 3144 bp, Cannabis sativa
  modified_base (47)..(50): a, c, t, g, unknown or other
atgcaaacataaatcacttcaaacttcttagattgataactaatcannnngtaatgggttttatttagggcacaaaacccaacactttggacaaagatgatattggtattttgttttgtttcatatgggctttatggaatcaaagaaataacttttttcataagcagcatacctttcctcctaaggaagtgtatgattggagtctcaatttttttctttaagtttttggatgtacagcaaaatcatgtcacaggctcccagtctgcaactctttcgactccagtgcagctacctagttctacagggcttaaaatttttacagatgcagccattgactcagttaatcggaggcacagtattggagtggtggtcttagatgctaataatgcagttaaagctggtttttcaactcctttcgttggattggtgccgcctgctgttgctgaagctaaggctatttttcaggcaattcaatgggctcagatgattcacctccctttggatgtgctgctgacggattgcaaatcaatagtggataagcttacctcttgtaattggaataatagtgtgttggatgatgttttggtcaatgttaagaacttgttatctttcagtccaaggctagcaatttgttatgttcctagggatagtaatgtaattgctcataaattggctaagctaggtcttggattagataatgagttagtttagaatggttctttaccttccatatagcttgtggctttgtttgctttgtactgctgtttgttttattaaagcacaagtcttttcaaaaaaaaaaattatgcttttaacgagttattccatttcaagtgtaattacgattacgtgtctgagttcttattcttcccaacttgacacatatcttcctctaatatgctagctgaatttcgagtataacagatactttatgaatatttaactatattttatattaattattaaattaaaatttataataattaacattaaattacattaacaatattataatattataataatatatggtattagacatcactagtgtcagattaactttttaataactgttgtcggagaaaattaaacaacaccaaaaataacgaatattcaagcgagataagaacattgacaacaataaataatagtgggtattcacttagaatgtaacgagaatatcaagtaattagtaagagacaatgagtaaacaataacaacactagaaatatagtggttcaataagagcatgatccacccagtcaaatgtccttttagttacataaccgatcatcaggttaccgttaatacattaaatgcattaacttaaataataaacattttgaaaataaatgattaagaatggttcgaccgatttcattaattaaagtgatgaattcgtgcgactaccttacttgcataatgagcattcgtgtactgttaactaaaaatttgcaggtattagggttttattttctaattgtaaatatttataattattatcaataaagaaaatataaattattctgacttgatcaaatcatattaatgttcacgtatctttcatgattatttgtttggtattaaatcttattaaataccgagcatgtagctaatcataattattgtgacgtaaatcacagtaaaaaataattatgattacataatcaaaatattgaaatcctaagattagtcaatgcacttgatttatacacacaagttaatctatgataagttctacttacactaagtaaaatgttaagttcttttctaaaattttggtaaattagataagatcagattatttgttacataagatttgatcgatctggatttaatattaaatagcagaatgtaccattagctaactaattttgtcaaatcattatattgactattggccaattcaacctcaattctgggtgatatgcattctaactaattagattattgagttcctaagtctgttggttaacaacttaccctacagactagcccatactttgaatcaggcacgtggtagtttagctgagtgggagtgtttattatagatatgaaaatctttagtttcctttagtgcaaatgaaacggtgattttcttatagctaagttcaaggagtttaaataaatgagatctcatttcagttgcaatagcgtactgaagtttcatttataaggaactaagtattttaaggataaaatactatgagggatagaatagtaattttgtatcccacttatataaatcacctatagagggttgagtgattgttgattgttataacaatggataacatatctgcaaaggtggtagagcattctattaatttcaaaatgcaattccaagtctatagttgaatcgcgaggaattaatataacagtaaatttacttggtaaatttatgttaatatttattggagcttgaattcatggatccataatcctcacattgtctttgttctggtagaccccttgtctatttcgacatctagaggagcttttcagtctaatattctttcatgaatgtgtacattgtaattatttaggatcacctgtaatttttttttaaaaaaaattaaatagttaacagtaaataactataaggttcgaacaattactcactacacgtatataaaaaaatgtcaggcgtacaaaaaaatatttaaatattatttttgacgttgtaaactattcataatgttttaaaaatttacagggctcataaataactataatgtatacgtcgtgaaaatagattggattgaaaagctcttttaagtctcgtttagaatgtcgtattgggtcgtattgtattgtattgtattatattgaatttgattatatatcatatttttatataataatatgttaaactttaatttattaaaatattatatgtatataggtgtctataaaagttaatatcacatatagttttacataaaaatattgcataaaatacaatacaatacgacctaatacggtgttccaaacgagcccttagatggcaaaataaataaggattttactgaaacgttcctttagggaggtatactatatacttaccgaaatttaatatacaattatctaactgttataaatattaataattatgtggatgtccaaatcttttatttattacca

SEQ ID NO: 43139 - DNA, 3046 bp, Cannabis sativa
ttgatccttgcactgtgagtatctgactaattaaactttcatggttgaaaataatgcctatcaacaccaattgtagaatccataaatgttatattatatgatatatatatatatatatttaatcttatgtatggcaggaatatgtagaaccacacttgcaggagcagagcaattctgctgattacgtttgctgcttgcaacagttgcaggtttctttctttctttctttctttctttatatatatgtcagattagatatgttagttctttgagagctttgtttatttaatattacatgcagcattgttttcaaactgaggatagagcaagaagacttctccataatgtgtcgtctttgttgaaaccagggggttatttttttggtattactcctgactcatctacaatatggtatggacttataattgtgaaacaaaatgcttacttttcaagttgtgtttttcttcaaaaaataaacaaacacttcgattgattccagtgcttctatcgaatgaaaaatggtgtaatctctcctctctctgtgcagggcgaagtaccaaaagaatgtggaagcataccataataagatggccagcatgaagcccaacattgttcccaattgcattcgatcggaaagttatatgatcacctttgaaatcgaggaggaaaagtatgtgtctataattagcaaggctatattggatactctttacattttccttgtttggttggtgcaacttgtgaagttttttcaatttttatgtacttatatttgcaggttcccattatttggaaagaaatatcagctaaaattcaccaatgatgccgctgctgaaacccattgcctggttcatttcccaagcttcatcaggtttatctctgcattctataacattgtttacaaaagagataaagttgattgtcagcctttggcactattagtgccaagttcatggatttatagaagtaactccatgttgatagctttgaggctatgaatttcatcagatgttatgttgccatttttgaatctggagtatagattagtcaaaatcaaagcttaaaactatagtcagacaatgatattttaacaatgtagcaacgtagtgtaagggactttgaattggggttgcaagcttctccttccttctgtgtatacacaagtgtaaaattcgcattatcccattttgattttgcaaaatgatctaaattttggaccctgccatacacaggttggccagagaagctggtcttgagtacgtagaaattcaaaacctaactgaattttacgaagacaacaggtttgtgaattgcatttttgttatattctttaggactgtcttaattgacttgtgactcaagattttcagccctttttttccttttctccttttaaatgattttatttaaacattgtttgaaatagattattctttcccatctttcgctattgctgtaagagcgcaatttacaggcatgattatgaattttggtcccaacctggttgatccgagagggagacttcttcctcgatcatttgacttgttaggtaatgcgtctgtacaccttaccgtgtttagaatatcatcttcttcagtttagaatttacttaaaatgatcttttacttgttcttaatgttcttccctaggtctgtataccacattcatatttcaaaagcctgatccagatgttgctccacctcttatgacgccattactggaagatgcaagttataagaatgatgaggcaagcacttttgtaatttataagacagaagctacaattagttcgatattttcttcaactgataatttgtctcccttatgtgttgtcgagtaaatgacaatttgattcgtgcctgttttagagagaatggcatgctaccggctggaacgatgatgaaatggctgtgcatgtggagccaccaacggtaccaccctctctaccaacactgcccacaatgccagtgccgccagtgccatctgtaccaccggcggcacctgctggacttggtaacataagtgagcaaaagggaattttagggcctggccctgccgagttacgtttttctgaggcactctgagatgatgcaagcaagaattttagtgttctctccttctcttctgttaactttttgtaggctcttgtttttctagttgaagaacttttttttatcacaagttcgaatatgggtttcacggtttatccccatttcccaacccccttactactaaaccaatctagtagcttttgtagttgaactattaatataccaaaatgtaaactatcaattatgtaatatcttctttttttttttttttttttcgggattatgtaattcatctttggcatgctttcaataatgagaaactagcacctagaaaaaaaaaaataaataaataaatagaaagtagctggatttaacaatttttttttttgctactgaaaaggagaaccatttatttatcaaacaacatgatgttggtgagtacatggggactcacctcccaaaagttcaagtaaccttcacagtcatgactaagcccccatttggcaaggaaatgggcggctttgttagactctctaggtatccaataagaaacaacatcataagaggaatacaacctcatgacactaccaaacagagaccaaagcttccaatggggcgatgtagaagaagacatggccgacactagaacttgacaatctgaaagaatgtccgccgccgtagccccgagatgcggccccacctttaggccccaggacatcgccaagagctcaccgtggatcggagaagaagcatgaactttggaagcaaacagagcaagtatcgaaccactctcgtcacgagccaccactcccacagcatcgatgttatctttagtggcgaagtccacattaatccgtattcgtcccggccgaggaagagtccatctgggcacgacagtggctctttcctccccaccagcatcaggtctcaccagcactttccaaaaccccacaaagtgattctcaatccgcttcttcatctcagtcaatgtccac

SEQ ID NO: 43140 - DNA, 3198 bp, Cannabis sativa
ctttcttcaaaaaactcaatcccagaagaggattaatcaaattaatatatatttagttacgaaaaaaaaaaaaacactactcaatgagttttgattgaagcacaacatatatacatacataatggtaagaaaccaacccttttcatatctttactaaattattgatatgtaaaaattaagattttgtgtaagcaacaaattcatttttcatgtttttccttgtctctccagggaactccagtgaatatcattgtaggttctcacgtgtgggctgaagacccagaaattgcatggatagatggacaagtatcaaagattaatgggaatgaagttgagatccaggctagcaatggaaaaaaggtgtgtgtggaaacaaatccatatagcaatttattaacatgtttacaatttttcattgatatataaatgtatttgattatgcaacttttctttttgtgctttacaagattgttgcaaagctatcaaaaatatacccaaaagatacagaagctccagctggaggagttgatgacatgacaaagctatcttatctccatgagcctggagtactgcagaatttgaaagctagatatgaacttaatgaaatctatgtaaagtctttttttctcccattgtttcatttcatcattagtcttttcacataaagctttaatctttttaaactttcattgtttattttcagacttatactggaaatatccttattgccattaatccattccaaagattgccccatatttatgatgctcatatgatgcaacaatacaaaggggcaccttttggagagttaagtccccatgtttttgcagtagctgatgttgcatacaggttagttatctatactactacttcacattttgtattattattattattgttgttgttgttgttgttgttttaatctctgccaatgaattggataagagtgtcattaatcatgaatcaatccaaacagggcaatgattaatgagggcaagagcaattcgatccttgtcagtggcgaaagtggagctggtaaaaccgaaacaacaaaaatgcttatgcagtaccttgcctttcttggaggcagagctgctactgaaggaagaacagttgaacaacaagttcttgaagtatgtttatatattgactttcattttatggttttttaatatagcacttaattagtgccaaatgtttatgaaacttattcaaacaatttttcaaatgcagtcaaatccagtccttgaagcatttggcaatgctaaaactcttagaaataacaattctaggtgagacatccttggacttggttagtcaagtttcttaacattgtaacaggttttatgttattcaacactttgtattttaacattccttatatgatattggtacagtcgttttggtaaatttgttgagatccagtttgataagcaaggaagaatatcaggagcagcaattagaacgtatcttcttgaaaggtctcgtgtttgccaaatttccaatcccgaacgtaactaccattgcttttaccttctttgtgctgcaccacaagaggtataaccatcgccaaatgatagcatagcatgacacaacttttataatcatggctaaatgttttcattatgtttcaaacaatgtcaggaaattgaaaagtacaagttgggaaatccgaaatcatttcactatcttaaccaatctaattgttatgaactggttggagtaagtgatgcccgtgactaccttgctacaaggagagcaatggacattgttggaattagtgctaaagagcaggtatgatcttatcaaaaccagtgactaagttaatggtagatacaaaccaagagaggccaacttcttcacttgttttcatgtcttttctaggaagcaatctttagagttatagcagccattcttcatcttggaaacattgaattcacaaagggaaaggaaattgattcatcacttccaaaagatgataaagccaagttccatctaaaaatgactgcagaccttctcatgtatggcttcttttaaaattgtcccatttttagtattccactttgtacttttttgttctaatttcactttcattttttttaaggtgtgatgctgatgccttggaggatgcattgtgcaagcgtgtgatgatcacacccgaagaagttattaaacgaagtcttgatcctcaaagtgcagcagttagtagagatggcttagcgaagaccatatattctcgattgtttgactggtaaggcattgttagagatgatttagctaagcataatctgtattcagattctattgtgatgctaagtctgttttcatacaaaaacacaggttggtggacaaaattaacaattcaattggacaagatgctaattcaaaatctctgattggggtccttgatatctatggttttgaaagttttaagactaacaggtaagcaaaatgaataaggaatgtttttgataacatgaaagagatgtatgcatataagactcaaattcagcatattttttctctgtgcagttttgagcagttctgtattaatttcacaaatgaaaagttacagcaacatttcaatcaggtaatttgtcagtttctttttgctgcttattcagctagttatttttctttgactgttatctagattaaagtagtgtcttgtgatgactttagcacgttttcaaaatggaacaagaagagtacaccaaagaggaaattgattggagttacattgaatttgtggacaatcaagatgttttggatcttattgaaaaggttaaattctttttctttcaccaggtcattatactttcttttggaataaaatcttttactaatttttttttcttaacagaaacctggtggaattgttgctcttcttgatgaagcatggtaaaatagtttcttccattttcacaattgaattttcccattgctttcttatgtttatggaaaatgatcatgttcttcctctctggtggaaggtttaaaaaatgtccaagtaaagctgagttttattcaattttcttgctttagtgtttccccctaaatcttcttaattgttattctttttccatatttcagcatgtttccaaagtcaacacatgaaacctttgcaaacaagctttatcaaacattcaaaaatcacaaacgtttcataaaaccgaaactttctcgaaccgattttac

SEQ ID NO: 43141 - DNA, 4099 bp, Cannabis sativa
tttttttttttttttttctcaattcatgcttaattgcttattgtatatatttctttcttctaaaatctgcacgtttactaccactccactattttttattggcaaattaaataccatatatacttaatattatataataattattaatttggtaaaaataattatatataaatgatattataggaggcatggcatggactgtggaagagcacaagaggttcttaatagggctagaaaagcttggaaagggagattggagaggcatttctaccaactttgttcacacaagaacttctacccaagtcgctagtcatgctcaaaaattttttaatcgacacaccaatatttataaaattaatcgtcgtcgttccagtcttttagatgtacgtacatatattaattatgttttttaattatataatacatggaagagattttaatagttataaatactttattttcataatatataataacgggtaatatttttttatgcagatgggaggagacaaaatattttataagcgcggtgaaaaatttgatgaaaaaactagtaattatactaaaagtacctattttgatgatgttttaaaaatcaatcatttagagaggccaatatatatgaataatgaatataaatatgatcatgatgatgattataaacatcatcactcatctccaacttctcataaacatcatcactcatctccaacttctgaattagagctcaaacttggagcaccaaacacatcaaacactattactaaaacaagtcctcaaaatcttctattttattaatatgttattagtaataattagatgtattatattttgtttatttgagtcatatgtttgtttggctaaattatgcaatttaatttaattattataaatttgaaatcatgtagttatagttttcaatgttatactctttcttttattagcttatagacattattgttactctatttaggtttatccttgttagtgatattataactatatttatagtgctttttaatttttatgatttgcttttttcattatcctaaaattgttttattaatgagactatttatttgtcaagaaaaaagatcaataattacaattctagtttattttatattaatttacatgtaaaatatgtttaaatatttaatgaacttaattagattgttttagtctcaatttttatggttattattttcaattaatttagaaaaaaaaaagacaatagatttatttgagattgagatgttggggggtattttattgtcatcgattcattgaacatggctaaatgggtttttacccacaaccactataggtgtattgatattattactatttttatgaatatttgttgtaacgatccagaggtctaactatttctatgaatgaaggtatttttttttttaaaaaaaagattcattgaatgaatatattgtttttatcagaataaaaaaaaaagaatatattgtcggcaattttttatttcgaattttcctttaattaattgtcagaaacataattaaaaatcagagatatataggacaaaatgttataaattttctttgacaaacaccctattatattattgcacgtgcctatatattttttgttttcatattttctactttatttatattatatggttctaatacttccaatagaatagatttttttcgaattagtactttcaatttcaatagaagtataatatattaatagttgtttctacaatgtcctttttaaaagtaatgtagtaatgtactatctaattattttggtatatagatatactaatgtaatatctatttatttcggcatttagaaaaatttttgagtttaattttttaatttatattcatgtacgttatagttatttaaaaaattttatgaacttttaataaattcgatataatttacaatatagaaagttcaaatattttatttcacaagcatataaaataaaatagtaacgtgtacaatacactgtttaaattctattttcgaagtgtcaaatttttttgaatttcttacaattttacaagatgtcttaaataattataacgtacatgatcataaaaaaaattaattaaaaatttatttcaaataccaaaatagatagggatatatttgcccatcttttttctattataaaatttttctatattaataactaatataatatcgtaatatgcatgaagtttcattttaaaattaattgataataagaagaagtaatttatgtatcttacatacttattaattttttacatattagtaatgtgattttttttaattaggtgatatatgatatgtaatgtaaaactttgaagtgaaaaagaaataataatatattttgagaaaaattcacaattttatatgatgattgattgagttggttatttataagaatccatgggggcattttgtagagtgcactacatgacaaaaaaccatatagtaataacatttgtcagtttttcaaatacacatttaaacttttgttctatgaaaaaataaaaatagtgacatttgaataaccggagaatgtcttcttaattatttaatttccacaaacaaaaaatcaaagttttcatgtactacatcaatgtacacgtcaccaacacatgtattgttttgttacatttttataatattaaaataatataattacgtgttgtatggtattaattttattgatattttttttacttagatcaagggttcgaaattcactctatctcctcttaaaagggataaagaaagacttgatccttactagaggcagtaatatctgtgtgatgagcgcttttgaagtgattaccgatgatccaattaaggtagactaagatataagacccttataactgacacgtagtccccaaaattgtcaaaatgaccgaaaaagtgaggaaaggatctccgccacatgatccccttatacatattccttatcctttacttggtttccgattgaagtcctcccacgcaaggaatctatggactatccattagggcaaacactatcacttgttactttcaaataagtgctccttctaaaacaggatcaaagtgttaccatgagattcgaactcagagtgaggaacttatgcatagagtcccaaccactatactactcagtggcaatgacaaaatcaagagccaatgccatgccctcaatttttttttttttaaaaattatacgtaaaaattaatgaaaaaaattaaaaataaataattttttatattatttacacgagttggctcccttttaaatttcagcctggtatataacatacaaatgttgcttcgaaggcttagagtaagattttcgaatttaaacaaataaaaatgattggacttgcgcttctctctctctctcttagcgatttcattctttttgatttcgaattctgagaatttgggggcgcatcgaaaccctagatttgctcccattgttgactgatccgttcgagctttcatgttttatgtttgtgtttttgggtttttgtattcgtttccttaaaccctttctccacggtgacctaaatttagagtcttggtttggtttgttgcgttttgaaccccaatatttagattacgtttgtgaccttcaaaatagtttctgatttgtttgtggttaattcccacaatgtatttacgaaagattagtggtgtgtatataattgtacgacccttgttcttctcgctttgagttttagtttgtgatggctatattatatttatttctattacatttgagggtttatattattatagtttttgctttttaaaatttcaattttgttttggtttttttaaaaaaaacaaaaaaagaccttgatttattatttaaaagttgtcttgtcgttttgacatgtttggtatgtgatttttgctgttgagtggtgtgtgattttttttgttgagtggtgtcgttagttttgagtggtgtgatttttgctgaaagttatgagtttgttgagttagaattgtcgtgggcttgggaacccccgagttgttcaattccttaaagaaatagtttttcaaaagagacccaatttagtttttttttgtgtgagacaatttg

SEQ ID NO: 43142 - DNA, 1614 bp, Cannabis sativa
tatcatctggaactctaatcttgaagtcatgtaccaaattccattcatcatcaccattactttttaattccaaaatatcattcaaatccttgtggttctcataatgcttcttctccttataatgtctccagaggtttagtcgacctttaactaatcaagtcaagttcaaaacatccatactctttatggttgaaaggaaagttaacaacaaatcattgtaagacattattttagaaatatattttgtattgtaatgattgagtagccaatataaggtattatcattgttgtaagtaacagatggttgaatacaatcttaagaattgaaaacccgtaccaatcagttgtccattttccaatctctgaacaaaatgtttggcttgataatttgcaatacgagcaataccataatgattagcagctactactataattctgtacctgatcttcttgatctgatcatgatcgattattaatccagcatctcgaatcattcccatatcaacgatccacaataatggagaaatcataattcactagaaaaatattcataaaatggctttcttctttcaaaatagaaatagcttcttctaactataaaagtaaagagtggtgttgtgggattaataatggagtagctttttgtttcgaaagtaggttgaataagaattgataatggagtaccaaaacttacatactctgctacattgcatcaaggattgaatatctctgatcagaatgaatattgtaacaagtagatcgtactggctaaggacttcatcaaccacaatcttcaagcccttcaatcctagatgttattgtacatgagctatttttgtgtatagattcaaaaatttcatctgaaatagattcaactcatattacaattgaattgagaaacaaagaaaaggaaaatgagtaaaagatctaaatcttgctccaataatatctcagacagaattcctttcaaaatcaaaaactgatatttatctgaatggaaagaaaaaaaaattgattttagaataggaaaaatgaacagattatctaatataaatgatagtcaataaattgtaagctttactataagaaatagttctatggaatctatatggaatggtgaagaccactgattcgtttaaaagtataatattcaacaaatatggtaaaacaataattcaaaacacataactgaaacttatgaaataaatttagtagctgtatttgagttcagttatggcattgtttttctttcatggtttcccaggtgacaagtggtgttactcaaaactaaagaagcacgccaggaacgtgagcgaacgaacacacgtgtttttcattcactgtattaaatctggtttctggatttcgaatctatttaagcaaaacttcccagcaaatcccggtattgctctccttttcttttgtcactttccgccaactgtgcccaccggaaatggtaggatatagaaaatgttagccttgtagtctctatataaaacctgtttgaaggatagacaattcactaagtattcttgtaacgttttattgttcaaggaagcaaaatacactcttcgaagatttttgtttgtgagttcatagaatactttcttgtac

SEQ ID NO: 43143 - DNA, 3377 bp, Cannabis sativa
agctgctgattggaatctttgcttggatgtttaaaactttgtatgtttatatagatccaaagaaataaagagaattagagattattgtattatctgctgagtagtagtggtcactaattatagttggtctatactctacaagccaatttcaaagctacatctattattatgagatgcactttttctcctcttgcttatcttgaccataatacacatgttatgttactctgccttatctttgacttgaatatatcttattcccatgatgcttacagcatcaaatagctttcaagcgattttcattttgtattttatccctatagaatgaaataagggacatatgcatgattactttgataattcatttatgcattagcctctgtttttggataggtaacttgctaaatatgacggagaaggaggacacttgctctcccactggtgttttagaggattatttcagaagctcagactctgaaacatgctcttccaaagagcccaataatgggtccgagtctcacaaaaatccaaagctacgttctcgatggcatggtttcatgcaattgctaagaacaagatccaagaagcctttgaatacaatgcacgctcttaatgttttgaacctctcgaggagaatgagtggcagtatgagggagattatatcgaaatttgggtcggactctgattatggtttgaagtctccatggaaaaacttttctttgtatgagcttcaggtcgcaacaaactatttcagacaaggtttttactttgtatttggacttcaataccaattagcttataagttgtttgtagaaatgtctaactgaattttgtttttcggggtcctgttctttgttttcggtgcagaaaacttgattggaaaaggtggttatgctgaagtttacaaggggtgtttgagaaatgggcaattagtggcgattaagaagctaacaaggggaaaaccagaggacactactgcaaactttttatcagagatagggattatggcccatgtaaatcatcctaatactgctaagctaattggctatggagttgaagggggcatgcacttggttcttgaattgtcgccacatgggagcttggcttccatgctttatggttagctaaattacaattctcttaatctttcattgctttaattaaatgttatgtattcattggtggtccattttagctcatttttcaccactttaaaataaatagtctattattgttcacaggctcaaaggagaagttgaaatggggcattaggtataaaattgcggttggaacggctaggggtttgctttatcttcatcagagctgtcaaaggagaattatccacagggatatcaaggctacaaatattctgctaagtgaggactttgaggctcaggtacctaactttttgttaatgaacttaatgagtataaaatcttaatgatactgcattctttctaatgtagccactgatttctactgtttgcaaattaagtagttaccactccttgtacagatttgtgatttcggtcttgcaaagtggttgccagagcagtggactcatcacacagtgtcaaaatttgaaggcacctttgggttagtaaaccttatactttagtaactcatttcccatcttccatgaaagattttgtctagtcttaacagttctacatttcgcaaactcagctatcttgctccagagtacttactccatggcatagtagatgagaaaactgatgtatttgcctacggggtgctactattggaattagtcactggacgccgagcgctagattattccaaccaaagccttgttctttgggtatgttgtattgtgttgtagttccttcttacttagccaaaggatgatattggttgcataactttacatgcaatgacaagataaaaggatgctttttttttgacttttccaattggtccatgtctttttaggcaaaacccttgctgaagaaaagtgagtcaagagagctggttgatccctctttggccgatgactacaactccagacaggtgaatctcgtgctcttggctgctactttatgcatacagccgtcgtcaattcgtcggcccactatgagtcaggtataatatttttctacaaagtcaacctcaacatatagtatctttaaaaattaatgaaaaaccaatctgagagggtaggaatagaatacgtgttttaacttattaatgttggttatcaatttcttgtacaaggtgatatcataaccactggattaaattaataattaaaaatcagaagctgaacatgacattaattgactctttctgtattttatgaaattgatttgcattgaaaatggggttgcaggttctagagcttttacacggcgattttagttgcttaaagaacgtgaagaaaactcgaatttcatttttccgaaaggcatctcgtgaagaactcaccaatacagaaggccaaaaaacaaaaccaggaataggttgatctttgattaaccaattcctgagacaaagatggtcagtaagaaaaaacatattgatgatggtgtacataatgaaaaagcaagaacacgagaatgaaaaagcaacttcagtttgtgtacatagaaagataaagaaagttataggaatttttacaaccaaatacagtgatgcaattacaaagtctcaaccctatatcctatataaagagcttctggctcctcttctagaagactaaaagttcatgaggaaccaatttttgtttaaacaaaactacaatgataatatatttgtgaattttgcattactttcccttttttgttttcatcttttcttttttatttttatctatgaagttgaataatttaatataaggtgcttctatgtatagacatatttcttctctgtccgaagaatttagacaacacagaatttatatgagtattcaaaattattgaacactcaaaaataaggaggcaagtactcaaataatataacatgaaatatataacataaaatatatgtatatgtatgtacactccatttgtgtagagatctctttacatatatactcactcaatctttttaaatttcttttcaacacctacatcatttttaacaaaattatcctcattagtaaattaaaaataatatttacttttattattattttttttcatgaatggaatataataattttattaaataattatctcagttaccaaacaatataacaaattagtaggaacatactccaaattgaagctacaatcagggtactgttagactataatataatatgaataataaaatatatataaacaatatatgatgcgaaataaactctaaacatatcgaaaacgtatgtgcaatgaaaggatcgaaatacttccagc

SEQ ID NO: 43144 - DNA, 2371 bp, Cannabis sativa
aaaaagataaaagagaaatagattactaaccttgactagaaatggtcaagtccttatcctggcccaaggcccaaaagaaatatccacccaagcccaaagatcttgcgaaacggaccttgattctaatagaaagtacatcctcatatccaatccatgaatctccactgtaagagtaaaacgacgccgcttcctcatctaacacaggaacaaccttgttcctcttgttaaactcaactatttgagaatacaccaaaacaccatctcctggcccaactccaatagtcggagccccgactccattctcgtccgggttttctagcttccaagtcctcccatacaatggtaagcccattacgatcttatgggccggcatacccgagttgatccacgacccgattccgaatgttgtactgatattactattcctgtcatttaaagaagaatgtaacccggtaaagttttcccatgacccgtgatagtcaaaacacatcgggttgacccaatcaagagtttgacccattactttaaccgggtacgatcttaaattatcgaacagaaatctcgaagagaaatatacagcagaggttaaaagaagccttgccttattcctattcctaccactaccaattatggagtctaaaatcaaagctcttcgccattctttgtataacaaagctaaattctccatatcctcatcgttagctgggaattcccaatccagatcaataccgtcgaagccgtatctccgagctactttaatggtggacttgatgaatgtttttcgggttcttctactgctagccatttctgagaacacttttgggtcattcccaccacctccgattgaaaggagagttttcacaggtgggtatttgttttggagtgatttgataaattttggtatctgtgtcatgtctaaagacgtgatttttagcttatatgttttcgggtcgggtaagaggaaagcgtagtagatatggctgaagtaggtggtgtcgacggcggatgctggaaatgacccgaatgaaggccaataagctgctctaattcctctccgtggtcgacgaatagggtgggaaacgcgtggtttatgaggtggtgggagataatccggtcccggaacaggggatccgacttgaattggtggctctgctggagaaatgggttccgaagggaatgactccggagctggtcccggtgaaaattctggcaatggaaatgactccggagctggttcgggtgataattctggcaagtatgacaccggagctggtccaggtgaaaagtctggaaatggaaatgactcgggagctggtgcgggagaatattccggctgtgggagtgtatccgccggagccggagatattgggttgggaagtgtagacggagaggatggtactgatgggtaaggataaggatgatgacgtggcatatgtgaatatgaactagttgggaaagaaaacgacattgaaattggaatagttgattgaaaaacgacaatgattagacatgcttgtatgattagttttggactagaagtagtagccattttggtatgaaaagggactttcatcatgatatagtttgtttttaatatttaagatttgaatttgtacaatacatcaaattgcattatatatagttgtattgtatcgatataggacaataatgtcaacattttgatatttaatgttaacttagattgtaattattttgtggtcaaagtttcctaagtgtatatttggagattgcctagagccaaaaattaactgcattcagccaaattaactaattgaatatatatgagtagaaatcaagcctacttttcatttttgctggaatatgatggattttttaccaaattaatttaatacacatttatatattaatagagtaagggatatccccttggtagcctacactttactttgtcttgagatcaataaaatttttcagatattattatttatgaacacatttttcctatcaaaattacttgctctagtgtgaccagtgatgattttttttacctacactaatgtttcttacagtgctccaatcaggtgtcttcattagtacctcatgggcttcggcatgatacgatacaatggtacacattggcacaacatgacatgaaaaatatgggcttaaacatggcacaacatgacaagcacgaatgtaagcatgaatagattagcctgaaaagcacgacatgcgacaagccaaaaaatacgacacaacatattaaaagtttcaataatttaatattatcaataataaatagatatatatttatcaattataaataaattaaaataataataaaatttaaatataatacttataatatgattctataattaacactatt

SEQ ID NO: 43145 - DNA, 3219 bp, Cannabis sativa
tggccggcggagattgtcacagccactataagggtgtgagccactgccactgccaccaaccccactaaggcacctgcctctagcttatctgaattatgtccattaattaattaaataattaaataataattacgataattaattaattaattaataaataaaatttattatacccgcggccatggctgagccaacgccggcgaagacgaagagaaaggtggtgatgaactcgacgacgagagctctaatgcaatctggttgagcagcctcttggctgctgcccaaagcaattttggccattttttttcttgcaatttatttgataaatttagtgatgactaaaataagttttaatgtgacctatatttatacaagtttttagatgcatatgtatgagattttttttttttttttttgggtccatgatgtaggattaatattataatatgtggtattttttaaatgggagaacaataatgtccatttaattatgagcatgataataaaactatagttgactttaaattatgattaatgtaattaattttctatttgtatatgggggaattgttttatatagtatttttttaatttttttttaaaatttatgatttgggttgctttaataattttcatgtagattttaattgtgatttatgttgctttgttcgttgttatatgcatgtattttgtgtgtaaatttcagtaaaaaaatgacaaaaaaaatattttaaagtataaaaataaaaaaagttctattttaaatcccaactatatataccattaattattaaatatatatatattaaaatcaattttcttttcttttaagaaatggtgtttactttgtaattttaataatatttatttggtatttatatttaaaatcatacatattatatatatatatttaataaataatggaattttagtaaaagcaaacgactaaagtaatacattgcaatctaattgggacatctcttcattagagacacgattaggattagagttagaaaaatgagtcaaataattagctgcttaatttctaaatcgtttaaaaataatttaaaatcagatgaaaaaaattgtagcatcacaattaacctttaaaacacctatgttctgtttcatccaccgctcggaagacacaacaataaaaactgttgcagcgggttcattcaacttcgtagcttgatcactctattatgtaaagtacgtaactgcactactaacaaccctttcagttgcaaataacttgttattctcaactactaacatcgatttgattgcgagctatcgaagaataaagaagaaccgacaacgaaacaaaacaaaacaagattatgtcatatagacaaggttaaaacagtactcaaagccatgtcacagagacaatgtaaatacactcaaaactatgtcatagagacaaaaatacaacaaaattatatcacagagataagattaatagcaataacaaaaataaaattgtagtaagaaaatacaatctcgaccaaaccgcacctaagtccaaaaaaaaaaaagccgacaggcctcaccagagaaaaaaagcaactcaaataactataaatttaagaaagaaaaacttatatattaatttatattattctctcttattagttgaaattagttattttatattctaaattaacattttgatcagtaaataatttttatgaattcaattataagtacttaattaagaataatttggtcaataatatataaaagtttttgactaaattgataacttgcgtgactaaacatatttttgatcactaacaaattttgtgacaattaatgagaaagaaaccaatttgatgaagacattccactttaaaaacacatattgtcttattaataattaataatgttgtcctcttataatgatgaacatggccattatatatttactttttgtccggttgacatttaaatagttacttatttttcataatatatagctataaaaagagcatgtaattaaatacaaagaaacattatataattaattaataatacatattaatcattacatgtaattttttaattttaggtcagaattaattacatgtaaattaagctggacttcgctggttttggtatagaaccaagaaagcacgtggattaatttgtttaaatttagattaattataatacaagttaatcaataataataataataattaacagctcaaaactacttagcagatgtgtggggggcatgtgggtcatgtgcctcccaaattttttataaattaaattatattttgaatatttttaattttactctcataattaaaattaatatatatttcttttaatttacttccttttatattttcaattttgtattcataaaatttatttttgcatttacatccttacttatctttatttctataaaatatatattttttttaataatgattatattgtttagataaatatttcctcattattattttttttcacaaagaagaaatggtagagattttaataaacttgtcatttaattagtacatgatgatttcacgatataataagtgaatctaaagcaatatataaatatattggtcaaaagccacactgcgcatgcatattccaattaatatcgttgtcaaataatttagcataatgtttaaagtttacttgaaaatgataattcatgcatgcatgatcatatactataaatttgtattttttttaacagggaattggtaaaaattgttgtaaagtgatgtttggtttgataaaatgtgttactatatgcatttgaagtagtagaaagtgaattttttgaaaaattattattaatacttagactatatagatggagagaaataaaattactcatgatcaataattaaaacaactacaacagcatgttaattggaatgtcaattattatgagactattgtatgtgctcgtgatggagccaagcatagtagctgtattcttcaaagaaataagaatggtttggaagttctaccaagagtttctcaagaagaacagagtcacacaatacttatagtgttatgatctataaaacactcaagaaatatatatatacatatatatatatattacagatttaaacatattcttaaaagtgttttaatatagaaaaccctaaatcataaaattatggaaccttcgctaaattaaagaagaatatgatgataaaagatgagcagaag

SEQ ID NO: 43146 - DNA, 4074 bp, Cannabis sativa
  modified_base (580)..(583): a, c, t, g, unknown or other
tgagatactacttgatacgtacacttgcgtaataaacagaattttcgtaacagcggcctgctgcttggctgtttcgatggcatttaatttagagtataagtatattattgtgaagagtgactcgaggctagctataaatgcgctcaatatcaataggaagttgtcccattgggctcttgagaactatgtctccttttgtattaagtcttctcctgcttttatttgttgtaatttttcttatgttagtaaaacttgtaactatgttgcccataatgtggctaagtggactttttcccaccaactgtttggctttattccgatctcctcgctaccgagaaatctattttataatgaccacgaggtctaactgttttaattgtttaatgaatattatcacacttattttcaaacaaaaaaaaaaaaagtaaaatgtcacatggcattccttgattggtccaagtcatgaatttttaaatttttttaaaaaaaaaataatttatggtaccaataagaaaatgacacgtggataatgacttaatatttaacgttgagatacctacagagttccagaaatataacnnnngtattattaccgccaaaaaattaaacttatgtatttatttacaactaagagttaaacttaagtatttatgccgcaaattacttttattagtatcactacatggttactcacatgaaagctacttgtaacttgaaaaaaaaaaaaaaaaaaaaagagccactcatctgcctcagctcaagttataaaattagcaaagcaaaggtaccataaaaacaatatccagaagcaatatatttttatttttattttcttaaataaaaatactatactataaatacaactcaagacatcatccacatagaacagcagattgtacatttaagattctatactgttttgaaaactaacccaatttgacatgttcggataacaagtcgaaaagccagacatgaacagaaatacatcctctgtcaagtacgagtacataaaaacaagagcaaatatttatacaagtcagaatttagaagctttagtattgaatcatacccttttggcatcaatcgtctaccacgaataatgagcatcactgaccaaaaagcatcaattctgacatcaacagctgcagttgcctcatgaagaaccaatatcttcaatcttttgggcagtgttcaagcaagattagtagttgtatctgtttaacactaaaattcacaccagtctttgatagtttgatatttcatcagaagctatagtataacagatcaaggcaacaaggaaaagcaagaaaacaatagctgttggcatgatatcttaaagatgattaatagaagcttagaaaaagaatggttttttttcactccccatgactagaaaggactctaacccattaaagtatcttactcccaattcacaattcacaattcacaatcaaaagatgtttttttttctctgcgggcatgtgcatagattacaatggattacaaaaatttccccccatctaaaaaaaaggaaaaaagtcaaagatatttctcaacaaaaatttatcaaaacatgtgataggtgacagtcttaaattagaacacttaaaaatctctaaattattggaaaattaattaactctgaaaaaatgcacttacaacatgcaagcctaaccttcgtaggcttgattcacattatgattaggaacagttcttttaactttccagcaaaagatacttgatcggtggcaattcaagacaagatgtggttagaataatttgcaaagttggtaacaagattttcttgttaaccaatttgcctttctcatctaaggggactgacaatccaacctgttatcggactctgccttcgagctctaatcctcctatgagaaccaccttgcaaacggtcaagaactgcatatgttattgaatctggggttaagccttgctgcttaagctttgcatacaagtcaactgcctcagcagttctcccacatctctcaagacagtcaagcaagatattgtatgtaacaatgttagggtagcatccctcagcaagcatctcatcaaacaaccgacaagccatttcaactctatctgtcttgccaaaacactcaatgagagtgctataagtaacaacatcaggactcaatcctttctcttgcatctccttgaatctcatgtgcgcttcatctaggtgaccatttttccctaggtaattgatcaaggaattgtaagttataatatcaggtttataatcactgttttcaagttcttcaaataattcaacagcctcttcaactttcccagctctaccaaagctggcaattaaaatattataggtaaatatgtctggggaagggccatcctgtttcatcttctcataaagttcttgaagatgggatatttgcttcgactttccaagagctgagaatacagtattatacatgatagtatcggtggttattcccttttcatgaattttactcagaaggtccacagcttctgtcgttttacctctggtacataaactctccaacatggaaaagcaagcttctctgtcacccttatcatgaaaactccacatgttacaaaacaaacggtgagcttcgctagcatggcctagtttactcaatgtctttacaagaaatgcatatatgggcttagtcatgtacttcattgataattccactatctcatctaatctaccaagcttaccttcaacaacaagagcattcaaaatcacactgtaagtaaattcattaggcctacaatccctttccaccatttttgaaaagacaaagatggccttttcaaccatcttgttactagcaagggcctcaatcatagtattgtaagtgattaaattaggagtaaatccctttgttatcatttcctgaaaaagtgccagtgataaatcaactttacccgattttccattcattctgatcataattgtgtatgtaaagtcatcaggctcacaatgcttctttctcatgtcttcaaatatcgtatacgcgtgatcaatctgccaaaaagctgcacatcagataatcaggatccaacaaccaaaccactttgaaatacaaaagaaaaaaattgagtgtcaatgttcaaaactttgcagcccaagctccacgtaacagagttaacaaatcctgtttactaatttgtctaatagccattaaaatatccaatcttgattcattctagttctttcccaaaatcatttctccatgaaatttcaaattttccatatagtaacttaaatcattgatgaatttgtcaaaacaacaatgcgagaaagttaaattcagatagtcaaaacaacaatgaatttgtaaacatgatcgatcgattggaaagaacttaccttatcattcttagccaaggcatgtattagcatattgtaagcaaaaatatccagtttatagccacggcgtcgcatttcccgataggtttcgaaagctttggttgaatcatgagaccgcaaataggcttgaagcaagcatttgtaagtgtaaggattcattctcagctcccatttcttgaccagacctaaacacatttccaaatcctggctatggccgaaaaggccaataagaatattaacagtggagattgttccacgcacaccggaacgctccatatcaacgagtacggaacgaacttggtcgaggcggtcggcggcggcggacttggagagaatgaggaggagtcgggtgtaagtaaacgagtcatgacggaaatcgggagaaagcgaggagcaaaactggaagaatcgaagggccaggattggagtgtttagggatttcaggatttcggaggcttctgatgaagtcggggtaacggagagggaggcgaggtaatccgataggtcggagaaagggtcagaagaggattggcggcggaggaggattcttgtggccgtgcagatgagttcgtggcggggcagtggataccctcggacgtcgagaggaagaggagagggcggtttaacctcggcggagagtgatcggccggtgggggaagttgaggttactttggctgtgtatttggtggcgtaatggc

SEQ ID NO: 43147 - DNA, 8117 bp, Cannabis sativa
gtgggattgcacaacttattcggtatttcctcttacggatctcgggactactgactgtcacaaaaacacaaggtactaaatgactatatttcatataaataataaatattcagagcttagttgattgaagtgtatgacataatacacaatggtgtgtaggggtgttcgcggtacgggtggtgcaatttttaaccattttttcaaaccaacccgcacatgcagtttttataatttcccaaaaccgcacccacaccgcgaaactaaaaaatcacagaaatcgcaccgcaaaaaatggtgcggtgtagtgtagttttttaccgtttctacaatttggattatcacctaataattaaactatcacaaacacaacaaaacatgagcaacacttgtcaaaaataccataaagcttgaaaataaatatgaaaaaaaaatttaagtttcaacaatataataattagtgggctttgggcgagacattcacatattggacttaaataaatattaaaattggtatttgtataatgttcagtacggtgcggtttgaagcgcatattaacaatttaaaacctcaaatcgcaccgcactgcgcgattttaaaaaaaatgaaaccgcgatcgcaccgcaaagaatttcaaaccgcatttttattgtggtacggtgtagtgcgaatagtttgagcggtttgagcagtttgataaatacccctaacagtgtggattcgaatctcataataatcttttagttttggagccaatttgcaaattctcatttaatagagggactgcaatggtaaaaatccataataaattataaccaaaaaaaaaaaaaaaaagacgccattgtcaaaaaactcgaaactcgacagtggagcgagcgagcgagcgagcagattcagtttgttgtccatggaagttgggcaaggactaggtggagatgaactcatctccactttacaaaccctagtatactctctccaactcagagttaaggtttgtctctctttccttttctctaatcttcctatggtactctttcagttatttctttttttttttttttgagctttgtgatgttatttttcgttttcgcaaattgaatcaggaactagaggctgaaaattccaagttatcatctcagctctcaaattgcgactgttctgaggtttgttttttcgatatactaactagtgtgtatgtacttaaatgtggaatgttcgagcaagatcagaaaatttatgttatttttcgtatttgattgaatttgaaacttttccatggttgtactggctcagaaagagaagaagaaggttgatgactctgtttcaattaagactagaagaaagaaattgactaaaaaaggtggttcttctttatttaattggattttgggttttgttttcttttcgaaaacattgtttatgtgtgtgtttaatcatatttatctttgtgttgtgtacaggttatgatcaaagcattgcgaatcgccattccaaaagatatgttgctctcaaactcatgtattttgggcagaggtatatttagttgacattgttttatctctttgattagcttaagttttcgaaaaattcttgggagtctatagttctttcagggcatgtttgtggttttgtcgaattgaatgtatggggatttttgtcaattgaatttggatgttcctatcaatgagtgcttgaattatcatttgttttcttctatggtttcttttgtgagatacattctttgtaactcgaataagcctatttcatttatggaatgtttcatatgacacatcttaggttctatgggttttcttcagaagcacaattggagccaagtgtggaggtatggtctcaacttattcttttattttaattttcttaactcatatccattattgatgcatacgtgtgtgggtttgtattacttgactatttcacttttatttcattctctttacagtctgaacttttcttagctctagaaaggactatgcttttagttggtgacaggaaagagtcacaatattcaagatgtggtagaacagataagggggtttcctctattgggcaagtaagtagaaagtgaccgttccgttgtaatatcattgatggtcacttagattgaaaaacttggtagacttgtctacaattctacaataatgttctttttatccctccttaacttattgttgtttcaagtaaaatccatatttctcaacagcttaaccatgaatttaaagtgttctgttggtgttgtcagtcagctaaagctaactacacctgtatttggtgcaggtggttgctctcttcttacgatcaaagctcaagaaggcttgttcagataatcaaaattctattgaaatggtttcaagagaagaatatggtcagcttttttcctttttcatccctacttcaaaactctattactgctgcaggtttttttggtatttgagaatatgtgtgatggataaatcgagtcataatttataagcctaattcacaagtacttattatttttgtaactgaaaatgtgatagcaattaaaaccagaaatactttttagtataaactatcttacatgatatgttgtcatgatgtaagaagtttcttgtctggaagtcatacaatttggtgaattgtttttctagtatatggaaccaatattttgaatagaaaactctagttttatgctccactcctttgtttaattttttatttttatacaaaatgttctttttaaaacaaaatgcatcccttagggttaggcagggatcctaggttaaaaaaaacaaaaataaaaacatcacttttttattttctttcttcttcatatttccctctttgtttaatgttctgggtatgcatttattatttttccttaagttattttggtcaaaattgattgaaactggtagaaaatcaaatgtaggcacaaaacatctggaaaccagtacagttgaaataattgatttgaatttaatatatttctcagttgtttcatcttttaattatctcgccaatattgttttcacgatagtgttataacaaatagagaaaatcaatagaaagcaagggagggaagggttttctgacaaacagaaggcttaaaagtatataaactaagatgtagcatatttttgaaattcgagagctcgtcatgcatagagtttttaataaactgcggatgagaagaatagtgggatgaggatacaagaagaatatagctttgaatgtgattgtttttactttctgactcacatcaaattcaacctatttgtttctagattttaatctacacgcacctttcactatttactccttttcacgtgttttgcagaaggagaaattgattatgtgagggttctgaatcgtgcccttccgaatgatattcgagtattaggctggtgtcctgttccaattgacttcagtgcaaggtttttccactgtgtacattgtagaggtttttcagtagtaaaattgtaaagtaaatatgtttgcttctttgaaagatttcattagcagtaggaacttttgaaaatagtataacttgtaactcttctgctttcataatggatttctagagaataatatatgattgcaacacgtgttttcgaaatttttgtgaaatttcttggtgcatacctcataaacccctcaaatcattgggcacataataaatgacgcagacatagtcatttgaagataatttcaagttctctgctatattttttttgttctacatgtctttactgcatattaatctagggaaaaaaaaatcgagctccctgtatatttctgtattttgttttaaagttctttccttacatagtgtcattgcccttttcattagaaatttccatttttgactcattcagtgatttattaatctacttttgtgtttgtgtgtctgtcagtgttagattgattgtcttctaatggttgccttatccaaaaatacaggttcagctgtctgggcagggagtacaaatatttcttttggggagacaatctagatcttttggtatatcttttagctcttttggattacttaaataaatgatttgttctctgtgttgcttaagtttaggataataatttattttaatttgctggctcatgttctcaaggcaatggagagctctggtgagaaatttataggtgaacatgacttccgaaatttctgtaagatggatgcactaaatgttcacgcctacacgcgtcgtgtcaagtcatttgaaatttatccttgtgatgtgaggttaacattggtagataaactctctcgttcatgttgaaattcagtagttacacctgacatttctttcctaggttataattatctttgtactttctgattcgttctactggttttgattttcattaatattcataaccattatataatgtgaacatagaatggcttttttcctcgaaagtgatgcaaatgcaatcacgtttaagaaaaaaaactgctaattgagctcacacaagtgtgagaaccgtaaatagcagctgtcaaagatgtgtagaaataagcagtaatagcttctaatgtttgcaattgtagctctcgaaacatatgtatattctaggttccacaagttgctgaatggacttgtcctaatggtgtttaagtgtccaattgaattgattcctatcttgttatatagtatacaacaaaatttcacagttttttattttgatatgcctagtaaaatctcccaagttactacatctagaaattagaataaacttgcttgattctgccttgtggaatatgtgaatgctagtatagattttcaactgagcactttactttgagtcagcttctgtttttttttttcttttatacatatatagttgaattctcaggcctctttctcaggtcatctttatcagttttgctgttcaatactcaagcaaatttgcttcccaattttttaattgattttttatgccagtgatttgttttggggattaactttttactgcctagaatcaacaaattttatctactatctggacaatgtttggtttttgctgtatagaatgaataaaatttatctaccttctgttttctaataattttgctgaaattcttaggtttcaaggaaaccaactttgggcaatcagaatcaaaggtagtgccttcttgtggcaccaggtccgatgcatggttgcggtactattcatgattggccaaggtcttgaatcccctgatgtgcgtatcagttgtccttctaactttactattttgagcataatccgagtttcttgtgaaccccaaaacattgtattgtaatgggtttatagtaatattacatactgacgttattattctcaactcatcataaatacaacgttccctataaacatttatcctcactctgtataaatgcttcaacttgtaggtaatagacacattactggatgttgacaggataccaaggaaacctcaatatctcatggctccagagattccgttggttcttcattcctgtgaatttgaagatttaaagttcatttgctcttcaggtaatccaaccactgagatccctgttttataaatggtttatgttgtttcccaatgtggctggtctggtcatcttgttttttttttacatgccgttgtctaccacgaccaatcacttgactttgtttctctattgaccaaccaagtaatttgtgtccaaacttgtagatgctcaacaaactctgtgcaagcacttggtgaaacaatgccaaacctatcaccttcaagctgccatctacaatgaagccttgcttaccagtttgcctgtattaagtggtgccaaaagcaaaacctttccgtgtagtttctttaaactgagtaaaacttttattttttatctatactaatttaccattgtggctggctttggttttcttacagataaaagtatgttaagcaatggaaatggaaaaatcaagaaaaagattgctcatattcctctcatgtctcgacccactgagcgtaagccttcgtgtacctttgacaattaaatttgtgttgtcaagtaatattgcaatatgatacaacaaattggtttgtgcaagagtttttctcattttatggcataatagtttgtgtgccgctagaaaataaaggacaaccgtaaagactatagtcaagttttagttttagggtaaattttgctttagttagtggttgcaactagagaaacctatgtatgcaattgtgatctattccatcatttttgatggactggaaagttaaagagtatttaaggattgttataaaaagggttcataccttttcgtaaaaataacttttagaccttacatttcgttaaaaaagttaaaaattagacttttggacccaaattttcaccaaaatattctgttggatttggagctcctcgattttttcttgagctaacgaatttcttagatctagttatattagaaaaatattttgaccggaattggctttagtgtcttgatacttttttacaaaatacagagttcaaaagttaatcttttacaacacatggtccaaaaatgtataatctcgttttaaaatgctaaaactactgtgctgaacatttacttccccttcttcttcttagtgatttcccacaatgtgtaagacatttctatagacagagctgtaatcaatttcaatatttttaaccaacttgtaattcttgaattggttccagcatcatatgcagagcgccgtgccaaattagagactcaagacaagagcatgaagcatcaacagatacgtcgtctttaggggtacgagtacaactaacataagatatctcattattttttcccagcaagcatgcaatatttataaatttgttaatttcaaggggttaatatagctcatctgaaattgatctattttttcttcagacaattgatttagcacatgcatgttagctggtataggaaaaccaaaatatgtagctcaaatagtcagacatgtgatttgcttagcaattgctttatttttttcgattctcaattattgtaagagtaatcttattctgaacattaaatgaagaaagaaaatgaaattttgatttcgagcaagctagctttttgtttgatagatagtgtatgtagttactttatgaggctcgcctagagacggctgagcaaagctttggaaaaattctaaagttagaattttagaatgtccatgatactgttagactatgaaaatattatacaggggcttattagtaatttgcaattagtgtgaaaatctataaatatgtaattgtgtaattattaatggatatggaatgaaaaaatagaactttggttcaatcgggagattgatactgtcttaaagagtgtattttgaagatttatcttgtctcgaagaggacctgttacctatcagatccactcttactgatagtagcccgattttgactattaatttagattgtagagtcaattattagtataatgaatagtctgaagtgttattattattttttcatgaaaatttgacaattcaaaatccttcactaatatgagtactgtatttcatcattgtgccctaagctagtaagctttttaattgtgtatctatctcccaaagaatgaatgaatacatcatttgaagtagatattttacctcccatttctttattttcctaataatttcaattcacaaagtggagactaacacttaatgggtcctagtagtagtagcaacacagtttaaagtgataaaagattgaagttggtagagtaagaagtaagaactaagaagaagagttcccccaacagtggtccataatttggtgaccaaatgatgcaaatttcaacagcttacaaaagagctaggccagtaatgaagaaaaaaaagaacatttcattccaatttaaggtcccattaaagataaaacaccaatttctgtgtgggtcatgttctgctcattattaatctcaaaaggcacaaactaaaactgtttttcaactctttgggttgtctttttgtttgctgttttttttagtagtggtgtctcactagcgcttaaagaatggttagtgatatttcataaaaattattatattagcgttttaatttagtaactattatgaagtattg

SEQ ID NO: 43148 - DNA, 2585 bp, Cannabis sativa
  modified_base (41)..(47): a, c, t, g, unknown or other
taaataattttcataaataatcataattaactgctaatttnnnnnnnaactaagcgggctttacagcttagactcagttttaaatgatgattaccttatggttatgccacgtgtctatcttccagaaacaaggataacaacgatgttttatgaaaataatacgaaaactacaagaaacctacataaaaataacatctaaataacaatagaataataacaaataataacatacaaataataaaaaatcaataataaattaacaagagtacaacataaaaataaatcaaaagaccatattttttgtaaataaaattataaaaatcgtaacaatatttaaaattcggtacaattgcattttataattttttttttgttatttttgtgtatttgtgaaatatttctattattaaaaggtgtgtttagcacatgccaaacattataccaaatgtagtatcaccgggatgctagcaaacaatgataagtcgaatgtctattttgcagaagtagaagacagtgagaaacagaatattcgagctatcttgccatttagggagggtttatttcctagggtgaacttgtgtcctaaaaaatggaaggaggatgattgtaacttaattctcaagaaaattagaatgaaacttcatacatgggaaaaccactatcttacctttggaggtcgagcactactcattaaatctatgttggtgggagttcgaagttactggatgagtatctttttacttccttaaaaaggttaccaaggagatagataagctatgtaggaagtttcttcaaggtgaaagaggcaataacagcaaaatccatgtggcttcatgggacttagtttgtaaacctagaaagtttggaggattaattggggtttagagaagatcacattggaattgagcttcaatggctaagtatctttaggttttgttgacaagatgtcttttggtttaaatggattaataacatttacttaagggatcaagatgtttggcttcatgaggtaagagttgatgtgagttggtattggtaagaactcatgaaactaaaagaggttttctcccgagcagagatcctaagggctgaatgtaaatgaaaattaaaaataagcaaagtctatgaaaagttcttgcaaggggatactccatgtacctatggaagtttggtttggtgcaaattatctacaacaaaatatagattcatcttgtggcaagtagtgcattcccatttgctctcgagagaaaatctaattcaaaaacaggtacatattgattcacctctctatcgtgtttgtgaaatgggaaatcaaagtcatgaacatctcttcttcttatgtgcattctcatggcgtgttctgcatcaaattgggagcaagcaaggccgtcacctatggttgtctgactatacagagctgctgcaatggataaaataagagtaggtcaaagaatctgcttactaatctatataatgatgcactagcaggggccattgaagacatgtggaggaaccgaaacttatgcatatttgagagaaagtgtatgtctcttgcttatattaacagagttgtaaaagaaagtataaaagctagaattcaaattgtaaatgtgaaaaaaaaatcaccaggcatgctcgttatggattttgtacaaaggctaaagcatatactgaattgtgtattagaaaaattaaaatgaaaaagagagtaacaatattattgattgaatgaattggatacaatggcataggactattgttaacgcaggcttttgttaacaaaatttgagcctcatgaatatgattcaacacagaaaaactatagaaaaatatataaaaaaaaaatgaacaccgaatttttacgtagttttgcagttaaaattctacatagtccacgaatcaatcttattcagatttctgagtctgtttttctttttttgtcccccctttttgatcttatcttccactatgcatagtggcagttaattacaaagctgaccaaaatacatttacggctattatccctaaaatcatgggatttgattacaaatcaagccaaataaataaagtttttacacagctattaatatcctgcctttattgggccgagatgagcgcctaattaaaaatatatggtaagccatatgtcatagggatacctcaccgaggagggagccaagatcacttagatagcgagcagttgctagccattttagcttctcgagactaatattatcttaaccctgagggttatactttttggggttgagaagatcttcctcgcatgcaaaacatcttttagcgggataaacgtctcgctgtttgttatcttgactcgccatactatctctacttagtttgtatatcgaataatatacgctaagtatatttagtgttgtcgctttctctttcacgcaactaggttgaggtcttgtcataagcgtatgcattcacatggtttctcgtcaatacattaattagcaattcgtatgtttctgtctcgcagaaggctattcagccagccgagttataaacctaccctgcaaattatatttccaacgagttgttccatgctaagcgtactt

SEQ ID NO: 43149 - DNA, 4919 bp, Cannabis sativa
  modified_base (4849)..(4857): a, c, t, g, unknown or other
aaatagtaaaaatagttagaaaaaaagataagatgccaccaaatatcttttgtgctttcctttatttatatatattgatattgattgatagtaaataaataactgttcattcaaagccaaactttaggttttgtattttattcttctgctataaatgtacatatagaaaacaaaactctcacatttcttctaataataagtaataagcacagtgtcccatgttgggttaaggtcagctggctgttagattctttttgacaaaaatacaaacagtgttattaaattcacaagtcaaatacagtacaccattctgtgttgtgttatgctgtggttgggttggcacaacacaacacaacacaaccctccatgtgttcagatccaaatagtgacattttgctcaatcatcttcctttaacagccagttgttcacaacagacactataaataataacactaatacacttacacacacacacgtgtccccatagcactataaacgtgttctttgttaataagcacaacagtactaaagtgagatagaaaatgtaattatggtgagaaacagaaaaataactcaataaatatgcggtggaatgaaagaaagaacactcgtccgtgacactgtacagagaaataattcatattttcatttactcttaaagaaagaagaagaaagaattttaacaacgacaaacgtgctaacatctagggcaaatccaagacatatttttgtatttatataataaatattatcgacattttagtgaacatgacatgcaaccttacatatatagatgggccaccacaactaaaaaaaaaaaacagccttggtgggtaagcctactgcagccattgatttatatggaataataatacctctttaaattgtcggctaccagctcatgactcttttacatccactttcttggcagattttcccggtaactttttttttttggttatggggttggtgaaggtaatagcaatatgaagattttaagtgggaaaatgaaagacaagaaaataatatatatgaaagaatgagcttcaacttggtttcttcattaaccctgttcaaacttcaaggccaacaatgttcacttacattgcttttaaatgttctttttcctttttttttttttggttttgctgtcttgtgaagtaaagggaatgcaaccaaactccacccttatatatgtacaaaacaccctttaacaaaagtctaaaaaataaacctacttgtgctacaccatccggatatctaatctaaggaaaacaagaaaagaatacaactttaacaaaagtaaaaggtaactcacttggttgcttcggctgcctcttcttaattcttgccttttctacttcccccctattatcactgttcttttaatcccaccatttggttatttcataaaatcttatctaactctcagttgaaacttctgggttacctggttgtgggcacctctttatgcctcttccaaactagattcccagtttgaagatccaattttctttcagctccacttgctccgcagagaaaagaaccaatataaatatgcacaattgacttctttacctgaaggaataaacgaaaaaacataattcattctatgagttgatagagctacaataaggattaatgattaaaacaaatttgaaaccacaatgttagcattcccttggaacctaggcagtaacatgaaaacatgaagataaagctaatttaaaataaaattgtgattcgagatggaaaagataaggggaattctttgagtgacaaaacaaaaagggctgttgtagaataatggggtaaagcatgtagctcctccacctaacattgcatagacactagaattttcagtaggctacggctatcaatttgcaggcagaataaacagaaaagcacatttcacatttctgcctaatagcaacaatgcttcccaatcaacaaataattcagatatttttaaaaactatatactcaatgaaacatattatactcaaatttacaagaaaattggacaagaaaaagaaatggtatttatatttttcttggcttaaaaaagtttaaccaacaataacataatcccttatcagaaaagggtgcccttagttacttcaaaatgagaccttggtaagattctggcaccatattgcatactaaatttaaattctttcagcaaaaatcatctagttatggccaaacacatgtatctttcttttaaactaagaattctcatttgtaatactacaaagaactctgaaagaatcatcaaatttattgacagattcctgtgcctcttaattaataagatctctcaacttaaactaaaccaatttcaaccatgaattgttaaagatcaaacaatcacagtttctgataaaaacaattcccattttacaactttttcagcttgaaacatacaagcagaaatccaaatcaaaaaagaaaatgcagaaagtgtaaagattttcacttaccagttagccgggaaaaaaattcaatcccggaaaatggctttcttggctatatccatcaagggtttcaagcaatccggcgagaatttacgagcaaacaagtaagattcagagtgattagattctcgaagacgatgaataagctccggcgacacctcagccgccccgtaggtgtaagggtggcccttggtcgtaccggtccaattgactcgagtcaatgtgtattgagtacagccattcggatccgtcattgacaaaagagtcggaaaatagtgttcttctgggtaacattcatcttccttatagcacggcgatcgaaacttcctccacagagtccgatccttgaccacagccagagcgtgccgacgagtcagaacgaagaattgagatccgacacggaattggtcgtagggcacttccggcatcatcgcaaaccttcctctagccgtgtaacgcttccagagatttcgtgactttgagagaatctcaatgaagctcttgtacttggcacgtacgcctagccgagtcaactcagcgtcggtctcagccgacgacgaatcgaacgacctggagaccactagggagtggtaaacgtatctgaacgagtggagaggcacgcagtactgggacaacacagcgaaaaagacattggccggatcatcgatgatggcggtggcaagtaaacggcgcgtggcggatataagtgtggcagaggcgcggtatgtccgcttggcgggaatgaaccgaccctcgaaaactccatggggacgcgttacgttgacggttggatcggcgtggacatagatattgtaaagatgagaatttcctttgaagaattgatcccaaagaggagaaaaatggaggtcggagttggtaaggaaaagaaaagcgatcttgcgctttggattagagcctgtggagaggtgagaaaatctggaagggttattgttattgatgctgttaatggcagaacccgaagcccgattgaagagagcaaggtcatcttgctcgtctgagggagatatcaagacagggctctggggttgttgctgaagcggagaaaggaatctaggggcgaggaggaagaggattggaagagagagcaagagagagaaggagagaacgaatggggtggagaacattgagcccgtagcgacgaatctcgacgcccaggcggcaaatgtgcatgtgggtttcacgactctggtgtgcacgggggtaagcggagggtctggaatggtgaaaaacggaagaagagagacagaaagagagggatagtaactgtctgtgtggaggaagaatggggagaatggttatggatgatttaaggagaatgtttggatcgagggaaaatttatgaaggaaagaaaagttggagtgggaaaattaaataaataataataataataataagtagatgagacttctcagagttacagatttcagatgatgaagacgataatggatttttagggatttgggattttgattcagctttggccctaacctattctttactttcgccgttataattgacgccgttaaataacttttctttttcttttctttatgctaactgtactttcccttttttagatttttttgcccttttcttacttttcaaagggatattatgttagtattaccctattttatatgcaaaattcatgagtaaacagaaaaaaaaaagattattaagaaaaaaaattggcaaaaaaaaaaataacaactattgcgtgtattatgatgaagccaagacgagttggttctatctatttacctaaataaaaactaaatcaaactataatgttgttacttaaaaaactataaggttgttttttaaaaaaaaaaaatctatattgttgaattaaattggatttgtttttctgttacatttggagaatttatcatgtaaacaaaatcctagaaaacggttgatgttgattcagattcttaagaaaaagatagttgatgttccattccatgcattctcaaattaaaactattgataatgttgatcgtgttagtgatattctttagagttatttgctgggaaattattttattttttaattttttatatttaatatttttatttgtttttgtagttatatttttatatatgaaatacatggatagaactgatctaatccaacatttaatggatattggattgattggataactgaaattaattagatcggatcggatggtaaaatctaacatccaatatataattggatcgaatctagataggccttaaatatattagattgtcgtactttgtgccctaaataaaactatttcaatttaatcttttttattcaattatgaataaagaagcaaatttaattttattacttgtttnnnnnnnnntttggttcatgtgatcatttatatttataaattcatctaaatccttatcacactgatattct

SEQ ID NO: 43150 - DNA, 2481 bp, Cannabis sativa
  modified_base (2152)..(2157): a, c, t, g, unknown or other
  modified_base (2436)..(2441): a, c, t, g, unknown or other
aaatggtatttacccaaaattaaacaatctttttttaaacgtttaaacccaaagaatattttttttgttagttaaacgttaacaaataaataaaaaattaacaaatattaatattgttacatgattagcatatcagattaggcttacacgatttttttttaaaccaaaaaaattaaacaatctttttttaaacgtttaaaccaataattaaacctaaaaaattaaacaattttttttttaaattaaaaaaaaaactacacctgtacccaccctaaataacaatcatcaatgtaaaatttaaactctatataaaaagatcgtataacataaaacatttgatcttaaatatcaaaatagataagaaaaaagaattgtactataaaattatcttataatttttattttattctatttgatctattcatatatgtactcagttatacaaatgaaacaaaactgtaaaatgtgtgcacacgacaataaatgtcagcagtagaattttttaatgtaaaagtactactgatactagatacggtttcaaaacataaataatctatgaacttttaaaggaattaatatattactcgctctgagacaattttataatggtactctttgggaccctttgagatatgattgagtttttaatctttggatgtgtggctttcattattagtggaaaaacaaagagaataaggttaggtattttccacacacttcttttcttgatgctgttcaaggtcatagtccttccttttcttggagaagtatcatgtgggtagagaccttcttaagagagagcttctttggaaggttgggaatgggcaagatataattacacttgaagaccgttggttgcccaattttggccttacacgcaatgatttgatagccaatctcccttccccttcactatccttttttgtttctcctttaagtgcttgggatttagataagctaagatgttactttaatagctttattgttgataatatattggatgtccccattgctggtaatacctgtcccgagatgttcttatttggggtaaagagagtacagagatatttagtgtcaaatctgcctatcatcttgctgctagttctagagatatcccaacatcctcctcttttcaggaaagtaaacgtttttggtctaagctctggtcctcatctatcccttctaaagttaagcattgtgtttggcgtatcctactaaactccatccttgttgcatcaaacctataccatcgtcatataataccctcacccttttgtcctctgtgtcacgtagcaccagaaacggtaacacatgctttttttgaatgttctagagttaaagctgcctagaaaaattctttcttttatagtttttatgaagataacaggtctctacacatcagtgatttcatttctaaggcctttggactttttgataagcaaatgttgaatactttcttatgtttcctttggatgttgtggactcagaggaataactatttttatcataaaaaatgtttgcctccaatgtttatatatgatcatacagtcacttacttgcaggagtttgagtttgcaaatcttacagtggataccaagcgaaaaatgaagcaacccataagcaaccaatatttacctgttgcaccatgcagttacaaaattaatattgatgctgctcttgattctaagatgaagaaacatattttgggagtggtagttcgcaatgatcatgatcaggtggtagttggtattatttctccggtgattgggaatgtatcgcctgaaattgcagaagcaaaggctcttcttctggctttagaatgggccaaagctgttaatcttcctgttagtgttattgagtctaattgtaagagtttggttgataaagttaacagttcatattgtaattattcagttattagtgatcttgtctcgcatattagacacttgttatcgtttagtcctgcccttgcaatcgcttttgttccacgagagttcaacaaacttgctcacaattgtgcaagggctggtttagaactagatagcgagtatatttggaatgactttttgccttcctcgctttcctgagggtctgtgttgtcttagatatcttttctcaggttataaagctatttttctcaaaaaaaaaaaannnnnnaaacaaacaaacaaacaaagagaaagaaaagattatttcattattataaaagtgttgatggaatacaatagctagtttatatctttatatagaggaggaatggtatggtacaacactgtaacaaaaataacaaggagtcactactacaatatgggattttagtttctcttttttaaagggaaatttacatgttatactaagttttgctatatttttacaaaaatattgccgggcagtattttttacttttttactgtattttttttataagtttcatannnnnntatactgtgttaagtttcactggtgttctactgttgtttt

SEQ ID NO: 43151 - DNA, 5191 bp, Cannabis sativa
tatttaaaatttcgtgaaaccgtattttaataatttttttttgttatttttatgtttttgtgaaataataggctaaatatatctttgtagtatattttaagtcaaatttaatctaaaataagacatagctgcatcaaaatctcaactttcgtgatagtaaagattgcaaatttcgagttatgttcatttatcgatctaataaaatcccaatagttacatatccactatattaatactttatgagttgtcaatttatgatacatgagttatacgatcagtttttctttcttatttagaaacaaataattttacaaatacttttattttagattttagatgtaattgacactttttagctaaaagttttgaatcacaaacagtaatactaatatatccatataattatgcttttttaaaaaaatattcttataattataattaataaattaaacctaaaataagattacatattattcaagtccaccgtccagttccacagaaaacgaaaaacctgccaaaagattcaatactgtgatacaagacaagaataatcatttaaactacatattttgactacttgtcatttgcagccaatttttggccctgtataaatccaaacgcatatcatgttctatttttttgggtagcattttggctaaattggctgaacataagtaaatgatgggacaatttattaatcttgttcaatattaatggattaaaaatcgaaagtttagttgaagcttttaagtaattaattaatttgtcaaaacccttaattaagaggagaatctttgttgttacttgtactcaggacaaacaagccacacgcaaatttgtatgcattaaattaataaatttcacatcttttttaaggagcagattttatgtgacccatcacacataaactattgggtttttcatttagtatacattaaagaagaaaaaaaacaacaaaaaatctatacacaaaaagactgttggttatgcataatatatatatatatttttttatttgagaggtacgtacgagtaaaaaggaatgattttcttgatttctttagtttaaaaataggacaaaataaataggtagtgggcattcacactataaagttacacgccagcatctgacgttgtcagtgggtgggtccaaattgctataacagtggtctgagccctgaaatagtactacttgatgtaaaatgtccaaaataccctaattcgtgttataatggattttcttttaaggaaggaaggtgggctttgcgtgtgcctaaacgtagctgttcatattggtcatttttcaggctattagaaagaaagaaagaaagttccaattcattttttcctttgcactatggttgtttggtacagcggaggaattttttttttacaaagtgagagaaaagttaaaaaagaaagataattaataaatgtattaggtacgacagaaaaattaataaatagaaatgaagataaatagaaaaagtaattaggtataatttattaaaagttgaaagaaaatagaggcaacagaaacatcttaataaattattaaaagtaattttcatataaatatctattttatttttcatcaaaataaaaaaaaaaaatcacatccctttaaatttgttaattaaattcagaattatctattaaaatgtataaagatataaaaaaacactatcatatccactaaaacacttatatgatatacacaaaataaaatatagatcttgacaattttttttccaaaaaaagaaaaaaaagaaaaatgcatagcgtcagaattaaaatcaataatataatcacaagttcacaacatgtaaccatattttcttctagctttattccttataaaccatacttttcttctaccaatattttaaaggtaagtctacattaatattttgctataattttttagtctttttatgatcggtacgttgtaattatttaagattatttgtaaattttaaattttttttgaataacttacaattttaagattagaaattaaatttttattataactatacacgtagtaaataatgatttgaactttatttttagtattataaattatttattttttaaaaaatttacaagtgattctaaataaatacaacatataagatcataaaaaaacaatattataataattatattaaaaaattaatgtgaatgttaaaacaaataagaaaatttatgaaaacacccattttcaggggtgtactacaaattttctatattctttttagttttggtttggtaaataggatttatatattaaagttatataaggatatttataaaaattatatcctcaaaacattacttaatgataaaaatgttgagaggagaaaattaataggtaacaacagaattatgcattatttttatttccattctccctgccaaaattagtgtttaccagttttggtaagcgacaattataacctgcatccgagactatatttctcatcattttaaatcgttggatggaaaatcacggaatgatcaacggttgttattgtcgatatataccgttacacatggtggggttgtctactacgtgatacaaatctcaagtatggcaaaaacttaagcacgtgctggatatgtacgcacgttatatctaccttttttaagcgatttaccgacatttggcgccaaatttgtacgatcgagccaagagggcaaaacctttcgaagaccaccagtgttgaaacgccatttacagaaaaaatatcacgaggggattctgactttaggggtattgtagtaatttcgtgggggaaaatacgtcatgacaaatgaggacaataatttacagcaaaatcacgaaagagccactgaagcttaagacaaactatacaaattgtccagttttgtcttttctcctccttatctgttaagtggtatttttgtaattcagagaaaatttgtcgcaatgaaagctggaggagagataagagaggtaaataaaaaaaaaacacaaaatcacttttcttcctataattcaacgaatttaaaatcccaaaacactggccacttcaaatgcaaaaatacgagggcgtagttgtcaaattacaggatcccttgtttatcttttattaaaaatgctcattgctcacaaataagtaatccccgtatacaataatttaaaacattttttgctaaacgacaagcaccgcctagtccgactacctccgacaattgtcgtaaacccgcttctgctgacacgtggacggatagattttaataaatagccaggagattaaacttgggctcaggtacacctctgctctggttcctaaccatggttaaataaaaacaacacaccatgttaaacccaacccagcgccgctttaactatttttaagcatttctactcctctctttttatattattattatattatgatagaatagaatagaattcatttattttaactttgttcaaatcttcctttctctctctactctttcgctcttcttcttcttctgccagctatgaagccgccgccttagtcgacactgttattctccggccacaaccacgaccattgttgagaacgataaattcctagttcaatcttctcaactgttttcgttatatatagcttaagaactataaaaatttcgtaccactgtactagactgtgagttggacttcgtctatactatacaagaacaaagcttatgattatcggtccataagctttgaatcgaaagactaagttatctttcttgagctagaagattgaaagaaaaaactccaagcaaactcaatgggagagttagggaattccacacgaatggaggtttccacagtttctgctggagaagctagtatgtcttcccctggtttccaaacgtcgcctgttcctcttgaagtagttattccgaagaagaagcgcaacctccctggaatgcctggtaaggctattgtaagaacaaaaagtaacgcttacagaataataataatcataatttttttttttgtcaaataaataaaataacaataatttttttctcttaatttaatttatttatatattcaattaatttggggtaatttagatccggatgcggaagtgattgctttatcgccgaatactctaatggctacgaatcgtttcgtttgtgagatctgcaacaaaggatttcagcgtgatcagaatcttcaacttcaccgccgaggccacaacttgccatggaaactacggcaacgaacgacgaaagagatacgaaaacgagtttacgtgtgtccagaggcttcgtgcgttcaccacaatcctgccagagctctcggtgatctcactggaataaagaagcacttttgtagaaaacatggtgagaagaagtggaagtgtgagcggtgctcgaagaaatatgccgtacaatctgattggaaagcgcacatgaaaacgtgtggtaccagggagtataaatgcgattgcggaactttattttcaaggtctttcttttttcgttcgttttccatatacgggtttttttttttctgagaaaggtttccgtttctgttaccattttccgagaaacctgtttgtttctttgttttgtagtttttaaataaaaaaataattttcttaggtggctactaaatatgtttgactaatctggcagaagggatagcttcataacgcatagggctttctgcgatgcgttagcggaggaaagcgctaggtctcaagccctagaaattagctcagaggctgggaattccaatgtaaagacagcggtggcttcaccgcctccgccgcctctgaccccgtcggtctctgtggtttctccagctttgtcgattcagagttcaggtaatagggtctataattaatgctctattatttcatgttgctatttaaattctacatttcctttattacgtaggtcagactagctaaggtgattttgaaaatttagttgctgcttgggttgttgtgatgcaatatgacaattgtaacacttttttttataatattatttgtatttgactctggttgtcttctgatacaagaattctttaatattttatatgctagtttggtgtttatggctgtttgtaattatattaaagtgtcttctgaattatgtcgttacatgctcttactattatgaggaataagcagtgatagtagttcatcatatttaggtgtttgacagt

SEQ ID NO: 43152 - DNA, 2556 bp, Cannabis sativa
cccaagctatgtaaagtgaacgatcaaccattttatttaccctctcgcgagcatcaatttcaagggtttccttcacttcctataattcctctttgtcttgctcagagttatcaagaaggttcttatttaaagtcttgacctcaacctttaagtctttcttggagtttcttaatgtctctccttttttaaggcaagatacctctttgtcagcatcattcctttgagtggccaataactcgtgatgttcgttggccttactcaactctaaggaaaaataagacaagctttggtgatgggcttggagacccaagattgtcaaaagagaggcttacataaaatactaaggttaaaaaaggagataaaaaggaataaagtaaaaggttagaatactaaccgagtgcaaaagctttgcacttctcattagaaggtcagtaggtgtgctagctataattaggttctaattgtctagctaataagtcttaaattggcgacacacctgggctatatgctaagagcaaaccgcttggatccttcgatacaggcgtccagaggcaagggacctgtgggatccattaagaccactgcggggttagtggcagaaaaagtgacttgatgaacagatcttagggtatattttctttttccatcacctcaagggccgagaaggaaacctcaagaattgagctattatttttctccaaaataatgtttgaagcatgaggagaacttttcttgtgattatatttttttctttcacggagatttcagtttcttctcaataatgtcaaccatagaaacacctcgctttttaccccgtttaatagggacagcatgactgctaaggaggttttccaagtcgaagtccatttatgcaaaataagagaaaaatattggtaaaagagaagaaagatatataatatgttgggaagaatacataaacactctatgcaagacggtgaaaatcaaacctaaactaaagttagaaatgttagaggttgctcgaggaggagaaggatctgtacgaggaaatgtgataaaaggaaggtctctaggtcccctagactcggtgatatcataaaagaaaatgaatttaagagagataacaacccaatcattagttcaccagtcatttaacccatattgataagcgatcttataaaatgagctatcacacgaggtttggacatggaactcaggataccaactatccaaactgtgggctattaggtcaacgcagttcaaaatataaaagttatattgattatctctaaactttactaatcttgttggctcaaaactaaggacggtaggagaccatccgtaaaaacaagaaagtttacctcatggagccccttcttcaatctcagcagcttctcgagtggctaagttgttttcataatggatttgagcgatatagtctcaatcctcttcttcctcaggtactcgaatttgttgtcaggttgatactagtttaggttgttttcataatggatttgagcgacatagtcacaatcctcttcttaacatattatggtcgagctatttttttttagtaaatcagtaagattcattactccaaatactagcatcttcaatttgaagacctatattctccaactagtctacttttaataaatttataatgttgaaaaccattttgtatctattgtattgatatttttaggccaaacacatgtgattcttctcttcacttcttctttggttaatcgaaccatttggacctctttttgctcagctgaattccataggatgtcatttcaagttgaactggttcaagacaatactttcttcctcagcaaaaacactgatggaaaaatgcatgttgagtatagactactcatagatcatgtcggtccagattacaaaccttccaaagtaattaccagactcctcataagttactttgatccaaattataaaccatctaagatgattaccagaagtaggctttatataagtcttgtctctcctcgtcaatgatatctacaacagaaatattcctgaatgacttaacaagttaagcacctttagtttaactcctaaatcttctgaggcgttcattataagctactttagttgtttcacgaaaccaaatcagcatttgccattttgggcttaggcaaaacatacaatttcttcttctcgtcaattgagtgtatcatgcgagataattttccctaattgtgccttcatcactctattatttaggatgagaaaatattcctcttttatttgaggcgattttgagtattttaatcaatcgatggctactttaaccgtagcgatatttgcttaactagtattctccgggatgtatatattaaatctagattcttcaatgatcgagcctaattgttacctcattaattgtgaaatttaatacacatgtcacaaaactaaacttgtatatttattgctcaaagtatggatataatatatccaatcacgtctaagataaatcaaaaataataattaataaatgttgaaaagttaaattaggacctactttactagtgagcaacccttagactactt

SEQ ID NO: 43153 - DNA, 4642 bp, Cannabis sativa
tttttgttttttttttctttttcatttttcaggaacacatttttggttagattatactaatttgtttaatacaacggtgaataaaactcctatccactaactacaaactcatacacccaattactcgagctaaccatgataatgatgatactctgctagtacaataaaaacatttaactctgtttcaaaaaaaaaaaaaattaacttttttacatatatgcaatccaaaaataaatcaattagaaagaaaaaaaaaaaaacaaaatcaaaattgtagtagtatctaataaagtaataataaagaacaatttacaataaaaatagtacagaactaaaataagggaacaacaaaaattagaaatggcatgacaaacacaccaatatataagaagagttatttactctgaaggttccttcttgtggaaactccttttccttataagaagatctccaaatcttctcaacaaggctttcttctttcttgaggttctatcattctctaaatcatcaaaatgggttccatcaagattatcaaaatcatccaactgaataactgcttcatcttcattactgaatacagaagaagacttctttctatgatgattaacatcagtttcagcctcaacaggagagtccaccacatcaaatattgaaccccttaatgcctcatcaatttcattttcacttacatcttcatcatcatttttgttcaagagtttcagctccttgagatgaaagctccatgttttgccaatcttagtcttccccacttttgaatttgttttttccttctctcctcctttcttattacactcctggtcactggcttcatagagcaaccttttcaactcattgatgttctcaatagctgcagcctcattaagcctgtagttgtcattttcacgtgaaatgaaaatgagggattcttctttctcagccaatctgtccttgagctctgaattctctgctttagcaatcaacatggcttcttttgccacatttgattcactcaatgcttgtttgagtatatcacggagtttactattctcttctttggataatcttgtcttgttttcggcttcgataagcaaatcagccaatctggcaatctcttgttcagcattagatctttcctcatcagcttttcttatacaatcaacaaggccagtttctttgtcattccaagccaaaagggtctcctcagcttctagtctcaacctctcagctgtgttcttgtacttttcggcttctttaaatgcttcttccaaatgtcttttatacatttcttcactactcttcagaaccaaattcaaacggtcttcctctccttttgagtgttctagttcagccttggctaatccaagctcttccttcaccctactagcttctgttgccacttctttaagtgctaaagctaagtcatctaatgcctttttgctgttttcttcagccacagttgccaacttcagttcatttttaagagattccaattcattaatcaagctgttggcctttaaacaagcctgtttgcctacctcttctgcatcagcaagattatcttttgccatattaagctcatatttcaaactctccattgccttccccacatgaccattttgttgtataccagtctgccctgtagaactctccaatgtctttactttttggtgaagagaagcaatctcaacctttgattcttcaagcaacatttgagtttcctcaagtttcttcatctggcttatcaaggaatcaaacattttggttcctgattccttacctttctcaacttccacctccatttcaacaacccttttcgcactttcacttgacaaggccagtgttttagcctcagaagatttcacataagccaactcttcttccaatttcagttccaacccttttgccttttcaagttcaagtttaagagacttgatcattttgtcttttttattcatttcttcattagtattggctaatgaagctttgactgaattcaactccctatgcatctcctcaatcttctgtttggataattcttcacggcgctttgcattggtgtcctcttcaatcatctttctcatggctctcagctcggccagtgctcggtctttttcatgctcggttgcatataatttctcctccatcttcttttgctccacatcaaattgccccatttgctgctgcatctaaagtacaaacaatctaatatgttgttttaactatagccaataatcaaattcaatcccatgaaaaaaaaaatctccataaaaccaataagatcataatgatcaattataataaacaatcacaaagataaaaggccaatacctcgagtactaatttggtagctttctaaaacttcctttagattgtggatagtttttgcttgtttgtacaaagatggcctaatgaatataagaaacaaagaattattatgtggattattattttaatggaatcaatgagaaaacagaaccaatcagctggaaacaaaagtcaatgcaaaccaaaaaccaaaaatattaatcaggcaaagaaattagcattgaaaaagtctgagaaaagaaagagaaagagaaaggaaagtacctgagtggtgtttcgatataattaaggtccaaaaaggttggataggattaggaaagcataaattcgatgaggaatagagagttaaacatagatagatagattggtgtggtgtggtgttttttttttttttttgttttgggggggggaggtaagaccgaagttggcgggttttccactaatggaacctgcggccaaatctatgcatgcctatttcatttgtgatttgatggattatattatttggccgacgtgggatttaacttaaggaatctttaatcaaaattctttgtcaattaaacacattaaattcactaaccaatcataatcggaaggaaggaaggaatgttttgttactatttgccgtctgttatgactgcttccatttccaccaccccactgtggctaattatggataatatttatatttaattaattttcaaccctcttttggtcaattaattattcaaagcattttataggcaatttagcgttcttcttctgaccattaatttgccttgcttttcctatttgatattggatttggtttgacctcatattcggagaccttccaaaataaacacgtccctcagtttaaaattataattagaagattgtcttttattttttatttttttttaagggaaatgacagacagcatgggtaacatctttccattctaagtaaaattttgaaattgaaagaaaatcttactcttttacttttcttctttaaagtaaattgtcttagagcatgtttacgaaattagaacccggaaaaaatatttaacaaaaagagtaaccattttttatttatattatattgtttacaaaattgataaagaaaattgttagtaaaaaaatgtgcagttggtcaagagttgcaaaaagtaagaactaaaaaaatcaaaaataaattttaatagatgcctctatcaaataagttaaaatagcttaaaattaacatcataaatagtgttttctatgaggtgaagcattttgcttcttcaaataatttgtcccatttttatttcctttttattacttttaacttttttgagttttttttatttttatactttaattaattttttaatattttatgaacttaaattgtaaatttaaaaataaaaatagttaaaaaataatataataagtaattcacgtaactttttatatatttaataaaatatggggaattttttatttttacactttaatatatttttatatttttatggaattcctcataaaaattctcgtagcaattaacggaacaacaccaaaatctacttaataacccacaaagaaattaccggaacaacttaaacgatacattagaaaaaaaaaataaaaaaaaaatgtatatgtgataattttcttaaaatataatacttaaatagtataaaaaaaataattaatataaaaatttgaagtaaaatatcatattttttttattttactgagatatttttaagaatatagtagagaagctaatttgaatagctaatccaaataaaattattttgaaatacttgaacatatttctgtaaaataaagatacgagactttatcaatgaaatacatttgtagaaaaatattcatctttccaaacatattttgataattcaaaatatttttttatataaaaagaaaaattaaaaaaaaaaaaaaacaacttatcttttaactcgttaaagagaattggacattaaagttaaaataaaaaagaaatggaacataaaatttctcatttacgtttagaattataatatattccttttcaaaaaaaaaaattataatttattttatatataattggaaaagtatttaaaacgaataaaagtgtactatataattattataaaaaaatgaatatgactaatatgaaagagcggcttcgaactttttttaactgtagctgtagaaatagcagcagcttcaatcattcaaatttcaatgtgctctaatttattatctctctagaaaaagtgaaacttcaatttaattaatattaataacaattataaataatattttattttcggaataaatta

SEQ ID NO: 43154 - DNA, 3511 bp, Cannabis sativa
gtatttttgtaaatatttgtatgtggactgtataaatatttaatgggccggcccataatatttttgtaatttttttttcttttttgtattttcctgttttttttcccttaattgaatgaggacactcattttcaaaaaaaaaaataaataaataataccctacgaccccacgacccccacctggtcgaccaaacaaaatcaaaattttataaaacaggaaaggaaagtactacttattcagctattttctgtttcgtagaatgagtctgtattctgaacaagctttcacaaaacaacaatttaaatttaaagggtgtgatactatacggttgattgggaaaggaaccccttcttctataaaaatacgactgttatatattttgcttagtttacacgctgctacgataggacttgatcgtaaatttcattaaagtaaaaggttagtttggtaatcacacctcacacttcactgtcagagcagtgtccaccatctccactttccactttccgcaccgtaaaattacacaaacgcgacttcttaactaagccgccacctttttcccggaaaacgagagaaaatcttgttaagaaagaaggaaagttagatcaaagagagagagagagaagaagaagaagaaggaggaggaggtttcggttggttatggcgaaccctgaagctgagcgacgccgactcagggcggcaccgccagcgagggcaagggttccgttgcggaagttgcttcgggtggcatcggtggcctgtggaattcaattcggctgggctttgcagctttctcttctgactccttacgtacaagaattgggaattccccacgcctgggctagcgtcatatggctttgtggaccgttatcgggattgctggtgcagccattagtgggtcacatgagcgatcgtagttcaagccgtttcggtcgtcggaggcccttcatattggccggagcggtatcgatcatcgttgctgttctgataatcggtcattccgctgatatcgggtggttgttaggcgatcgtggcgaagttaggcccagagctgtggtgactttcgtgtttgggttttggattcttgacgttgctaataacatgactcagggtccttgtagagctttgctcgctgatcttactggtaaggatcatcgaaggactcgagtagctaatgcatatttctctctgttcatggctgttggtaacattcttggtttcgctactggttcgtatagcggttggttcaagatttttccttttacacttacctctgcttgcactgtaaattgtgcaaatctcaaatcagctttctttctcgacattgtgtgcattacaattactacaattctcagtataactgcagttcaggaaataccacttggtacttcaggtgacacaaccgtgctccttgcagaagaaaggcctaccgtatcatcaaatcctactgaggaagcttttctttgggagctttttggtacgtttagatatttctctgggcctgtatggataatccttactgttacagctcttacctggattggttggtttccatttctgctattcgatactgattggatgggtagagagatttatgggggtgagccaaacaaggggcagaactacagtactggggttagaatgggtgcccttggtctaatgttgaactcagttgtattgggaataacatcagtgcttttggagaaactttgtaggaaatggggttctggtttcatttggggaatttcaaacattgttatggctctttgtttcatagcaattcttgttgttacttatgttgccaaagagattgggtttatggatcgtcatgatttacctcccattgggattgtaatagctgcagtgacgatttttacagttcttggattcccattagctatcacatatagtgttccatatgccttggtgtcagcacgtattgaagctttgggacttggccaagggttgtcaatgggagtcttgaatctggcaatagtgatcccacaagttgtggtgtccattgggagtggaccatgggatcagctatttggaggtggaaactctccagcctttgctgtagccgcacttgcagcatttgctagtggggtagtggccatcttggctattcctcgatctggtgctcagaagcctatgacatgagaatttcttccaagaacatcacttccaccagcttgaaaacattgctttttgagccattgccttaggaaggcaatcgagggcggagtgcctcatccatagattccaaaattactccaccactgcttcccctgtaccaaccaagataagttgctgagttagaaattattctgtcattgaaatattatctttccttttaaggcaaattagattgtgcctaggtgttttcatcatgtatgggaatctcatgcatttgtgcatgaatttattttgtgaatgtagtgaaatgtgcttggtggtcagcggtactgaatgtgtggattgtaatgaatgaaaccttgacagagacatgtcctttgtgctttgatattttctttgtataactttttgtatttattatgaatggttttcttagaataaaagaaataaataaatacaatggctccaaaaccgtactagacatgaccctatttctatttgtttgagctttgacagagttatcaatgttggaaaattatactccattaaactgatagctctattattttgaggtttgacaaagttatcaatgttaaaaatcatacgtggagtggactagtatagtcatttgtaactaagtttaatgtcaattgggtatcacacattatggggctgcacaaaagacctggaaaaccctcccgctcgacaactcagcctggcttgaataaaataattaaatttttgcaaaatgctgaaaatttgggttaagaatctgatggccccaaacatagttcagataggattccagtggcaatctgacatatttgaatttcgagtttgaatctgtgaaatctggaacttataattttttcttaatataaataaattctaacatttcttcttctttttttttttttttaaaaaaaaattataatatatgtaggaaaaatgtcaaatctttgataaactttatgcaaaaactgttcagtaaagaacaaattttaaaaattggtatttctagaatttgttgaccacaaggcctaaatttgaagataatcttttttcaaaatgaaaatgaaagaaatagagctcttttattacaaatttaacaggcctgctatgaaaaaaaaaaaaaaaaaactatagtctccacattgattcttttgtttttttcgcaatttgagttgaaccgtatgcatcaaaagtatgcatcaaaagatgcatgtacggttctaaagggatacatatctatgaataggagatattgtgcgagaatttaccggacctaaattatcaagggcaaatttgattttatatacttaaaaaattaaaaaaatttattattaaaccaaaaacctaaaccctaaaaaaact

SEQ ID NO: 43155 - DNA, 1994 bp, Cannabis sativa
  modified_base (1157)..(1160): a, c, t, g, unknown or other
caacaacaacaactaccggcttccgcttcgcttagccgctacgagtcgcagaagcggcgtgactggaacacgttcgggcagtacctgaagaaccaccgtcctccgctcacgctctcacggtgcagtggagcacacgtgcttgagttccttcgctacctcgaccagtttgggaagaccaaggttcacgccgacacgtgtcctttctacggccagccacacccgccggctccttgctcctgcccactcaagcaagcctggggcagcctcgacgcgctcattggaaggctccgggcagccttcgaggagaacggtgggcagcccgaaacaaacccattcggtgcacgcgctgtaagactgtacttgcgtgaggtgagggactctcaagccaaagctagaggaatagcttatgagaaaaaaaagagaaagaagccagtgcaacaactacaacaacaacaacaacaccaaggtatgatcagtacgacaccgtttcatcagtcaatgccctcagcgttcaccaacacgtatcatcctaatcttgttgttgaccaatctcaggccaataatggcatggttggatcgggtagttcttcttcaaatggtagaacctctttgagctcaatgatacctctctcagtgttaaactagcttattatatatataattataacaagtataatacacatatgcttgttattagctcgctttagctttcatatgatctatatctatctatataatcatatatgcactttttttttgttgttatttttggagttatattagtagtgtttaattaaatgggtagctatatagtaagatctttagatagatagagatgtataattttgggcagtgttttttttttttttaccatttgggtctagatgggatgatgtgatttgaacactgtctgccttaagcaatattattttaagcaatatttgggtatctttcacctcagtgttattttgtgtttcttgatccgcttacctagaaatgacaagttcgttaggcttaaataatggttaatatatatttcccaattaaggttgtagggttgtataagatgatgctttcaatctctctttataattagcttaatttcatatgcatatatattggcttaatggttaattagattattattattattattnnnnttattattattattattgacagaattagtacggggtacttattagtttttggctatacttgacctgtatactattgtgttcaatttaagttgttttctaaatttcaaatcaattaatttcctcatttggatacatgaatgtttgggataatgaaaaggaatatgtcctttctaagttctaattaccaggaggtggtgttgtatagcatgggtcatatctcattattattttatatattatggtaataatttattaaatttaataggaatgttgaaagttttaggtcttttacattttatttcctcggatcttaaccaatagtacactatttaactaatagatataattaacataaattttaaattcactcatatttattacaaaatagttttaattatctgtttattttctaataacatcaattcttaaacatactttctattttgtatatttttggaatttctatatctatacatatatgtattagtaacacttagggtataatccactaaacaatttaactataaatattaatttttaaaatattaaactattggattttaatccaataacaaaaaataaaagaaaatttttaatttttatgtttaatttagctacttaattaaaaaaaatcaaaaaatatcacttttgacattatatcaacattatgtttatatacaaaatacttagtcaaactcaatttttttttttgtcaaaaaactttttttcttaattttttttttcagccgatggaacaatgtccaactcatacaatgtaaaaatgagagatttttttaataagataaaaaaaactaagcataaaaactcaaattt

SEQ ID NO: 43156 - DNA, 2316 bp, Cannabis sativa
acttttaaaatacagtaatattaatattttaaaatttaatttgagcatttaaaatcaagtatatatatatatataaaagtgtattaatcgttctatgtttttttatatcctttgattttatagagtcaatattgtaaatttcaaagtttctttatctccatatgatatctagatcaagaaatgatcgcttattcaaatacattttaagtaatattttatgtaagtttacctttatttttctccttttttaagatttattattaagatgttatatattatttaagtgatgtaaaatagaaatgctgactgatttttcggtcaactaaaaaaatatagaagaaataaatgagagtgaagttgaaaagatattaattaacacagaaattaatgagatattatttagtgcatgcatgagttacttgtattaagatttcaaacttttacagtaataaagttctttagtgattattttgacaacgtttttgcttaattaagaaccaaataaatctgaatccattaattacaagtaagtgattggggtagctctctctggtcgtatatatatatttataaaaatgttacaccgttaagatcagactactatatatttcttaagcatctaaaaaaattacgtgatatatacaatttataagagatcgaaatttgttttggcaaatgtaggaaagggacaacctagctagctacaatagtagacctatttatatatatatatatgttggcatgtctggagactctcggagatcgatggagtctagtacagtggaatcatggagtcttcacttcgatcgatcgggaacaaaatggtggaatgaaaactagctagcatgttctagagatcgatggatgtcatgtacatgttttccaaaggtgatatatatcgatcctccagagaaagtagactagtatatatatatatatcactcttattttagagatatatacttatgggcttatactttattataatcacaaacaacaaaaaacaaaatcaaatattttcaaaaataaagtaatagattttattaaaaatcctctaattacctaatacatctacaaaatatatatgtcaccacatcacaaatcttctacagattaatttataaataaatacaaaccataacattttatatatatatatatatatttatacataaacacttaaactaacacaaaaatttcaatgacaaaaaaatgcaatgtataataaccaaaaatcttcaacataatcaacaaaacctataagtaggaatcaaaataccaaactatatgtgtatatatatattaaatatatatatatatatataccataaaatattccaaaaacaagtgtatcataatattcataacgtccttcacaaacaagtatatatattattaatattaatgatcaataatttgttttatatatattattattagccaccacaaaagtcagtttacaaacaactaatttagcatacattaatgattaatcatttccttttccagccatgttgtcttgatgattattttaaacaaatataattaataaatgcaatcaaagagaactttacttataagccactacaaaaattcaatgaagatcaaatagggtaatcgaacaacctatgaaatgatcacatatcaaaaaactttccaaggttaatttgaatttagaaggaaaagtcatatgtgttaaaaaaaatactcttaatgataaattatttagttaaaatatatattttttatacaaaaaattgtttttgactaaaagatagtatatactaatttaaaacatatttaattagtgacaaaaacgtgactagctaattaatatttttagccacaaattttattgtgttaatatataaataatattaataatgcaatttcattcactatatttttttttttacatattttatgcttttaatatatgtgggtagttgtagttgcctccatacttcaaaagaattaggaatggaaaaataaaaccaaaatgaatatttgttgtccaaactttaagtcttactatgaaatgaatgtcatgtaataattaataaatctcatcactatgtgtagtactattttaagatgagttttatgaaatggcatccttatttttgacaccaaggtgagttcatgataagttgcaaatatatgaattatttttttgacctttttttttcaccctataaaatgctacactacaacaaaaaagaaaatttagtcttcaaatactaacaatcctttcaatcaaaacagtaaaaaaatctcattttttttatagtcgtaccgctttgtaaaatgtggccc

SEQ ID NO: 43157 - DNA, 1841 bp, Cannabis sativa
gactatctgccaaactagtgtggcatgaagtcttggaactgttgtaacttgcaatccaccatttgatatagtgcagaccaagcttgtcatctttgaggagagctcgaaaagaggaagtattccattgcattgggaggaatctctataaatcttgtgtttgcttctctcttcccttatttctttataatttttttgatttctggtttgaagttcatgattatgttttgttgtgttaaaactctaatttgggttgtatgctaaccgaagttggttttagcatcattgacaccaagtaaaggaaggtaaaactggtagcattgtaccaggaaggttgtttacaacctgtttggctaattgtttccttgagttggtgcacgtaggagaaattaggttcgaatttcctacaaattacaaaccaaaacctgaaacatttataggttgaaggagtggaatgcagatgcacacacgaacgcacgtgtaggcatgtatgtgctggacttttgtgcttcttttgcattgcattatcaaaaaaaggtggtacattggaatatacaacaaagaagttaagagcaccaatcttcaaaagtccttccaaatcccaatgtctatgggtcccctgcacttgtaattcacttttggaacagctcaatttccacccaactcagcatggaaattggaaaaggagtgttctccctcatattatataacgcttatagttatcgccatcatttgaaaccaaattaaaaaaaaaatgaggagtgtttagcattatattttttttttaaaaaaaaaaacaaaaaattgttctcggagaacaagatcttctagttttctaaaacaacaaaccgaaatttgtaataacaacactaatacttttaatatttttttttttattttcacaaatattactttttgctttttcattaatttctactataacttttcatcagtcattatttactcttgacttttttcatattttttataattttgttttctcttatttattacttattttcaatattattttatttttaaaaatatatttattcattcttttctatttattaaatatcactttttattttcttgacaccataaatattatttttttattctcattttttaaaatttaattttaaaaataaagagaaatatcaaataaatgcaaagattgtacgaaattgtatgagaacttggtctatccatcaacttctcgaatatactaagtggtatcagagcctcgagccccgataacgttctcctggtttttcctattgaaaaatcccaatctcatacatcttgacaacaccttctgatattatcacatcttctaacgtttgaatgaaatgaaaattctgtaactgatttcagtgatgatcacactaacgctagctagcatatcattggcatcgtacaaaaccgttgtgcctttccctaaaattcagggatattttgtacaattgtatattccttttgtcccctattttactccatataaatagatgtatcatgctcaacctttgcatctgttaagcaattattatcagtaaaaaagaacattcaatattagttttattctctacatttttcctgttttaacttggtatcaaatcgggaaaacgattaccattaatggcaacccttgaagactccaatacaagcagctctgccacaatagcacctgacagttataaatcgtcatttaaagtttcttatttttttgaaacccacatagccaacagttttagaaactgatagaatacagtataaaacacagttataaatctatggaaaaagccaattttatattcgtgaaaatttaatttaagtttgacatt

SEQ ID NO: 43158 - DNA, 3342 bp, Cannabis sativa
  modified_base (1728)..(1742): a, c, t, g, unknown or other
gtaaatctagatcttggtaaacaaaccccaacactttataccactctttatccctacccttgatagtgtttcaaggtggcaatttgggaaacacgggcctataataagttctaataaactaaattatttattgagtctcatcaaccaaataatccttgtttattaattctatgattactccactaaaaatatggaactaaattcttagtaactatagaattatagttattgagtttaactacaatgttgattgatataatcaattccagtgattagccttccatgttttggttcataattagctttggtcaaattactgttttactcttctaattacttctttatcctttattaccattgattcactaattgaagtataatttagatcccatttaaattttgtgcacaacattctagttctagaattaacacttaaatggaaccagcattcgatctgttaggaaagtcaagacttcataattgtaaatcatgttcctagccatccactattgggaaattcaacgagtgaatcaaaaaaactaataacatgaacaagagttcatgattactcaaaatttaggtcgatctactattgatcattgttatgatatgtattaagtctttatgattaacgacgtgttaataaagacattgtgttaagcatttggtgaagaattttatcaaagtattcaaagataaaacattaaaggaccttttgtggaagactgcaagagaggttactattccaatgtttgaggctgtgatggaaaaagtaaagaagatcgatcaggatgcctatgactagttaatggaagcaaggcctcaacattggagtaagcataacattcttttgaataacttgtgtgaaacatttcatggtgatcagcaatattatcaccaagagactgaccaatattgtcagtgttagaaaggattagaatttatctactccaaaggcaacaaatgaataggcattcgatgtacatgtgagaaccgaacattgctccaaagatagaagaaattcttaagaagaacaaggacataagtagtggccatatcccactgaagtctttagactttgtttaccaaattcaaaccatgtatggaagcttgtattatgtagacttgaagaagatgaaatgctcttgtaaaaagtgagatttcattggaattccatgcaatcatgtagtagctgacatatggaaaaagcatggagaaccatagagttatgtaagtaaatggtatgcaaaggagtatttttattaaggcttatagacattaaatattcccaattaggaatcaaggtcagtggcctaagagtggtaaggttagaatggtgaagcttatgtccaaagtttaaccatgtagattaaaaaaaataaaaaacttgagcttgatgaactagtgcccccaaagagaactaaaatgaagcaaggatgcatatactgtatcataattaaatttcaagatgtggtgcaaagaatcacaatttagaaagtgtgccagaaatatgaaaaagaattcagtaagttttatcatttttaatgagatcgtttatgatttatagctggtttgtagctttagttttttaaagttttgcaggacgttaaccatatgattgtacgcaacaaatcaaaaacatatgtcgttgtactttttctaattttaaaactaatttgacatgtttatttcatgatttctttttgttcttattattattattattannnnnnnnnnnnnnnttattattattattattcattttctagtttttttatttcactaccttgtttatgatagaataagcaaaaagtagaaaatgaataaattatgacatcacaagttgggtagccaactaaagaacttacacacaaagctaatcaattatccaaacatcacccatgagagggtaataggattgcaccatggcctctgccaaattgataaggaaataagattaaggatgattgtaattttgaagccatattttttaagtcatttggaattttttttatttatttattattattattttacgatacatcaatttacatgtattatctttttagagacttatgaccatatgaacttactttatcatagacatcaaatttggtaaatgatcctagatattttgtggaatattgtaataattttgcaacagcttgttggtgtgtaatttttaaaagttctatttcaatatatcaaactaaactcaagaaaattatttaatttaccagtctttgtcttctattagctacttgagagttaacaaaaataatttaaatcatgtatttcaacttcttactatgtatttcagcttccaaaattttgtatacaataaaatgtcatcacttgttatatcaattcataattgaatatgaattgacacttgtcataatgcttctagtgcccacaatttctagtactatgcttaatgatcactcactcttaatgagactttgataatggcaagctttaccctgtaactgttagacttgttgttgcatcttcttatgatatttgtttcctgctttgctgctttgttctctttgtttcttttgttcaaacttatttgttatttggagtttatgactcaaaatgttgaaatacataattaactcaacaactcatatttatcattcaaagggaatcaaattacatccaaaaataaaaatttgattaatcacctgattttcagattgagaaccatttctaaggttggttattatctatcttacataatcaaacaaaaacaaaactttgaaaactccgtcttctatgacagaaggattcctagtaagggttggagatcaaatctggtcggatctcgtcggagaaactgctgctgctatggccgccgcctcaattgtgttccggcgatccaaccccgcctactctagcgagctcctccgccacactcaccaagtcattctattttcagattttcacatttttattgcatacctcttaaatcatatataattaaatatcagtctcacatggtatggttggtatgttttgactaattgtaccactttggagattttttgtgcctctgttggaggtttttgtaccttcttaggtgatttatctacttttttatgattattgtatttgaattgtatcaatattatacttttctttctatgatgtcaatatttcaaagatcaagtctcaaaaatttgttcttcttctttcgaaatctcacttgtcaattcctttatatagatccaatttaactcttacgttttatatttaatctgaatatattatatatgggaaatttgattttttatacttacatatacctaatattttttttctaaacacataacattt

SEQ ID NO: 43159 - DNA, 3226 bp, Cannabis sativa
tttaacatagtattatataaaaatatgatatataatccaattcaatataatacaatacaatacaatacggcctaatacggcgttccaaacgagcccttactgtatatatctttatgttgaaagagaatgtcatacgtagtgatacggaatgtgtagtagtctcacctctcaagtattaaactgttcaattccgctttcttgaaccaaccaaagcttcatccttaatgtcactttacctctctgtcctattcttggatttcgaatgtccttcctctattttttttttcttatatattaaattccatttattaaaataatatattatctaactcaaattcgattttggacaagaacccatcacgtgaatatacatgatgatatttatatttttttcttttctttagagactaatataattatattatatggccttaatgtttcaaccctattaagaaagattgaagaatcaatagactgaagtcgccacctgctccttgtctgtttactctttgtttcaacgattcctttgagagaagaaagaaaaatgctaatgggcaactgtgataatgagaagatggtattcatttcttcatcaactactaacgaatggccacaggttcatatctttctttctctctctttctttctttcttttccactcggcaattattagacaaaaaaatgtgatcccatttttgttgcgtagcttttggaacagaatatctccctcgacttgttatttttaccctaatacaccaccttaacctctcttcttttttcttttttgttttcccttctcttttcttctctctctctctctctaacttcgctttttgtcttttgtttggcaccagaatcatccagatgatcagaataatgctttgaacatggcttcatcagctcatcatgttaggccaacaatagagaaacaaggccaagaacaactccaacaacaacagcaaaataaccaaggtttagcactaaagtgtccgcgttgtgattctttaaacaccaagttttgctactacaacaattacaacttatctcagccaagacacttctgcaaagcctgcaaacgttattggacaagaggcggaaccctaaggaacgtccccgtcggcggtggctgccgtaagaacaagcgagtaaagaggccatcttcaggcaccaactctgatggatctggtgctaattcttcttcttcttcagctaacaataattttaaaaatcatggttcagtagttcatcagccacaaaccgatttgtgctcgtattcgcacatgatgagacccctgtcctacgggttacacatcaaccctagttctgctgatatgagccacgtgcttcctttttccaggtttatgaacagtactacctctgggtacgatctacacgatcaacctcagttgatcaatgctcttgggttagggttttcatcatcagctgggaatattaatgatagtgatcatcattatcaaaacgacttcagtagtaatagtactactactactactccaaagaatatccaagatattgtctcttcaaactcgcttttctcaacttataattcgatttttagtgctagtaatactactccattaccttctgtagctggggcttctccaacaattgcttctttgttttcttctaaatttgcaaatggtggtctcaaagattctagaggacccataaatcactttcagccattaacagctccttttgaagaccttcacatagaaaacgcatcagctgccggtgttgaggacctgaatttgagtaacaaagaagcagtgaagttggaagatcatggccaacagcgtaggtctgattggaatcagacggagaaaattggcttatcatcttcagatccttcttttaattggaatccaatggtggcagttgggactagctggcacgatcagccaaatactatgagctcctcagtccattctctgatctagccaaaccaaaattcgaacttaattctgcattcttatatatacctctttcttttaaagtgacgtgatcctttccgatattcttagtgttaagtttttcttttcctttttcttttaacagcttatcactttgtttgtaacagagtttattatgggggttgagactggtgtgtttaaaaaaaacaaacaattttatatagagaagaaaaacagatgggcgatgagctggaatcggagcgatcatgtcagcagcaaagcttgttttattattcatcaaggttgaaagaatccttaatttgcgctgagaggatcctcagattcttttgtatctcatcgccacgagcttcgtcatccttggcgatcgatatatatctacaaagagatttgaaggttttccttgcacaatccttataatttgattagttataatcaatttgtgattagtttatatgttgtacgtatttatatgcatcaaatcttgttaattttcttgtctagtgtatttgttagtaactaggttgcaattgggtgggggtatatgttgtacttgtagtcttcattaaatcatctcatgaggaactaatgattttttaattttttttcttttttatatattacgttgggggattgagtataatggtataaaagagagggggatttgttatctcagtttagctatttttagtttcatgtgctttgttatagtaaatgtttgtttttttaatttttaattggtgttaaagctttttaatttcaaagttttatatatgcctaaattaactaaacatatcttacctaataaaggattataatgtgtccaaactaataaaggaataaagtactacatagaatgtacacgtagaataccttcatcatgcggagaaaaaaaaagtgtgtaaactgaaaaaactgatgttttggtcagactgagaatattttggtcaaaatttaaccctagtttctatgtgtgtaaggaatagtgttttctgagtgtttcttgggagtaaataaagaccgcacataaatcttaataactcaaaacccgagagaattggattttgagctacaaaattaatcatatgagatatcgattgagttctataccttgttagctattggacagttttagatacacaccttcaatagctacgtacctagtactactactgcacgttataacagggacaaaattttatctattctaatcatcttttttattttttattttttttttgaggaacaaaattttatctattctaatcatcttt

SEQ ID NO: 43160 - DNA, 1941 bp, Cannabis sativa
ctatcatgaaccattttttattttctcaatatatacataaatataattataatttaagtcagttgtactgactgtatataggaccaccactgtgttctgatcaatttagatcggtctgcgcagatactgcaaaatgcaaagtaccttatacaagttcttcaagtcagacatgcattaattgtttttgccacttgccctagatacacatgtatgtttgtatgcatatattatacccttatataccgtatttataatagatacattcgtggacacagatccatctccattcagtgcaagtgtatgcatatgtgcataattacctagtaatagtatatactatatatcacttcttcgctatgtgttaatcattatatatgcacaatataagtacctgagatatttagatatcatgtaattagaaactgaatatgtactaacacatcaagtttgtacgtacaagaaaacgatagcgacccagatcgagaaatagccatttaataacacattataattaatgtcccccagaaccagctaattcttattaattaataaattttatgaacacatataataataacacacatgtagtagtagtaactagtaaataacaataatacagtacatgatgaataattaagccacttaaaaaaaaagctaataatattacataaaaaatacaaaaggcaacaataaaagcagaaaagtactactcctcagctccggtatgtttattccttcaactccggagtaatagtattgccagttattattaggaataacatttgcttggtaaggttgttcaggcaaactcgtcacgtagacaaacctcggcggtggtggcgggggtggcagctgtgctactgggctgcaatatggcgtttttggaggcggtggtgggggcggtgttggttgttgttcacaggggttggtgcaagggcatgatccgcactttattcccgtatgaaattcatgatcaggttcctcttgtgcttttctatctatctttcgatgataagaattagtagtactagtactagtactagtgttggtgttattcgaagaagacactactactactaaaaaaaacataagaggcaacaaaagtacaactgtttgagggctccaacgttgaagcggcatcattatttttctgatcaatttgtcttgttttttctgatcatgagtttatgagagagagagagaggtagtactagtagtgatgagatgagtttgggattacgtattaactattggggtgcatcaaatgaaaagagttacatatggttgtggtgtgtgtgtagaggaaggtttgatgattgggttaggtgaatttagttaattcaatagaagagccgcacacacagatatgagatgaaatgagagatattgcgtattcttattgtctctctttgtttcaaatgccttcgatagcgaatggcatgtgattgttgtaattgtgggggaccttatgttcgggtggttattgacctattcctctctacataattaatttatatattcgtcatcttcttctttttttccctttccttaattgttaatgttccttccttaaaccattttaataatttagagttatatcgacagcgtacatataatttggtcatttttctctctgtactttacttgaaatatatacttaattactcacccttaataatttggttctatgcccttaattaatttggttttaggtgtatacatatatgctcttgcccgtaaatgtatatataatgttaactttttctatgtactatattattcgtgaaatttacgagaatatttcctcggcatcacaaaagagatcaacaatattattaaggttattattacatattccaacaccaccataactagtgtaatttagtatagggtcacacatattttatttgtaatttaaaataaaataaaagtgcttcacat

SEQ ID NO: 43161 - DNA, 5716 bp, Cannabis sativa
ctttttttaaatttatttacgccccccttcactttcaattctgggtccgccactgtatttccctagtaggattacttagagaaatgataatttgtgttgttgagttcgtatcgtgttaaaattttaataattagaaacacgaatgcatttcacataaattttgtgttgtgttgtgttaaacatgtgatttcttatgttatattcgtattgtgttaggtgtgttgtaagctcaattaatgatttaatgtcatatcgactttttaaattaattttaaatggcagcatctttaacaaagatattttaaatgtttgatgatataaatacatttttaatattttaatagatgtttattattaaagtgaaaaaaataccaaaaacaatattatgcaataacattatttatattttttctttcttattttttttttattattttgtcataatattttaataatttctagaagtacttaccattaaaatattttagaccataaatatcaaaaatattgttaaagaaaaataaaaaatattatattattaggcaatgtaaatttttttaatattcttaaaataatattatcattaaaaatactctaagaacatgactcacgtaacttttatgagagtgtcgaatctacgaaatcttgtgccaaatctaaattacaagacaaatgttaaaagacaccaatgtatctagtattattatttatgtatttaagtatgagtcaaatataatttaaaaataacttttaaaaaatattactattaattataaaacttatacgatgtcggtagtcggtacctataacaatactcaaattaattacaaccccaagatacaacccattatcttttcattctagaactagggccagtctatcttcccaaggtgccattattacgtcagtgtgcaatttaaagaaatctatccatattacctaatattaagagtaaatatttattactatattgtaatataaaaaaaattaaaaaaaatatctaattgatttttaaaaattattttaaatttattcattttttaaatatcagggttatattattgtatagggatcatacaaatagaattcttttctcttttttacattagttttagtatatttttatttctaaacatatttcaatagtaagtagtagtactctttaaatttgctactgttgtcacattattacttattttaattacaaatgctataccactatataaaagaataattggtgtgagatagataattgtaagtaaaagtagtatttaaaaaaaaaaaaaaacaggaagaaaaaataaaaagagaactgcactaatttagatataacaataccataacaattggtattgttatattaatttaaatataacaaaaattgggataaaaagagaatttttatttaaaaattgagattaaaggttaaaaaataataaaattaaaaaatataacaacaaataatcaaacctaaaatcttataattatcaatttattgttttactatatttatacatatatttttcacacagctcttaattattgttttgacttttgagtagcctagctagaaagaaaggtgtatgagcctcaaagatatcgaatcatggaataggggagccattggaaaagcatttttgggcaatttccaataaaaaagataaattcattgcttagttttgatggtatgtacatgttgttttatttgtggtgtacgtagctgagcaaaattatcaacactttctctttttttgtaagcaagtgcttcaaaatttattcaggtggaattaatggaataaaccaccataaagatgatcttcctcttatgcttgatcattggataataaggaaaaagaaaatcacaaaatggaagaagagagtggttgtgtacaattttatggaaagctcacaatgaggccttattgggaacaaaaggctcctacaacaaaggttatatatagttagtacgtaatacagaaagattaattgtttgtaatagctagactgaattacataaaaaatggaaaacttagtacggtacacatgatagaatctagggggaagaagaattttcattataaattgcataatgtattgatcaaattaaggagaagaagaatttcattcaaattaagtaattaaaatcattaatacaacacattaaaaattgaaaagagcccccagcaaatacaaaacaaaactaatatataatcttattatcactgcagctttgttccaacactctcataaatatactttctatctctttgatgtgatgagtctgaagagagatgtgtacacataaattcccatttttaggaatatcatcataaatacttgctcttccttcattgattgtaattccacaaatccccaaaggcaaaccccaaccaaaatcagcttcatcaagagcaaagctagtccaactattaatcgcaaaatttggacacctacattggacttcaagcctatgacgttttgtattaggattaaccttaaaaaaatcaataacagatcttaagtaatcatcatctcttctcatcaaactttcatgtacaagacttactgcataccataatggttttgattgaagatcaccagccaaagcctcagccataccttcaaataccacattcccaaaatagccacgtggcagtggtggttgcaatcttgaccgtccatcaacattgaaaaataatttagtctcttgatttttgggaagtgcacgggcaatacatgcacatttccatataaggccagacataatacaaaatgtactaaagtgcttattattaactaattctttagctttgtttttcaatttgttgagttgatccttggttactttaagaataaccactttgaagttttgttcgtcaacaatagacaatttaggttgattgggtagttggtattctttggtatgatcgaacattatttttggtggatttctaggattgagtaatgttcgatcaaaatatggtgtgattgtgttgggttggcctctaaaaatttcagaccatgacttgataaaattgatagcagaatgcccatcaaatgcaagatgttctcctccaacacttagacaaactccaccacatccaaaataagttacctgtgtacatacattggcagagccaaccacaattcttagcggggacaaaataatgagtactgatttggaccaattataattatgaaaaatgattaatcaaatataaatcctcgtgtgtaattaattttttagatttatattacacttataattactaaatcttaaacccataataaatgctattatatatgtagataatcaccaatgtgttatttttatttttacagtctagattgcttagttgttgtctgaatttaaattgcgatttaggttgactaagttgctatgtagatttttgtaaaattaataaaaaaaaaaatgaagctacttcaaaatgtaaaaataaaaagataaaggaaaaacttgtgtgtttgtctcatattatattggtgtgtgagtaatttataaaatttaatacatatacaaaaatgtatatataaatagtttatattggaaattaactgtgaaaaataaatgatatcttaaatttacaagtagttcagtaatttgaaaaattttactatcaaaatttaagcttagagtattgagtgtaaagtagagtaatagtttagagaattcttaaataaatatatatgtgtcattgaaatatatatcaaaaaatatcagaaaatgctatctcataattcatagtacttcatatattgattacaaaaaattattaaatgaatgtaccaaacaagtttatcccaacaattatccctttaaaattaatggaaactatatagctatagtagagtgttatatatatattattacctggaagacgaataaagggaatgatgaaattccagcagagtaatctggggttggaggaatgaggttggatataagtagtgaggagtcagtaaaatctccaaggtcttcgatgtgggactttgtctcccccaccacaaacaaaacaccttcgtcgttgcatttaatctctaaccgctcttctcctccattctcggcccggctcaaccgccctgctaccggataatataggacaagagtcttagcaagagctgtcttgaggttgtggatatgatcatcaactgctaatgatgatgagttgttataatttttattattgtagaaatagagtaatgtgcttcttctctcatagtaaagttggtccaaatcggataatgggatagtggagcgtgttggagaggtcttctccactggcctcactaggctactttctcttatcttcactacaatatcactcatcttcacctcataatataataattaaacttgtgaatatacaaccatatatataggattgttctataatatactgatttatttttattttttataatatttgagagaaatttttagtctaactttatatcatcgtcttaaaatagactacttgaatcttacttttctgttaattttttttttttttaattctcaaacttttgaaaaatgtgctaaataactacaaaacgaagattattattaaaaaaagataaataattcctataaaaaatactaataaaacttaatatattattataaagtgtcatgtccctaataaatttcattggctaatccaatcaaattcaataaataattagatttaattagaaaattatcatccgatccaatctaatagacctcaaaattcaatcaaatcagattaataattagattggatcgttttcttaatttagatgcgcatgtctaaaaccacacactttatttttaatattaacttaaaaaatatgaataaaaaatacctaaaaactaaatatcaccatttatttaaatttaatactcgacaaaaatattatctttataagtttaatacaactaaaaatttaaaatataactaaaacaatagaacaaaataacatgaaaataaatacataaaaacaaattcaaaaaaataataataaaaaaaacaaatagctattataatcattatttttttattttttaaatatttttcttatatataaattgatataaatattttttttaatatatacatataaaatcgggttttaattaaatttttagaatacatctaataatcgatctaatttaattaaaatttaactttcaatatccaatccaattgtaattggatatttattttttttataattgcatattgaattggatataatatatgttatgtaatttatacttgtgtctacctaataaaaatttggactatgtaaaagataccaaaaattattggtacattttatataatattgaaaaaaaatactgattaaggatccgtttagcacaacttttctaaagctacttttcaaaaaaaaaaaaactgtagcattagtaagcagttaaaaaacaactaattgaaaaatttatagaaatgctagagctaaaaactaaagctggtaaaatctaacttttagaaaaaactgttttgattaaaaaactctataataaattactttttaacaaaaatttatttaaattatttattatctatacaatttttttctaaaagaaaaaatacttaaaataaataatatttaaatttctaactttttattttgttttaaaaaatattttattatttataatttttttttattaaataacaatatcaaccta

SEQ ID NO: 43162 - DNA, 4312 bp, Cannabis sativa
aaagtatgtattaagtttcataaaagcaaatctttaattaattttctctctctccctcattattgtaaattaattctactatattatatatgtatttatttaatcatatattttcacaacaaaaactcaacttttatgagataatttattttttcatttgaccaaaaaaacaaaaacaattactttaaaaaaaaaaaacaattattttcactagcaatatttatctttaacattatcttttatttttttttataagacattataacttttatttggctcggtgtatgatgggggaaatcaacaatgccaatagaaaaaataataataattaactctaatttaagtattaattattgttattattttagtataataaattaagtaataagaataagaataaaactattaagagtgagtgagtgagtgagtaagggagcgcgttatgtgagagagagtagtgtagtagaagaaggtagttgaggatgagaattgagaggttaattggtaatacaatcacccccacatgcccacatataaataaaatatataatattagtgggaatcctctctatcattaataataaataaataaaaagagaacaaagtttctctggttttgatctctcaccctggatcgaacgaaacaacacacaccctattctatggattcctctcttaatccttttttttaatattctattaatgttaattacttattaattttttatatatatatatataaaaggaattgtcacctcactctgtgtaaggtaatattttgtaaatagttaataatttttatataataattaaaaaattaaaatatataaaacttaatattttataaattggaatattaataaggtagtatttaatattagtaaaattgtaattttaagtacttatgttataaatattctatttaattatatcaataatattgtatatggtggtggtgctggcattactaatgctatttagcatttttcaaatttgaatggtggtactcatagtagtattagtgctatactcctagtactagtactatggtggtgatggtgataataatataataataatattgttattataattattatagtacaatagagaaaagtaccaaaaactaagcataaagtcttcttctccaccagattggggtgtgagtgagtgtgtgtgtttttgttcctctgcttcttaatagtatcatcatatatcataacatatatataataccaccattgctatatgatatgatatatttgtgtattgtttgaaattgaatggccttggtttcattcctcctcctccttcatcttcctggttattttattctttggttaccaccctcattcaaacctttacattcatcaccaccacctttactttgacttttacttccgggtacctctctctctctctctatatgtatatatgtatatatatggtatgagttgctttttttttttatgtctttattaatttcttactcaaaaaacaaaaaaaaatcaaaagggtctttgtcaaaaaccacatacatatattatacatagtgttcatcttatttctcattggaaaatttatacttcaattgggtttgtttaattaaattttgttgtgaacttttttggggtgttttgatctgaaaacttcttatttgggtatgttcactttctttttgttacaatatcagattcaaatttttgttttgttttcttcatcatgaaacatgatgagacttttttttttggctttggacaggagaaaattctgggtttaaacttttgtgtttaacaaatgtttgaagaaaggaaacgtggtgaagaaaggagaggtagtaatttgcacacaaatgattccacaactacttcttgtagattcagttccccaacaatggttcatggaaatatcaataacaacaacaacaacagaaacaagtgttcttcccatgaaagaagaagacttattactggttcatcatcatcttcatcttcatcttcattttcatcctcctctggtttaaaacctcaggatgcagattatccacagcctcaactcattgaagaagtagaggctctgatcttagcaagagtaccaagatcagattatggaacaatctctcttgttaataagagattcttatcacttatcaagacaggagagatttacaacataagaaaacagatcaagtttaaagaaccaactgttttcatgcttgcttcaggtgagcagagatggtgggcttttgatggtcaccatttcaacacacttcgccaacttcccattttaccagctgagtttccctttcacaatggtgataaagagaccctttgtgccggaacccatctcttagtttcgggcaatgaacacgaagctggaccaactgtttggatttacaacttggttaccaaccaatggtttagaggccctcctatgattaactcaaggaacatgtttgctgcagccacttgtggaacctttggttatgttgcaggaggtgttgtcaagaccgggattggttacgaatccgaaaagaagtacacaagctcagctgagagatacaatcctgagtctaaatcatgggaagctcttccaaacatgcatagaaaaagagggtcttgctcaggtttttacatggatgacaggttttttgtcattggtggtgagaacatggaagggaatcttacatgtgctgaggcttttgatgagaaaagaaggaaatgggatttgattcctaacatgttagctgacatgccagtgttgaatccaaggtcaccgccgcttgttgcagtggctaataatgaactctattcacttgagccttcaacaaaccagctgatggtttatgtgaaaaaaactcagtcatggaagagacttggacctgttcctgttagagctgatgccatggggggatggggtgtggcttttaagtcacttggggttgagcttcttgtcattggtggtaatgctaatgcctttgctggtcctatgttgatatacacttgttgtcctgaccccaatgctagggagctgaactggaggcgcgttgaggtaccccgaaacaggctgcagcccttcattttcaattgctctgtcatgttagtttgaatgaagttttcttactttgcttttatcatggtgtgtgattttttgtttttgtttttgtttttggttgaggctataaataagagagagaggtacattacatacaaggagtttaaaaagagagttgtcaaatgacatcttcttcttcttttttctactagctttgatgataagttcttgtgttttgttgtgtaccataccatattggcctttggttttaagatgaaatttttgtaatttgctgatgatttcaactgttgtctgctctgtaatttttctctcttttgttaagacacaagaggaagcttcttaagaattttttggccattttcatcatttggaaactcaagtgatattgataaaaaacctgtcttgtcttacacttcatgtgtaaattaatgtcctttgatattgtaccttcacaaccctgttgttctaagctttcatagataaacaaattattactcctaagaaagtgttttaaacttggtcaactcaacaacgacccaacatttttttttcttttgtttttttaatggacaaaattgatatcaaacttcaatgttggtgtaaacatttagctattagtccaataagattgttttttcaataaagcaaaaaagattgacccaaaaaccaatatgttattttgttgcaaagttgaaccttttctttttctttttctttcttttcacaaagagaatgattcaatgaagcattattagggaaccacacacataattagtggtggctagaatagaagatggtaggaatttaaaaatgaaaacaaagtgattatgacaacatataataaggattaagaagttgttaactaataattactatctaagagtgttttgatcaaattcatggaactattgttggtgtcatcttggcaaagggttgacggtggagatttatgaacaattggttgaattgatagtggtgtgacgtgaaaagcacatgcccaattttgatcgaaagggggggtgttgtgttagcatggcaaagaaagaaacatattgtttgtatgtgatgtgattttcaagagtgacacaattggtacaacattttttttttcactaagaaaatagagatcatttttgtgctgatttcgaactcggatcccactagtgaggggtttgatccaatttatttaattataagtttggaaacttacaaaaatactgaaatttgggttaatttt

SEQ ID NO: 43163 - DNA, 1999 bp, Cannabis sativa
tccccaaaaccaatacttatgaagcacttgtgtttgtccttgtaaaattctggctgacaattctatggtccgaccagaaccatctctcctatacctcactatgtaaagatcaccttcacataatactggcactccattagttttgcttgcgcagacatcataatgcaatgcaggtaacatttagcagtaatatggaattagaatggtaaaaaggtgggatttctgtacattttagctattttggctcttattgacacagacaaaaatgtgtctgaacagcttcttaaaatttatactttgtagctaccaagctttaatcccatgatagagttttggtaattggataaattctatgtttggtgtgattttatctaaaaagaaaaattatgctgatcttagtgtcatttttatgtgtactcatcattctagacagaaggctttcaggtgaagtttttccttcctcttaccttgttttgtcgtatcattggttggtgacttatttgtagtagttgctagctaacattcaaacatgtttttttttggtcttctgtaaaatcatacatgacttaggtaagatgaatgtttttccaatacagggtaggcaggtcagtgacgaaggggcttcttatccacctcggatgtgatgtaacaactgtgggatctagtgatgactgcatgcgtactgtttctctggaacacaaagtggtgttcatagatgttagcatggattgttatgaacttgccagccgcgtacgtgaaagatttggaaaacgccaggaaagaccactagtagtagcactaacggggaacacagacaaggcaacaaaagataactgcattagatttggtctggatggagtcattcttaaacctatttcagttgataaaatgaggaatgttcttgcagaattactagagcatcgagttttatttgaggcaatgtaagtgctacgaacatgtgactaataaatatagagggtcccaaagaggaaaacaaatccggccaactaaagataaagacgcaagcttgttggaaataattttttttagtcagtgtacatagcacatggcattgcagtaattcatggaagatggagtggtagcacaatatttcaacccttaaaaagggattttctttacctttgatatgtcttatagaaattattgaggaaacatccttttgctaaaggaaaactgtttggtatatgtaaaactctaattttccatgaatggtttcattttgatgaatacattaatggttgtgaacatgtcagaaggaatcattgaactttcagttttgatccttgactaacactacagtatatgttaagagttaagactagccatttttcttgcacagaagagaaagccgagacttacaagaaccagaataggaaaaatgggcggggagaagtgaaaatcctttggttttatttttacattatttaacgtaaatttttggtttaacaaatctttgttatttttttaagcagggattcatgagatattgggatcatagtattacgttgaaatttattgcctcattcatttataggtttgaaatgagtatcacttctatgtcaattgataatagttgttttgtttcttattaccttattctcactattgcattattctttgatatatttatataataacaaccaataaaaataaaaatatatatatcatactaataaaattatatgtcacgccaataaattttatatttatatgttgtcagtgatcaattttccagggacaaaagcactttgagtatcagacacaattgaataattttattagtatgatatatatatttttattgaataattttattagtatgatataataattttattagtatgatatatgtatttcaataaattatatgtttcatattcatgtacgttatagctatttaagatatcctataaaattttgaaaaatttggaataatttacaatatagaaaacaatattcaaatagtctattttacacg

SEQ ID NO: 43164 - DNA, 5042 bp, Cannabis sativa
tcgatccttaagttatatagtgtatatatttatttattccgcattttatatacacatacatatatttcagtttatacatataaattgtctaacaattataactatcaaaatattattgaatactattttatttgataaaattatcattccataatttacttaatcatatactacactaaacacacaccatattaatatatataatttagttcaatccaacccaatgtctaactaaactctgagtatttaaacactctcttacctttttttttttctgaaaagaacactcttacttgttggtgactttgaagacaacaaaaagttgtctctttattcaaagacaataaagctaaaataattggttgttaattataggttattaggatgcttaattattatttcaagtagtacaattacaatttacagctaatatttcgatcgttcctattgacacgtatcttttttcggatcaagaccatttctttcgaagaaaaaacaaaaataattaagtccagtcaattattaacccctcctactcctacttattaatcctactcttaatcctatattttctccattcaacagtttttattcattcaatcatccatttctaatggcaattttattttattttagatggtttgtttgtattctatatatttttttgccttgattttggtatttaaagtgagagatgacctcaacaacaaaagaccaagtaaaagatcataaaacaaggcaataattatgaaaagttcataaaaataacaataatatattttcttttttttttttttttcaattcccttcttaccaggggatccaatgaaaattatagggtatttagttgtacctataagctggtgttaattaatgtattggtttatttaattttttctttgattaattatactaaaataattgttttgattaattaatgatgagatatttattagaaatttccttccatttttttctccaaaccaaacaaaacctaattcaaattaaaatatatagtaagacaattagacgtgttaatattaattttttatgagcgtgactgatcaagagaacattatttttgagaaaagtataaaaatataataatttattgaaattccctttcaaatttctgtatatgttattaagcaagtagtagtacattaggtattattactttcagaaaaaagaaaaagaaaataaaagaaagtataatataggtattactttcaggaaataattatgacaaatcttaattggcatgtagtgtcactctcacacccaatgtgtggggttaattacactgtgaaagagattaaaagtaaaaagggcataataagactaattttaattaattatatttaataaaagaaattggataataaatttattagcatgtttagactttttcatgaagaaaaaacagggttgcttaagtcataagaatttaagatacctcaatttatatttatcaatatatttacagatactatatacatatatatttaaagtcttaaaccactcattttttttattttttaaaaatttgtcattaatgataaaaatagaaaataaataaataaagaaaagtataggactccaaaataatgtattaactagcgatcacagtatctaggctcactcccaactagttttgattagccaaaaataaaataaagctaattacattataatttttaggctaattatgatttctgccctcaactgtactaaatcatgcctagaacttttaatattgagatgattggatttaaggacttttctaattttaataaaaaagtctaacatgatgaaagttcagagagtataatttagtgcttgtgatttagtagatatcaaaatttggggaacataatttagtacataaacaatcattgaattcagtaagttcagggacatagtacatgtcaaaagacaaaaaattctaattagtctaacttttatatataaatatatatattaattattgctaaactacattatagtataaactgatctgcagatttatttaagttctatatatcaataaatattaaattaagtaggcccatacctaagtaaaacaatattttcttaggagaaaatcacaatatttccagtacaagtatataacaattttatcaattattatattggttcctcataatcaaaatagtacatagtccaaacctcccaaacaaattaacagcaatgaaagcaaagtttaaataaaataatctttctatatttccaaatattattattctaaaccaaaaataaatatttatttacatcaccaaagtaaaatatcactttatatgtatattcctcaactttacctatatacataactattttaattttaatctaattaattattaatgcaacaaaaaaattgaaaaattaaaaaactaaattacaagagagatgattaagaaactgcaaccccattatttttcatactgagattatgattattactattcattaggcaaaacctagtgggcctgggctgaaaattcctcctcctctgaagatcatggctactgggcttgatcaactggagaagaagggccttgatggtattggctttgtcctccatgcccgttttccattgacccgacgagacccgaacccgactggtgccagtgcttctgctgggcttgtggggattccggtgaagactgcacctaaacgaccctggatgagaagtgggagaacagaggcaggttctgccaacgacatgtcgttttgggtatgatgatgtgcttattgtggccatagagaaattagagaatggatctatgagaaatggtccaatttttgcaaatcttgggaaattttgggaatgagattctttttttggggtgttccaattccaaactcgtgggaaggcttgagttgagactttggttttagttttcttttttgtggttgtgaattttgggggtatcatatatatagcttcatttgtgtttgtgattttactttaatacccttgtgttggaaagttctgagatggtgagatttgttcgtaggcctttgtgtgtaatatatgatttttttttgaaaaaggggaaactttattcaaaaagacaaacaatacacacaaaggcaaaaagccaacaaaacaaaccagctgctgccgaaaccagaaagaggcagcagccacccaactaccaactgttaattacatttaagaaatacatatttttcctgcaatcctcaaacggacccttgcctaataatctcagctgaacaattttacgcacatccaaactaactcttctaggggcagcacaacaaagatcaaaaacacagcagttcctattcttccagactgagtacaaagtcgctgcaatgactgtattcagcaccctcatttgaggctgctggttcagatttttgcaccagttcagcagctccccgtgagttctaggccaagagaagcagcccacccactccatgacagcacctatgacctgtttagtgaagatacaattgaaaaaaaggtgttcatgcgtctcaacttctgcttcacaaacaggacaatggacattttgaatagaaagaattcggccaatgtaatctcgggtcagcaattgggagttcagaatttgccaaaaaataaatctatgtttcggcactatgagtttatcccagctagcttttgcatagtctgccttagccacttcaatagacaagttatagtaccttttggcgctgaacttaccccctttgacagcttgactaagtcttgcttcatccaagttgtctcgtaggttcaaaatcttcttgaagtaccaacaatcatcaaccttcattgtgtaactccatatgtcttggttcctcaggtaaatcgagttaatccatttgacccaaagacaatcttgtttactagcaagagcccacaaatttttagccaacaaggctttattccacttcttcccctctcgaaaaccaactccaccaaggtttttgggaagacacaccttctcccaagaagctcggtggaatttacttctagttcccgaagaaccccacaaaaagtctcgacaactcttgtcaatagctgctgttatcttagagggaatgataaaaattcccatccagtaatttcttatcccaagcaagaccgagtgaattaattgagcacgacccgcgaaagagagatttctacttgcccaacaattaaggttcttgttaagcttatctatgataacaccacagtcttcagccttccatttagtaggcctgaggttgaccccaaggtacttgaggggaaatcccccttcttctatcttcacacactccaaaatcttggatttagtctctgttttaacacctccaaagtaaatgtgagattttgaagtgttggctgacaaacccgtggcattacaaaacttctcaaaagcttcataagtgagccttatcgaattaagatttcccttgcaaaagataaccagatcatctgcaaagcacagattaatcaagcgaagagtcttacacatagggtgaaagccaaaacctttttcatgcgagtagtgccgaagcagccttgtgagatagtccatgatcattacaaataataacggggacatcggatctccttggcgaagccctttctttcctttgaagctaccctggattctgccgtttaaaaggatatggtagttggtgcccttcagacaagtcataatccaactgatgaagcgagaagggaagcagagcattctcagcaaatcattcacaaaattccaatcaaccgtatcataggccttgcttagatctattttcatgatgcacctagcagagacatttttccttgagtaccctttcaataaatcctgaaagatcataatgttctgagccaacgatctatctttaataaacgctccttgattactgtccactaatttaggaagcacttctgacaatctggaacaaatcatcttcgagatgcatttatacaccgtattacaacaagcaattggtctgtaatccttagcagaggaaggattgattaccttagggattaggga

SEQ ID NO: 43165 - DNA, 5776 bp, Cannabis sativa
acagggtccaaaatggtattttcctttttttttttttttttttatatgggaggggcatttttgaaaccaagagaaaaataattctacatttcatagagtatctaacttttggtttattttttttttagttttggcctaatgcccgcatgattaatcaaattttccaaataaaatagataacagctagcaaagcttttttttttttttttgccaatactattgacgcacttcactacactttctcttcctttgaaaaaattacagcataacacatcctctagttaacagaagcatcaagtgaaatgcaggaaaaagaaaaaaagtgtcaacaaagtgtggtaatggtgggctgggcattgtgatcaaatcaatgcttagttcttcttcttaccctaggataccccaatccagcgctcccaatatttccttctgcttgaataggttcaactaagcctttcatggttttccctagtgtctccccctgcaaaatgatatggaaatgtattaggtgagagattacaagatggcaatcgccaaaataataactacaaaaaatggtgcaaaatatacaagatgcttcatactagcccatcatccagtaacaatattcctctaagggacattaacgaggctttcattatagtcatgtcactaaattgcaaagtaggatttatttacctctttccaacccatgttttctagaatttttctggcgtaacttccggctccaaatgacatgttcaatgcctcggctgcagcttcctctgtagagtccgaaacaggtgaggatggcatatcaccaaccattgtattcttttgtcctggacccacaccgaatcctccatgcaaggctcttctctcagcggctctgtctctatatgcacagcttctattctggtagttcaacaagtgttcccaaagaattaaataggcaaaaatataactgacaaattattaaatcggacatacataagcagcagttagacacgacatgtaactacataagtacttgggatacaatttgaacctccaagcacaatgtaggaacttcgtcaaagttcaaaagtgcagacatctaactcgtaataattggacgagacagggatgcactgaatgttaaactcgaaaaagtcgtaatagtaataaagaagaagtttagatctcaggatccaattattatgttgaatatcacatttaccttgtccaaagatggaacctgatcttggcatggaggaaaatcattgccaactaaaccatcagcagtttttgattctatcttctccgtggatttagaataaggacggggttgctcttgaaatgacagttcaggaaatccccagtctttggttgggttagaagaatcaaacgtcaacagggaacctaagaattttgcactcggattccgtaacttatatatttgtcctggcacaggagaaaaaaaaaaatataagcatctgaatgtataacgttacactgaataaacatgaacaagcagatgatgttgaatcaataaatttgaacttatgttacattaaaccaaaaccgtaatagaagctttacaaatgaaagaagaaaggcaaacctgttttaactcgtaccagatcaagatgcacttcacatattggtgcagtcttcagaagaccgccaccagtaggcatagagggatggagcttggcagacctcttcatcagtctcccgacaagccttgaaatctcacctttaccatcttttctagaccccctaaccatagaccagtcccataaatcaacggcagggacctctggaatagtctcttcggaaggttgaatgacttgaccatactgagctctccaattctcttcatcccaagaagcacctgtgccacaggtttgtttgcataaagccagtgcagtagatggaccaatattttcacaatcactagagagtgacaaaaaattacacatattactacttaaaagagtgttatctagcaaaagatctatagccagtagcaataccttcatttgatatgttttcacatgattgagttacatcaaaatcgtcttcaggaatccactcaccctcttctaactcgtaatcatcaacattcactggtatccaaccaaacaccccattttaggtaaactagggccatagaatagcaatacaaatgcaggaatgaacaagaaaacagaactgaccatcagcttgaaattcaatgttatcagtctccttggttgccaatttcagatcatcatcatcaccagcattcactgcttggtttgaatagcccgataagtaaagatcaatgagtgtctcttctaacctggaaaaccaacaactacggtttggaaaaacaattccaacaaagataaaagaaaaaaaaatgtggaaagaccatattaataacataacataccattctgatggaggaggtgggttttcaggagaataactgcttctacaatctgtgttcactgcaagtgaaatggtttgctgattctagattaaagaaaaatccagatcaaatagaataaaactggaatttccatattttaaatcacctaggaaggacatttatctagcaaattttacaaaaaacaattgaaaattaatccatttgtcactctatcctttgccttcttaattttatatttctttaaacatttaaaatcagattaaaatgcaatgtgaaactataccaaacacctttacaagtatagaaatttcatttcatttgaacaatattcaaagattagagagtaaatatagatcaaatattcaattcaagtccttggtggggtcctaatccatcaaaaattcccaaatatatataacatcaaaaataaatcttaccaggatttgacaaatcagcttcataatcatcaccatgaaagaatgagccattctcgttttgatcaccacaacattcatcttttgtagatggttcatgttcatcttgaactgaattttcatgaacagttacttcattttgaggcatatcaatgttatcagcctgcttaaaaaacagccgttatagctaattattccaaaaaaaaaaaatggtataaaataaaaaacaatgagaaaaagctcaaatttaagtaccgtctccgcatcagaatgaaggagcacatagtttccattctcgaatttgtagtaaagaccatcattagtactatagtaccagccagcgtttgggtcgtggtaaaatccactactgccattccattaaaatccataaattaatacatgaacttgaaagataaaaacatatcaaaatctaagagggaggagagagagaaaacctggcatggaagtaaagcttagagctttcatcccaaacaaatactgaatcggtgttgtgagaatcggattctgcagaatccgccatttttgcttctctcgccgatcatatgcgcgccaggggccaagaattggccgtcggcctcttattacatgaactgggccgctgacaattatgggctcttattgggctgggctactatatttaaatatatatatatcgacggctgctttagacacgtgtcatttgattcgactgcatccgttgtcgagctctttttttcaactgaaccattttccgttttggtttctttctcggaaagaggtggaaaatctgatgaaattcgcgggtgaagatatgaaatcgtccgattttatggacaagcggattatggaacttcctcgatccgattccgatgaattctcatacgacataggcaaggacgatttcgattccagcttcgaattccactctatacgacgtgtcgttccaccatgctcacgcgattccagtttccaggtttggtttgaatttcatcgatatactttcgcttgagttttgatcgatagaatcgctttcatgttttggaattcggaattggaaatttgcgagtttaagtaaaattgttgaattgggagtcaatcctaggtattggagacagtgaagagtcatctgagcttgacttagtcaatgaaaatatgatattacgatttatactttgagcttgactaatacagaaatggaggaacttgttcacttaatttgatttccttcttaaactcacattcaagttgttacaacttacatttatgtttccttcatttgcaagtaattgctatacttatttcttaatgaatcactgttttatgggtttatctttattttttgtgaaatctggattcataaaggttgagacttctactgatggagtgctactatctgtgatcgatctcaaaatggaggcgcattttaagaatttaatacatgttgtggaaggtattagtgttcgaatgtgtcaactagagaatagaacaagaaaaatagagtattctgttgtggaattgaaaggatcatctgagtttaaccagggaaaatctggagcaaagttgagggagctagagaatattctcaatgaggtattgtttctttgtactgtttctttacatccttttgttttcattaatttgaccaaaattaaggctaccttgctccattctcaacacaattcttctgaatcgtgggtatacttgcacaggttcaaggtggtattcaagacttaagagataaacaagagatatcactagtgcaactgcaattgggaaagcttcaaatgttaaaagatcaacaacaatcacaaaatcagaagaccaaaattcacactagttcatgtcaaggtctggtatcatctattcagcagcatagtaaccaaccaaatatcacttctgtaactcctccacaacaatttcctgtgctgtcatctattcaacaacatagtaaccaatcaaaccaaactattgttacttttccgcaacattttcctcctgatcatctcaatgttcctcctcctcaaattcaatcccatcaaaatttgcctcctctgccaacagcagagcattttctagcccaagcatatcagaaccaaaacatttctgtttcacaggcagaatctaattactcgttgccaccgcctatgtttaatccagaatctacacaacagcatcactgtatgcccccaattcagcaaccacaatcaacatctacagcaccatatcaaccttaccagcaagccccacaatttcctttggcctcacaagtgcagccatctcctctactaagcccttctcatgatgttgaaccacaaacctatcatccttcattggctcacaattttaaagagatctcttacatgccacctcaaagctacaacacaaacacccatgagacctataatgcacctgcctatgctcctcccacgaaacaaatgtattttagttcaaaccagaacataggttataatgaaccttcaaaaactacagggtactactatcctgagcatgctcaaccaagcagagattctagtttcaatgatgttttttcacgttctggttttccttcccagtacagcaaatcaataatgaattcctcagaacctgcaccatttctttcggcccgtggtagtgaagacagattctcacagccaccagcttccaattcattacctcatgcattgccaatggcctctgaggtggatagtgaatcaggttctagtgaagctggagacagcattcccattgaagatgttattgataatattgtaggaatgggatttcggagagatatggtgagagcgacagtgaagaaaatgactgagaatgggcagtcagtagaccttaatgtcgttctggataagctcatgaataatagagaagtcccgaatgagattcataaatttggtctgtagtaatattgataccgatacttggattggat

SEQ ID NO: 43166 - DNA, 9040 bp, Cannabis sativa
gcccttactgtttctttttcaggtactcttttgcatacttggtgctctttgttgccacattggctcaatactttattacttccagctcttcacctgggtgaatgcttattctttagttatagatcttttttgtgatgattggaacttgttaaacttgttcttccttttttaagctgttgaaattttcatgtctagatatgttattgatgcgataaggactttaaatgagtcgaatgcggtttataatagagcagcagtttcttcaaggtatgtaagatgaacccttttatggttgttgaaatattcggtttttgtgactgagaatgcctgcggtttttcatattcttaatctaaattttaagcaaagacagcctgcttcaagcaaacatggaagtgtggctgtgtcggtagacttgaatgctgcggctggaaataataattcaacgtcttggtctaagctagtgatgggcatgtatccacctggaaccaccattaggtaggtttttcgttacttgagagctttcgtaactttgtttattgcaattgcttgctttattggaacttggttttcgaaattggtgggtagctgcttgagtgaattgacaaaatcggaaaatgtggcatctcagatgtttcatttctcttgtaaaacatgcttttttcaagttgcatttagtttgctttcttatggacctatgtccaatgaggctgcggtgtgaatatgaacttaatgctgttccgacaagtgacaactctaatttctcttccatatttgttggctttcttttgaaatcgtaatagatataattccatagtttgtttcaaattttgcattgtatattaagtgcaatagatactacttagagccttttaatagataataattccaacagaagttatccagtttcctttatttatagtgagcaatcatttatctaaagttcacataacatcaatgtttttttctcaatcttccttgtggtgttgctaaaacttttaataatagtgtcacatcgggtttctgtaaaattatttgagaagacatcacaacagcaatactgaatttttcattttcattcttgcagaacattaacttgctcctactgcaatattgaacaggtacttacattttaatcctttcatcaacagtatattaggataaaccttgttaacatttttttatataatccttcttctttaatgcttattgcttatctaactttatgtatagagaaattcaactgttccactttttctgttctaatagttaaaagcttatcttttggtctaagaaatcgtcattatctatgctaatgatattatcatcttttcagtatgacctaaagacattgttttttttttaattctctagtttttctaaagtgggagattatagttacagttttcttacatttgatatgcagcctccacgagcaaaacactgtcatgattgtgataaatgcgtcctccagttcgatcaccattgtgtttggcttggaacatgcataggtcagggtaatcattgtcgattttggtgagttgtttacttactgtattaattgaagtatttcatttacaaagtattataattttgtggtcaagtttttcaaactgaagaatactaatatgaatcttctttgactgtttgcaaaaaatatcttaggtggtacattcttgaagaaacagttttgtgcctttggactggatttctttacatcactttcttgaaggctgatatagcaagggcttggtacatacctcactcaaatctttatctatgtgatgattctgttgttgaatgaacaaccaaagcatttttgtaatatgctggttttggggattttgtttttctcttcttctaattgattttcatttgcttgtctagagaagtaattttgccaatgtcatctgatgtgtttgttatcaggtggaaggtcggactcgtgatattgctgttgattatcttatcaatttccttgatctttctgttcctccttttagttttccataggtaaagtttcgaacacagtaatgtaattttctttaagcatcaatttcttaatataagcgacttttgcatcttcttcactgtcctataatggctgttactctttctcatttaaaactaaagtaagaagcagttggcatgtttcgtaagcatttgtttaattctcaattaatactgcagctatcttatcatgacaaatcagactacatttgagcttgtaagacgtagacgcatcccctatctaaggttagtaaattcctcgttcgcaaagaatattggatcgggaggaacattcctcaaaaacaacacagattgtggctcaacttttttaaaagttactcgctttttgtgtgatttacaggggagttgctggaagagtacatcctttcagtgacggggtatgcagaaatatcttccgtttctgctgtgaacgatcgggtatgtacaggttagaaccgttgcccacagctcaggaactcgaggaaaaatcaagaccttacacatgttcggattgtgtaacttgtcgttgttgctaatattgatttgcatattattttttcctttttctttttcttctcttttggcaaaagaaaaaattaatggggagaaagtatattgttaaacactacttcattggttgttagaatggcattagagaaagccaatgatgaataggcatttagattgttttgttttttgttttgtaatagagttcatttgtgtcactattatgtgattttttttgctgaactaaaaattggagattgtgtttcatattgatattttccaaggctttcctatattgcccaattacatctttttcatttatttattctttatttttaataaattgtgcaattttgttaataacaatcaactaaaataataacatgtaatctaatcgggacatctctttgttggagatacgattaggatcagaattaggaaaacgagtcaaataattagcaatttaatttagattcatcacaataattttaagaacacttatatttagttttatctactgttcaaaagacacaacaataaaaattgttgcagcagattcatttaactttgtagtttgagcactcaattattatgcaacatacgatatttacaattggactactaataaacttttcagtcgcagagaattaagttttttcaaccactaatagcgatttaaaataaaacaaaataaaattatgtcacacaggaaaaattaaaacactcaaagtcatatcagagagacaagactaattaattatagtagcaaaaatcgaatcgtaataacaaaatacaattctgatcaagccgcacgtatattcagggaagatcgtcatatcatgtcttattagagaaaaaagataacttcctgtaattttaaatttaggagcgtaaaatacaaattcataatatttattattttttttatttaaatatatatttttttaatatagtaattttaatatttgtcatgtgctacttgcctaataaatgcaagattccaaattgaaaaggggccaacaagatgagataatattgaagaagcaacaccatcacatgaaaaatattgcacttgccatataataataagtccaatatttgcttttgcagccattttggactgaaactatggtgagttatcttgaagatttgagttgatacacagttcttgaaagagtcacttcacttcactacacttcttcaactctctaagactttgaagattaagtatggcccaaaagtgacacaaaatgagatatttttgttttataaggtgaaaagggaagaaaaaaaggtcaattatgactaatgattcacattgcaaggaattttacaataagtaattgtatttgtagaagattaaaaattaaaataacacacactttaaattaaataatgctaaatacaattatgaattgacgaatgagagtataaaaaaagtgcaatagatgttaaagtgactcgaactgacaatcttttatagattattgttattggaaagatattatccttttaaattttagctttttttctagtttcaatgaattcaaagttcaaaaatatatatatatttggcgtaattaagattttgcatatagcatataggatattgttgtctgtgcttttaaacttttgaaaatttctgtagtacatttcgagttgttttggtaaattttttatttgttttagcatttaggaaagttttttagtttttttttatgatcacatacattgtagctatttaagagcaccagaaattttaagaaaattctgaatagtttataataccgaagataacgtgtaaatatttacttatcattcgtataagaaaaatacttatgcgtgcaacaaaatatgtagattttattttcgacattataaactacttgaaatttttaaaaaatttacatgtgatcctgaatagctacaccgtatgtgattatgaaaaaaatgtccaaacagataagcggtgcactgtaaatttacccttaacttttaatttatcgagactaatattttttttttaaaaaaaatatttttattctcttgggacaccaatcccttattaaagagtgttttataaagtcaaaatgtatttaaatctcaactaactttgaaaatcctttaggaacttcaacttgttaatcttctacatatgatatatatacattgaggtttgaataggtagactttcttcaacaccaatctggatgacaaaaaaagatgattttattttgtttaagagataataataatgtgagaaaattaattatgactcatgattcaattttgcaccaaaattttctaatcaatggtatttatagtgggttggtggttaaaataaacacacttgggaagaaagaaagaaaaataaaaaatacaatctcaatattggtttcaaaatataaaaaaatataagtagaagaacaacaattcatgggttacttattgttctctaacttaattctcttttccctacacacatgataataatgtaattaatgtacattaattaattagctaggattaaagaagctgactttaacaccagtttcaataacaacataaagcccagcagcaataaccaaaacacttagacacattcccaaaaccccaagtgaccaattgaggcaccaaatgggacttaatttcttaggcttcttaatcttaagccacatgaaacatgggtaagccaatgtgacaggcaaagcaagcccacctatgagaccggcaacacttcccaagaaaggcaaagcaacggcgatgaagaagcagaagaacccgaaaaatgccctagacaaggctctaagccaccaaggcattgccttctttttcttgcttgtgaacttagactccatgtcgtcgaatgtgggcattccatagatgttgaatgagcatagcgcgtttactatgacaaagaaacttgttaatcccaagataaagcgtgacacatctctcgagtggaattggaagagcgctgtcagcattccgccattggctggaattaagtggccgtatgcccaatagccgccaatggctagagggtataggcatgcagctatcaaagtgtatgagattcttactcctttccacattggcacatgtgaagggtgcttctcactagatggcattgtggcctgcatggattaagaaaaatattttgagtgatcacttaaattaaagtctaccgaccaatattaaaaatggcaaatgattacactatttttcagaatcggctattagatcggatagccctttaagaaaaaaaatatactagaattttattaaaacaatatgtatatttttaagagaaaatgaaaatgactttttgtatgaattaagtagaacatggggtttgaaaatgtcaaaaaaaggtggtaatatgaacatgttgtacattggtcaagaaaaatatgataaagaaagacatttattagtcatgtctttttcttacttttgatacggaccagtgattaggaacttgttaaaaacttaatatactttattaagtacttattaactaatatttatcataactaataatatcctttaaccttatcatttgaaactcaactctttgtgttgtatgagttgttaggtactacttacctacctaacaactcaaaaccaaaccaaactcccctcaagtttgaatttagagtatgaacaattaattaattaactaaacctacatatatagactttggggaaaagagtgcttatgtactcttatttgttttggtattccaaataatttttagttaaattctttctcatagtcatattaatttaagacatcttgtaaaattttaaaaaatttagaataatttaacacgttaaaaataaagttcaaacagtgtattgcaggtgcggttattttattttatacgcatgtgaaatagattgtttgaacactgctttctatattgtaaattattctgaattcctcaaaattttataggataccttaaataactataaaaatttgactaaatttttgttttgaatgacgaaacaggtagagatgcattgtaaaagctagcactcctagctagactttgtgtccaaaatttccatacccaataaataaaaatgaattaatatgattttaaaattaacatacctgaatttcaaggataagattatgacctctgaaagcaaaagcaataatcccaagagcattgaagacactaaaaatctgttccataacacttgcaccctccttaacaggatcataagagacattaggaagttttcccttagaaacagaaacaccccaaatcaaagtacaatagccaactgcagttatggctccaatgagtgaaacaccagcaattgagttcatattaggcaattgagacaacacaattgccacacatgtgaaaaccaagtaccattccactgtggtcaactcttttgcacaatctggtccacacactatttggaagaaactttttcctgttgatcctcctatgatgatcagagttgtacatgttcccccagataagtataggattgggaataaggcaaatatgtttgttaatctttctccaaatgttaggctgaatagttggagatatctactgtaacgcatgcctgtttctgatgattcatggagttgaactagtatccataatgtgtatagttgccatatgaatgctagtgttaggcatattgttccccatgtcctgaaaaatcacaccaatatattacttccccatataactatgtatacataagtctgtgttttacaaaatgtatcgatcaaactctttgtcgtgttaaatgataattcaaaacataactgatatattagttccccatgtaaatctaaattagtacaaaaaataaaagttaattaagcttacttaccatccaagaatagtgaaagcaagaggaagaacaagagcttgaataccaatcccagaacacaaagtatgaaaagcagcatagtactgattcccattcctagattcagtaattggtaaccaagcatcttgagggtcaagttttgtgagcctcaaagcctttctaacaggactccctaaaggggttatgaaaggtgttagaagctgtcttggtgtgatagacaatcttggtgttcttggtgttcttggtgtctttggagtcttgctttgagatgattgttgttgttgttggtttggtggtgggtgaccatctccatgtgcagctccatctaacaaaggtgatcttgataaagatggtgaatggtattgcgatggtggacatgacactgttggtgttgttgatgatagtcttggtgttatgggagctgagttaatctcatgatgattatttgtttctctactcatttttaaggtaaaggtttaagctttgctagagttgttagtttttctagctaaagctctctccttttttattgatctctatatggtttttgctttgatgaaaaaagctcatgcaaagttgtttatatatagagaagagtataaagagagagagagagagagagaggtgtttcaaggaaagagagttggagtaggtgtgagtatgtaataatgacatttaagaggaaaaggttcaatttttatagagcattagtatgactaataaataaaggtacaaactttataattatttgggtaaattatataaaaagaatcatgtaaggcattttgtttgactgacaatattggctgcttctttctctacctttcttccttcctactactccattgaattaaataagaataaaagattgcttaatttgttatgatacgatattatttttttggattattgtgataatgaaaaatattgtatgaatgaatgaagtggagtcccataatggtcaatatgatacttctgaaagagaaggtagtagggtctacttagtcttttaatatatcaatctaattttataatagtaatatggggttttatttcaactaccatgtgtggtattttttgggaaaatatttattgtttttatttttgaaatgaaaataaaaatgagcaagtggcatggtgcacaactgacaacaccattttatgtgtatataaggttggtggtggacattttagtcaataagggtggtctttatgttggtttatatagaagactagtgtaatatatggtcctcattataataataaacaatacacaagctttcatcatttgaacaatatatttaataagaataataatcatcatcgtcataataataataataaaaagcctaatgggcatgtactgttgagattattatggttgttaacataattaaattaccctctttgtttttttaggaaaaaaaggaaaaaaaaaaacaaagcaaaatgtatattttacacttattcgaaaagaaacactaaaagatattagtgttatttaatactctctcttatgtgtcgatatcaatattaatgtaatgaagtttcagatttcatataagtaataatttttagaaagtattacaagtattaatgaattataaaataagctctatctaaatgagaacactattaaccttattaatgaag

SEQ ID NO: 43167 - DNA, 2561 bp, Cannabis sativa
  modified_base (1329)..(1340): a, c, t, g, unknown or other
cagtagtccgtgggtgtaagggccagggcccaacaatgaagacttgaagcggggacgttacaatatgtattaaggaaatagagcaaagacagtgagaattaacattacaattagaaaaaaattatacaacgatcgcagtaataaacgatttttgaagaagaaaattacgaagattaatatataaatagagtagatagtaaaaattgaaataaattaaaaataataaaataatgagagagagaaagagaacgaggagaatgatcacttaacgagctcggtaaagtagaaatttaattattcaaattctatgttaatgccaatataaatttgaaacacatgcaattttacactattaattataacgggaaaatatatatgttaaaagcacaaattattaatcttaaataaattgaactttacttctaacttcacagtatatcatattatataccataaattgacaaaatattactattagtagaagcactaaaagacatataatataataaaaatacaaaaataattaataatcttacttacataagaaaaatattactcaacatgtaagatattattaaatttgaaaaaaaaaaacaaaagataaaaaataatataataaataaaatataaagatgaagcacaaaaaaatcaatatcaatatcgagaatataaagtataatatctacactctaactttattaatactactagtgaaacttacaaaaatactaaaatttagattaatttttacaaaaataccgtcacacggaaatcttttcaaaaatattgtgttttttattaaacaatagtggaacacaaaacagaacaagtaaaaataacagtagaacaacagtgaaaatttaacacagtacacagcataaaacttatacagtacttttgaaaaaaaaaaaaaattccttccaactgtataaaagtaaaaaagttagaaattttagtatatggtgtaattatccctattactctaattcacttatttttgtcactaaaataaataaaaataaaatagcagtaaaagagtagtctaaaaatcttatgctagttacaattaatggctttaattaagttgaatcgataggaatgattgagtgtggggaagagtggcataattggagacttggaaattacatttatgcatggacgtgctaaatttgttgagtaggttgtgaaaatatatgagaaattacattctatactatttttatattgtctttttttatttttactctcttttttaaagtctattatttttatctttttttttcaatattataccaatttttccactgtcacttcaagatactctccatnnnnnnnnnnnntgtcagagtattttgggtacaatatatataaaaagaattatgtttcaattaaatataaaattaaaaataaatttaattaattaataaataaaagtggtatttttcaacttaccccaaaatagacttgcacagctaggccaattcagcctttggataagttgttatgagaaattgggcttccttatgcttgaactgaagaaagcccagctactgaaaaggaactgaatcactaaattagattgctttagttaagagaattgggcatcaccttaattaaaaggagatggcacttggcccattaattgaaagactattttttttttctttttcttgccattgatatcactttcttgttacaaatttttaatttagcaccaaattatagtaaattaatattttataattaaaagcatgaaaataaataacttaattataattaatttatcattttaacacttacactgcaatttttcaaaaatatacctaaaatataaaataatttcaaaaataacttaacaaatctcaattacaataatatatttccacgtcatgaaaaaatactttaatttcaaaataatatgtcggaaataaaactaattccgaaaatctttttttttttttatgtttttttaactttcctgcgtttcaaaagtaatcttttttttttaaaaaaaaaaaaaaaaaaagcgtaaacatagtaagaatcaaagagttagacatcatggtcgttacaaaataagctaaccagtatagaaggtggatctaccatacctattaccttactgccaaaagcccatttaactacattatgggcagcaaagttaaaaaattcagaaataaatgaaaaattacaactagtcaaaaaatttgagagcattttacattgaagcacataattactaatactccaaacagtagaggttcctttcaaagtattgatcactgtttcagagtcgctctcaatgattacaaaagaatgcttcctacgaattgctgattccagggctaacagacatgttgcagcttctccaatgagaatgtcagagaagttgagaatattgctagccacccacaaaaattgactccttatgatctctcgccaaggccaccacacacattgggtcgctaccaactttaatgtcacagttgattttgacccaatcgtctggcagagggtgttggaatttattttaccaggatcttggatctactcacaagtat

SEQ ID NO: 43168 - DNA, 4927 bp, Cannabis sativa
  modified_base (1134)..(1135): a, c, t, g, unknown or other
attattccgcatttaattaatcacttaattaaataattaaactgaaaatattaaaatacggaatttcaagacttcttcaaaaagcttttcaaataatcattttgtgattctttatcactttgattatattaaaacactaacgaatattagtaaactatatattcacttccgagaatatacgaattgaattaaatagtaaatatatatatatacacatcttgtaacaataataatttaaaaccattaatttcaagaagtaataaaatatgtatatattaatttgcttctgacattactaatatacataaaatttatattttttaaatataatttcatgtctatttattctcttcagggaatgatatttaaatattctgaatgtataataaatttgtgttattttaaaatatgtgtacaattcacattctattcaataatcaaatttaattttacctttattataagtgtgtctgttctacaggtacgcgaccactattattcaattccacacatgatatataaattctatgcatgcactttgattgtatatggtatttcatcttctgattgtttctaattttttttggaaatatttgagtaataaatattaccattgattatttaaaattattgcattcatttcgggaaatagcgttgaacaagcagaatattattataaatttctgaaattaatgattttttagttgtattcacataaatacaatatttttgacaaatagaaaatatttacttgaggaaatatttgctaaaatctattgataatatttcgtaacataattaatatttttagtttttaatcactctttattatatagttaactaattaatgtaaataatgatatttgtattgataaaataatatgcatatatatatgttatgatttacctagaaacattaccattaacaagaaaaaattagttaaatattctaattttcttatataattataataatatggttttaatcaatctctataaataattatatattagataataattacataataaatttatataataattatatttgtattaattaataaaaatatattaatatgtcgcgttgcgattgactagcgatacttcttaaaagctattatattaaattanntgggacccgatacttagttgaactaatatcgatattgacacgtaggagagtgctaggcaccactagtgccttctagcatttccctatatttttttcccaaatctacttttagtcttaattagaggtaacaatttgtcatttgagggtgatatttgtcacacactcacactccacaaaccttcaaaaaaaaaataaaaataataattcacatgttgtcaattttgtttttttttgataaaaaataaataaataaaagagaaaaagaaaaagaaaaaaaacacaaagacaaaataagaacagagagggagaaagaaaggtgaagtgtcaattgaaggagaggatctcaaaaagagatgatgggcttcaaaaaatatatttttttattttatttggtaggggaaaagaccggcttcctgttttaaacaactcataaatttttaattaattattatttaaataaaagggtttttcttcttcttcttcttcttcttcttccatttcttctcaattctccatagttatctttcctcaagctctttctctggttcccttacagattcctttccattccaacctcatgtgagttctcttcttcttattttccttttcaaggtcttccttgttatcaattgtgaacttgtaatgaaaaccagttccgctttacgtgaattatcactgctttgttttaatggacgaaagaactgaatcaagttttaagggaatggatgtgtcatcttatgctctcgtttgattactttttgcatttatttttggtctctcaataattttccaactagctcactgtagctcagaactcccagttacactaatcagctggtgtatggtatggcttttattttcttagaggtttgtggagaaagcttcaaaactatgatatgggtcatttttgtggagccaaattattatgagctatttttaatttcgtgtattaagtttgtgctcattcttttcctctatatgtatagaaagcaagaacattatgcgcgatgtaagagaaaggcaaaactgatactaaatatccagttatggtgttagtgatcttctataaatatttttgatttggttaaattaattgcacatataaaattaagtttaagctaatgtacttaatactataaaatctgttggtttcaagtgctaagttgatttaagtatctgttcaattggtaacatacacatgtaccggtaacttctggagctgaaacatgattgttgaccattataagcaaagtatttgatgatattaggcgtttttgtttgacagcacaattataatctgaatctgtattcaggaactggtagatttatatatttatacagcaaaatgttatgcataattccatgaattcactgttcttatggttgacttcagggtctgagagtgcgatgatgagttatatatgttgtgactggtgaagatgaagatgaatgaagaatacttttctaactgcatgatgtcttgtcttgatatcaaatattataggagatgaaaattggttaaaataatttagaacggctagctggttatggagaatattgaaaggtaagctgtaaccattactctgttctctcttcttccctctctattatactaatgaatgccaagatcaaggatataaagtcaatagtatctaactttgtgtttgctccaatctttttgaactgattccaggttacctgagaaagccttctcgaatggagatgtttacattggaagttttcagggagcactgccacatggtaagggaaaatatacatggtcagatgggactgcttacgaaggtgattgggaagatggaaaaatgacaggcaaagggcaaataatttgggtgtcaggagcccaatatgaaggtgattttgccggtgattaccttcatggttttggtaccttcactggatctgatggctctatatatcgaggattgtggaggatgaatattgttcatggttttggaaagaaacagtattgtaattcagacatatatgaaggtacatggaaggaaggagtacacgaaggtaacggtagatattcttggaactgtggaaatatgtatattgggtgttggaaaggtgggaagatgagtggtagaggggttatgaaatgggcaaatggtgacctttacgatggcctttggttaaatgggctcagacatggatatggtatttataggtttgcagatggaggatactattttggaacgtggagtaatggtctaaaggatggtaaaggattgttctatcctgctggaagtaaacatccttacttaaagaaatggtgtagcacccgaaattcagagaatgatgaaaagaacttgttaccagaagaaaaacctcagagatcaattgttaagagaagtctctctgagaaaatttctgctggtggaattttgaaaagttcaagtcgaatatcacacaggggtgtgtcatttagagaaacttggagtcgttcagattcttctagagaatttttatgtaacgactcctcgtgcgcattgtcccatgcctatggaggaagtcaaaatctgtctcaggataacgacgcttctgtttatgaaagggagtacatgcaaggggttttgattaaagaaaaaattaggagccatgcagagataccgaggaaacaaaaagaacataaagcatttcatgcagatgaagtaaagaagagctcatgttacaatatttttgacggccattggagccagtatttaagacttaatttgcaacttggtatcaggtacgttgcctgttatattactagtgtgcacatgattacttattctattcaattgctgattgagattcattgtgtaaagaacttcatatttgtttttgttggtagaagtaatgccctatctttcattcaccctcaatcccaggatttaaataatttaaaacaataatttgaactactttgttgtattgttgcttcttcatgatattttctgcatctcctttagttaaaataaaaaaactatttacatagttctctgggattattactttactgaaattctttttgaagctcacagatatactgttggaaagattaccccagtgcctgtgcgtgaagttcgatcatctgattttggggagcgggctaggataaggatgtatttccccagaaaaggttctcaatttacacctccccacgattcaattgatttctactggaaagattattgtccaatggtgtttaggtattttccaatcttattaaaacgatgcaagcatatatgtatattgtttggttaaaagctacttgagatctacctgtctatatttcaattgaatagaacttcattttatggtcaaagacttatctaatagcttttatttatttcctaacacaaacaacatgctcattttacatcctattgtcttgaatatcttccacattcccattgtgtttgccatttgattgaggtgatgtgagttggagtcggagttgtatcagtgtgataaaagaactaacccttttttcacttttcatgttttatatgtgacattgctttgctttaggaggccaattagctttgaaaatttcggattcttgggttctgtagacagaaagaagaagaaaagttcaagaaaatattagtttgttttgagttcaagttctaggtatcaatctaaatgcatatggattgaaaacataatgtcctcaaatgtttatgcattgaagttgcaagagaaaatgaaaaaaattgtatgatgtgttataatttttagatacacttttatcaggttttcctgccttttcttttgtttgta

SEQ ID NO: 43169 - DNA, 641 bp, Cannabis sativa
atattctcattcagcttcaacattaatgaaatctatatattaaattaacagtgttcaaacttactgtcactatcaaacaaaaatattcatattactttgctttgctgagaaaaatttcaaaaagttttaaaaacaaccaatcaaaagagttgaaactgattgtgaaaaattcacagtatgatattaatctaagctcctacgatcgagacatcttgtaaacaagaccctagtttacagtgttattcaggttagaactaatagaggctgttaacaaggtgtttccaaattcagaaactcttcactttggcgagcttcacaaaacttattgaatggaaaatatttgagttttctgtttgagctgaatttcagctttagatttttggttttggccatctgatttcttctttatctgagtttttaagattttggcgaattaactaccacactcacttcatatgattacaacaagacaattatacttctatgaattaactttttttttcaaaacaaaaacaaattacttagaagaatagtcctcatgaagtgaggctactttaagacaattgcctataacttgatccaaagaagaataggccagaagccatacatatatacacagtcaaaaacaagtacaaaatcag

SEQ ID NO: 43170 - DNA, 3981 bp, Cannabis sativa
atgttcgtcgttcggccaatatggctgcacatgagttagcagttcgtgcactcagggtggatggcaaattagtttggatggatgattttcctccatttctctatgttgtaataaactctgattatattcaatgaaagttcattgtaataaaaaaaaaaaacaaccaaccaaaaaaaaaaagaaaaagttctccaaccccatcccaccgagtacccacccacccacctgcaagaaagtccaaaagataaagcacacgtgtcagaagatccttcaatcccatattctcactgcgtccacgtcaccccatttcatcacaactaaaaaaaagagagagagagagccgaaaaagcaatgagtagaggaatgggaagatagtagtagtcggcgccccatgtctttagatagccgaaccgaccaatcataacgtctctttcttatttattacactactactattctaatcttactcaccaatactatactcactcttcttcctccaaatttaagttactactcttcttttttcttataaaaacccctttcctttctctctggtttttcttttttttttttttaggttctagttgttatattttattagtagtttcaaagagggtgatttcgtttttctcccactaattcggttcttccgtgtataaatattttttaaactatatatcggaagattctggattgtaattttgttaggtttttctttctttctttctttctttctttttgagttgatttttgtgagaatttggtgtttttattgcaatttacactctgtgtacgtggtttaatcaaagtaatacactatgagaggtaccgcagaacaagttgtagttgagaagattgaagatggcgagaaggagaagaagaagaagcgccgatctggtcgacgatctaaacagaacccttctcctttcggtactttttttttctccaaaggaaatagttgttttgtttcttattcttaaacatgttgctctgcataattttattgtattttgtgaatttttgttttgtttttgattcagacatctactgcatagaaagtgaaatttatttgtctgggacatttcttttgttattattgttgttgtctattctataatgcttttgctagtttccttgtgattgaagttaggagtttataatttattatttttttttttaaaaaaacaagaacaaaaacaaatgaagaagctgggaattattactcaggtgctagattgttatcaaaactgtcctgtcaatgtgaaactaacctcagtgttaatttgtatgatttttgagttgaaatttaattttggacttcttactatggttggtttacttgtttacgagtgatggaagtaatgcaatttgaatggtgaaaggattttgaattcaattgtatctataaatttatagacaaaaattgacgtacagtagctgttcaattgtatcaatattattatacaatcttttttattcatctgtatattgttattactttttgggggatgggaaggagggctaaagatcgtactctggccctttttttcttttttgtaatggaaaattctggccattcgacttggtttgacaatcctattattacattaataaggctgttgttatatgataatatgtaggagaaggttgctggttggtacgacttaatccactgtcactgcccaggcttgcattctactgttaattttgtgttatgatgtgttgtttgtagcttattctggcatgtgataactctctccttctctcattcatttgttttgtagcattgggtaactcggcaaatcaaatacctagtgcagcattggagcacatgggcaatgatagagaaagtaatcatgtgaccacatccctgacgcaacataaattggagaacatatctctggatgaacatggattttccaatgcatctaatgttgcttttaattccatgcccccaatgcatattaatggaaaaactaatttaaaagatacgcaaagtgaacaaaatcagatgtcacaaccatccgatccttgtgagaaatcgttctcaaaatcttgttccaagcctgtcatatgtgaaggttcatctgattcattcatgaacaagggttttccttctccacatctgatggagggttgtgcgcaaaaggtcttttctccgcactattctttagaggctattaacgacgctttagaggtgaatttgaagccattcttctcgtttgttagcttatattcattctttcttttcagaaccatataaggagtatgttgttgaaaatgtaactaatgtgttgtttttaatgtttttttttctttctcagaaaggagatatttttaaagctgtatttcgggtcaatgcacacaatagacttgaggtttgtgacattctgtttctttacacacacacatatgtgtctttacttctattttcctattgtataatttgggggtggattgtgaaaaatgtttctttgttttcttcttgtaggcctattgcagaattgagggagtacctacagatgtgcttgttagtgggattgctgctcagaatagagcggtaagtcgggaagtctgtttaatttgttttagcgactagtttcttgtgtaatttcttttggtgattatatatgggtcaattgattagttttgacatgtgcatatgctgtttcaatgtttgatttaagatttaattcaaatttgtttgattaaacttatttataattttctcatgatgttggaaggctagtgtgccttggttaagattttgtttgatctgttagttttgtttttaatcagttgcttatgttatactctgtaattcgtttgggattatactagaaagttaaataacatagaagaagatgtgggagttatatggggtaacagtattaggggacaatccctcgattttcaagagttgggaattcacaaatttgtccttttctatgctactgtatgattggcagatgtggcataaaaacatcatggctgtgttatgtatattctagttttgtttatatttatactggccgtgtaggttgtgtaactcagatgatttatattatcttttatcaatacatatttgctatatctctctctctctctctctgtatcaagtaaatggtttatataaacttgatattcaattaccacctccaagaaatagaacctgatattctgattcagctaacaaactctcatctcacctattaatgagtggaggacatgacaatatctctagcttatgcgcagagaaatcatcattttttgtttattttaatctcataaatatatatagtttttaaaaagaattttttcttaggatatgtcatgttttgaaaggcggaagcaggttttgaggtgtttttccatagtaccgtgagacgtaagcctcgacaataagaataaaaaattcataaacataatatatattataaaattcataacaaaaaacaaataatttcataataaagtcattaaattcatgaaattactagctataagttttaaaatataactaaagttttaaaatataactaaaggcataaaaggttcaaaattaaaatcctaattaatagacaaatgataaatttgaagtctaaagtttcaaacataaagattaaaagacatattccaagtttcaagggagagaggagagccttgtatttgaagagaagggagaaaggagaagattatcatgcaaggcaagttgtggaggatgaggggaagtaatgaatgtttagggttttatttagttttgggcttttaaaatttacaaaataaaactcaaaattgctcaagaaaagtttaaaaaaagctcacttaaactcttttaaaaaggcccactgaaactcattagaaaaagcccattgaaactctttaaaaaggcccaaaacaactcaattagttgaggcgtaagcctcacacgtagggatgcacatttctcccacggggatggggccccgcggggacccgccc

SEQ ID NO: 43171 - DNA, 2499 bp, Cannabis sativa
taaagttcaggtagtttagccgccaatatccaataaaactaatatttacgtggcatgccacgtaactttcatctagtatattaaaatatgtcgctaaaatttttgcccacattaggtgctcgttagtataaattgaacaaaaataaactcaataaatttttaaatttaataatcataatattttaaaacaaaatttaacaagtttaaaaaatcttaattagtctttaatttattaatttatatagaagaggtgtagtttacattaaaaaagaattaaaaattattgtacgtagttataattcatatatgagctgtcataataattaataaatacttttagtaaaatattcaaacttatatattatatgggtaaattaatattaaggttataaacattaaagtattaatattaaaacatatatataattatactcggtcggccttggtttttgtttatttatagtaagtggagcatctttgtaagacaagttagtccctttcatctcatatatattgtcataatcataagtaaatactaactaataactgcattaatataaaaatgaacaaacaaacaaacataagaatagttaatatttgtatgttaagatattacgaaattatatttatgtgtatatatatacatatattatatatactgataattgattccgtaaacttatttatcttgttatcataacatattctaattagtgatttaaggaaatgaattgaacaaagtcagaattagctatatattttatttatttattttttttgttcagagaagtttgatctcatggcttaaaattagtatgacttgaattataaatttccaattttttttgtcttatatttggttgaatttataattgttattcttttaaaaccaaagctggggaaaatacatatccaattcaaaaataatatgaatcccattgtgcaagtctacctcaaaacataaattatggttgaagtcatatatatatatggagaaaattttaattcttacatcaaatatgtaactatgatggttacatttaattttaattattggatcattattgaatagttgcgaataatttaaaattaaataaaaataaataataaataacctataacctaatagtaattagatattttatttctttataaaactataattaagattaattttatttaaaaattaaattaattataattatcaatttatttttgtaatttgaagaaacaaatctttaatctattaatgttatatcaaaaaaaaacatttcaacctctatcatctttgtcttctacgttgttcatttgtatgtggagggttttttttatcttttaagaatatttttttggcatgagatattgaatgaaacaaacaaaaaatttatattcacaaatgagtattctcaaattaatcaattaacaatgatataataaatttttttaaaatgataatagattaatcatcactaccaaaatattaaattgaacaaaaattagtttaggtagaaactaaaaacgatattagcactaaaaatgacatttcattattataaaaacatataatatctgaggtagattttaagacacaataaaaaaagctattagtttatgaaaaaaagaaagaaaaaaaaggcaaagattttttttgaagaaaaaagtaaagcaaagtcaataattggtcttaatcttccccgttatcaacttccttcgacactgacaaaaaaaacaaccaaaaagttctaatcaccgcttccccccaaaatcacttattctttcttactcttaatttttttctcttttttgtttacatttacactaatacaattcctttcctattaaattaaatctaaatatgctataaatcccttttaattggtggatagaaatgcaaatctattaataaatgacacataaacttaaaattaacgatcataacaactacttaaaaaaaatcaatcttaacagaaagataattttttcttattgtgaaaactttagggggattttataatgatatgtaaagtttatggggtaaaaattgaatatagtaatagtttaggggtataaattttatttattttaaatattaattactaaaaaaatcttattaaatatttaaattaaaaattaaatattaatttattaattctaaaaaaaaaaaatttacttattagtaacttattattacaggtaaaaaaaactgtaatcatcatggttacattaaaatttgcaaccatttaatagtcacacacatatatatatacgtctatatatatttaactcataattctaataggtatgttatgaaaaattgaaaatgatgttacatttaaacactatttttattcatatatatatttcttcaaaatatatttatgactatataacttgttgttccttttttaaatattacaattcaaatttaaacttactatgtatatatatatcttattgtttatcttatattaaaggttaattaagatttttacccctcaa

SEQ ID NO: 43172 - DNA, 2568 bp, Cannabis sativa
atttttttgtcattttttttatatttttatgaaatactgtaaaaatgtataaaaaaaaattttgaaggtaactttgtaaaaaatttattatttatattttcttttttaaccaaccgtgtcatgtaacgcatattcagccaaaaaaacgtataatgtaacgtacatttaacgcaatgaaacatctcaatagtcgagcggaccttacgttgtctcaatgttagaggttgaacttgaagccctcttaaaggattagataatgtcaagagaaggaatttgaccaaactatgaagtttatgatatgaacaatgctatcaaataattattaaataaaaaattcgatactgaattgtatattgcatttataacggtacatgaagctattcctcttttttaaatttggttacattacaatagagactacaatgtttgttaatgacgttttcaggagaaagatttggaaaaacaattatcatacttataaaattttctccaaaagattggtactttcgaaattagaaaaacaattcaacaaaagtttgagttgaggaataagatcaacgatggtacaatagagaggtcaaaaatgaaactcaaacagcacattcttttaattttatattatcattaactttaagtagtagtagtagcatataatgatatgcagaactcctctggcagtggggttacaactgctgtatgagccattagagattttatttgatgcttgccttggaaatggatgacgaacatggcccggcagatgtcataaatggaattcctttgaatgtagcaatacccttttcatcagtataaagatgctgcatccatgagtcaccattgattgattatacatccaaaaaccatacttaccagaagaagtgagtttatgctacaaaaattcaaagcaaattcattgtttgttgagcaaacataccggcgttatcttatccaactgtttcttttttgggttaagaacatcctctggcttcccatcgatcctgaaagaagacataaaataaaagttatatatgactgtttatgaattctaacaaggataaggatagtgatcgcaacaaaatatacgctattggtgaatgagcaaatatacaaatttgaaccgagcgatgattaatttgaatgaaagatgcaatttacacgaagttaaaaaaagataattggaaattgttaagtgagatttgcttgaataagtaagagccaatttggaaacattttcaatgtccttgttagtctagttctgcagtgcaatagtgttgaaattttaaagaattacttccttcttctcccttgttagttattatgagcttgcatatgcagctagtgcagctttcatcattcttggtttaatttagaataattaccaatttaccatcactgaattacaaatgttttggttggtattatatagcttcgagaaaactttattaacttacccagaaaatgaaatacactccccaactttggctccttctggaggttgtaaaggctctacaatggtgtgatcatcatttgaagcacataatacctgcatgcatgagttgaaaccaatctcgtaactatgcatttacttgtagaaaaaaaaacaacttagcggtttttaccatattctgagcaaaatatagttgaagctacaaaactttggaaaagtaaaaatgaagtataaataaagaagtgcaaaatatggtaagacaaaccaaacaatacaataaaaatttgaaaaagatgtataaaataccaatccttctgacatcacatcacgcagcttcccaggtttaacatttgtaataagcacaaccaggcgattctgcaaacaccagaaagtcaaatgagaagtattagccttatgattcacatactgagcagttgacataaaataaactagaaattggtttaaaagaaaattttcaagtagttttgatgagaagaagacaataagacgtactgttaattgttctggagtgcaaaactttgctaaaccactgaccacttgccgcaacttaccttctccgacatctatctcctctaccagtaaactaaatttacacagacaaagagttgtagaataagttcaaaattttgcaaactacaaactttacaggaaaaaagaaaaggaataattggttttgcctccgctggttatgtgatacaattacgacactgatggacatccaaaggaggtaaggtgggaaaatatatattagataaagtgaacgggcacattggtaattgttgtgagaagtgctaaggggacccatggtgtctagcacccttgtgaggtataatatcactattggtgtaactcaatatcgagtcccacttattttactttaataaatattataaaaaatcactaatcaattatagtgcgatcataacatgctcttttggtttggatagtgctaaattttacctattatataaatgtgtatctaacagaatttgttgtgtcaaatccgttagttttaagagagactttaattaaactgttaaaaagttaagttgtaactcttcaaaaaatgataacttttcaaatattgcaagtgtctcttc

SEQ ID NO: 43173 - DNA, 1278 bp, Cannabis sativa
aggcgctgcagcaacagaactctttgaaggtgtaactccagccgctgcctccacatcctcggacgtaatgcgcccaaatggaccagagcccactaccgatttaatatccaccttatactgcttagctagcttcttcgcataaggcgtggccacaatcctcctgggcccatcagaaggaggcggaggaggaggcgaagactgagcaattggagcaggactcgaagccggaggtggtgaagagggcgaatcagaggcggaagttgtagcagcagcagaggaagaaccggatttcgatgctgctttcgccttagcctcggcgatttcttcatcagtctcagccaacaacccgatcggagctccaaccggggcagtctcaccttcgccaacgacaatcgctgccagaattccatcgtagaaggtctcaacatccatatcagctttgtccgactcaacgacgacaacactctcgcccttggagagaacatcaccctcggacttaatccaggaaacaatcttgccctctgtcatggtggagctgagggcaggcatgaagatctccctgatcttggatttgacggtgaagatcctcctgcgggatttgacaggaaatgcggcggaagaggatggagtggagaagcgccatgggagggaggtggagacagaggaagagaaagaaatgggtgcagttgttggcttagcaaggaatggagaagccatgggtgtgtgtgtgagagagagagagagagagaaatgtggttagagagtgaaatgggagagaaagtgatttaagaaaagagagacggagaagacgagggaatgcagggcgcagtgtgtttaaactcttgtttacatcgcccgcattcccatcctctttttgtttactcccccaatttcatttcacaacgttagttacaccttgcctggcttttaggactgtttcacaaaatacaattttataataatttttacttgatataaaatatatatttttaatttatattattttctatcatcataaaatactctaaaaaaagattaagagtaactttttttttatgaaaaaattaattttttaaaatcaaacaagtttactttttctaatattgaggtgcaaataaaactcttataaaactcctatttttaaaacaaaaaaaagttcataccttgaatactgaagtgatgtttgatttagtataatagtaatgataatacagtagaacctctatttaagaataccctattcaagaataacctctaatttgttataaaaaaatcaag

SEQ ID NO: 43174 - DNA, 2504 bp, Cannabis sativa
aagccgcacctcaacatcggaacgatcggccatgtcgaccatggaaagaccactcttaccgctgctttaaccatggctttagcttccatgggaaatagcgctcccaagaagtacgacgaaatcgacgccgctccggaggagcgagctcgagggatcacgatcaataccgctactgttgagtatgagactgagagtcgtcactacgctcacgtggattgccctggtcatgctgattacgtcaaaaatatgattaccggcgctgcacaaatggatggtgcgattctggtggtctccggtgccgatggacctatgcctcagacgaaagaacatgtcttgttggctaaacaagttggggttcctaacatggttgtgttcttgaataaacaggatcaggttgatgacgaggagcttcttgagttggtggaattagaggttcgtgagcttctttctgcttatgagtttcccggtgatgatgtgccaatagtttcaggttcggctttattagctttggaagctttaatggcaaaccctaagcttaatagaggagataatgaatgggttgataagatttacacgttaatggatgctgttgatagttacattccaattcccaaaagacagacagaattgccattcctattggctattgaagacgtttttacgatcactggtcgtggaactgtggctaccgggcgtgttgagaggggaaaagtcaaggttggtgatagtgttgaagtagttggtcttagagagactagagccacaacagttactggtgttgaaatgtttcagaagacccttgatgaggctattgcaggtgacaatgtggggattttgcttagagggattcaaaagattgatattcaaagaggaatggttattgccaagcctggtaccattacacctcataccaagtttgaggccattgtttatgtgttaaagaaagaagaaggtgggcggcattcgcccttttttgctggatacagaccccagttttacatgagaactactgatgttactgggaaagttactggtattaagaatgacaaagatgaagagtccaagatggtcatgcctggtgaccggattaagatggttgtggaactcataatgccggttgcttgtgagcaaggtatgagatttgctattagagaaggtgggaagactgttggggctggtgttattcagtcaattattgagtgataggaacaagtttgtcatattgtttgtttgtcttgtctgttggttgaatcagcttttgtgctcttatagtatggtttagttgagtcaagttttcacagaattagatgctacatttttgttgatatgttatctcttttcgatgttgttactgtaatagttttggccttgtagtattagacatgtattcctttttcatttctgtatgttggtaatgaggaagcttttttaccaagttgtaggctttttctttctgcatgaacttcagctacaaatataagttcttgtctagcttacgaatttttagttttctcaactttcggttactcacttgacatataccaaattgtatttctgatattttctgttaaaaatttctaaaaaattgttgaattcaagaatttttgttcaattttacttatggacatataacgtagaaattgtttatgtaccaaatcgtacccctcaaacttctgtccacgttaggcgtctgttagtttaagtgaacagaaatcttaaattacattctcaatagcttaaggggaagatttagtacatgtcgtttagggttaaaatcctaatttgtcttattgaaattacacaatgattatcttgctaagcactttcttagtattgatatttgaaaacatgatcatgagactggtagtttctcatagctagtattccacacgggagttcagttattaccttttcctccatgtacacaggacatgacatgatgatgagcctctgaccatgagaatatatcatcttttgtttaaatttacaaaccaaacatggtcatccatatggaaagtaagcaaagagtaatctcaaagaaatcaggtccctactcatggtctaaaatgtagtaagtaaactgaatcaaaattctggtttcaatctagttgaaatttgcagactgcattttctgatacaaattatagaactaatctattattttgtttctcctctgaatcgattacatagggccggtattgctaattttaatgtctcttacatgcttgagtaattggaattggtggatcagttaatgaaccattgagtatgcggttagcaacccactgattcgcagcctgagagtagtgtacgccgtcccaactgatagctgtagaagggttttcacaagcagaaccgaacactgcacttccattcaccagtgatttcgttccacaccagacatggtcatatttgacatgataaccacagcacacctttagtggatcagtaaatcctgcaataacatgtttatgaaataattaagtttctaataatcaattttc

SEQ ID NO: 43175 - DNA, 2351 bp, Cannabis sativa
tgttagttagggtgttacaaaagtggattggagcaagtttgtatggaactgttttaatattccaaagcatagctttattgtatggttaacgatgcttgggaaaatgaaaacgaaggaaagattgaagagatttggggcaattgaagaggatggctgcctgctgtgtaataatggcagcgagactatcgaacatctcttctttggttgttagtttttgaaggattgcttgatacaaatcaagcaatagttgcattggaggacttcgacagcaactttgaaaaacatcagcaagtggttaacaaaggcaaaatgcaacaacttcaaaaagaaagtctttgtttctgccattgcagtgttgatttatttgatttggagcaaccgaaataatggtttttggaatggggagatagaaaattgtgatagaattgtatacaaagttaaagttgtcattaaaaatagaatagtttgtatatggcccaaagatgtaactagtagtgaagagtgttggtttaatttattgtaagtccattgtaaagattatagatttagaattggaggctctcctcatgagggtgctcttatgttgtataaattgttgtttggttataatacacttgctgattgacaaaaaaaaaattaaaattaataccatatatctttatttgaattatttttatgttgaattatttgtttttaattgagaaattactttgtggtaaatttaaaataaaaaataaaaaatagagaaaatgacattaaaaaaaataataaaatattaataaataataatattaataaagtgtaatattttcttaatcaaactaaatttaatttaatattattttatttttaataatttttatgatattttctatttatatatttagtttatttagttaaaaaatattaaattaatgacatatttatatttatataaactttccattttttctcttttgtaaataacccaaaaaaactattctctaaaaataatgtcaaacacacctacttcttcccaaagaataatgttctgttttttaaaacaaaaacatttttttttttaattatgatgccgaataactactttacttttcaaaattttaaaatgtgctatttatgttcaacattggttgtcgttttattgtcttgattcatgtatcatgtcgtttaacgttttctctatctaaaaatatattaagcacgttaaaaaaattaagttaagaaacctaatcattcaatgtaagccaacaggataagccgaaaagaattaaaaatacattattaactaacaatcagagatacaaatgatcataaatatggatataagatcggacggtcctcatctaaaacagagaacacgcgtttctactttctattgtcactgtactagagtagagatcccaacttgacgactcaagctggtctccgcagctcgtgcgctcggaaactacacaccaggaacaaacaacaagccatgtcagcctccgggacatcgggtccgtacccgaacccgacccaaccccactcggaccaggatcggaaagatcaacccatcgggacgcaactccccggcttccctcctgatccacttcttaagcccgggtcctttatcggcgccaccactaatggccaaagctcagtcgacttcctaaaggcccagactcagatggccgagacacgcaaatcttcgaacggcgtctccgcttcccctgacaatacgaatggaacggtaccggcttcgaattctgggaaaggaattagaaagccgcttgaagcggagttgtattggctgccgcctggctggactgttgaagttaaagtacgggcctcgggtgcgtctgctggtacgactgatagggtgagtttccgtagcttttattgttgttgttaagtaagaccacacacacacaaatgaagatagaactctgtgtattatttgaatgtaagaatagaaaatggaagggaaaggtttgttagttgatattaggtagctctgttttgaacaatgattatttaaagtttccatttgttaaaatggctctagagcacaatcaaccaactcggaaattcagaaaccaaatgtcaagaacacaatcaaacatactaattcattattccagattccacaactaaagctatggtttttattttattttttaggctgattgttggtcttgatctttcttggttttgtgaatttgtcgtatgcttttcttaatgaaatgtcctcaaaagtgcgtttgtgctgatggttgttttgggtaccacaagttttagtatgatacttgagataaagggtacttctatatgtttaaagtcaattacattagttatagggatagactagtgta

SEQ ID NO: 43176 - DNA, 2466 bp, Cannabis sativa
tataatacaattcaatataatataatacaatatattacgatgtaatatgacataccaaacgaactttagtattattcaatacaatattatatttggtattcctttgctcttgatgattcggtggttctggggagggactttgtcgaattgggggtgtgatacgggatatggcatgtgtggtttgattagcgtggtcatttggtgtgttagatgatttttttgtgaatgtgacggagctacttgcctttcgtttagacatgactattgcgcttcaatataatttcagtatctctgtgattaatagtgattctactgtgactattggttaaattaataaaagtcacataaattttagttgttagtctattttattagatatttaataattattagctgctgttggtggtggttcttgtagcgccatttcgtattcaacgaatggtgttgcccacttgcccacacactgataatctctattattattttaagagaatgtatttggatagatacttgtccataattaatctatctttacaataaaatgtttttttaccataaacatagtatttgtaaaagttgaatctaaaacacttttcttaaagaaagacagtgaactttgggaatgttgttggcaaaagggaagatattttactcttaattaattgaattaacaatttcatataagttgatggaagatttaataagaacaaggtttaataggttagaaagaatccattcaaccattgattttcttccactaattattattattattatattgtgtgcagaacttataccactatatcatgttttggttcattttatgttgaattgatggatatgaagaattagtttttaattattattgtatctcggaaattgacaaataacacggatgcattttagaatatttaggctcctttttggttgaacttttgtgtttcttgtctttttgatgattaatataacgattaaagtatttcatgcatgaatttcattgataaaagtttataaatgtatgtagggcatcatcacctctagcagatctaatggaactgtaaagcaccacaatggtgctaaaattcactacaatcgaaccacaaaggtaacttaatgatgtggtgttatcactgtattgccacaatttttctttatttatattaattgtgttataatatcataaacaaataatttttcattaaattaaaaataatatataataataagacatttaatttttagagttgtagtttgcataaaaacaaattatagctttaaaattttacatatttcatgtaagtgtaatagtaaatgttaatccaaaatgtttcgattcattgtttttaattaataagaaaagcaacacccacaacgacctaaaatttgaataacataatttgtttagaatcaaaggtgtgcgtccaaattaaagcatttgagtaagcctagagtcgattgacaaatagaacccgactctgctgacaatcaattctcgtgaacaaggaactaacttggctgatatatcatattgatctaagtgatcaaattagcaagtttgtgctcaaataattgctaagtcagttagagttagactaacgcattacaattattttcctctaaaaataccaaatggtataaatatgtaaaaaggagtgagaaaagagtgttgaattctatctcaaaaaagttttcttaacttctttttaagatttctctatctaacttaagcataaaattttttgcaagaaaacatttcgatgtttcagcctaatccaactaaaaaagacaatagaagcttggagagatggagatcttcttaaagcgagagtcgccattcatctattggagatgacctaaatatcttatacattctttaaactctattttgcagctatttctattgtttaactttggttcaagtcttaaactaactccaccactccataaatgatacaagtttgcttagagcatctctaatggtacataattttattaagttagtatgaatttttcacatcatttactctaataatataccaaattatgtaccaaattagtatatactaaattttacactattaatggtgttgaattttgagtttacaccaatttggtgttaaacttttgtattttggcattctagcccttattttaatttattttaaaaattaatcttacattttagttctcaaactaaaatttatcataaaaataataattaatttaaaacattaatatgctagaaaatacaaaattacaataacaaaaatattaatattaaataaaaataaaaacaacctaacactaagttatgaaactaaaaataaaatattaagtaaaatagtaatttaataaatattacttgtgattttattcaagttttttttttcttaaaaaaatgtataatatttaatcgatttaattttaagtaattttaaaatattaaatttttattagtagtcgtga

SEQ ID NO: 43177 - DNA, 9303 bp, Cannabis sativa
ggttctgattcaagatctgaggtgaatttttcgttaatggagtttctttgatttagatctgtttacgtttttcattgttacattttcgtttcgtgttgaattgtgtacctgtgctgttatggagcaactgtaggaaatgatttatatacgtgtttttgtatgagtgttcatttctcgttctggtttctttgtggccaaaatagattgagaaaattatttccagatttgattaattgaaaaattgaaataagttttgatacgatttggtttgatttggttggttttgttttgttctagtgtgtagagtgaagatgttgacgaagtttgaaaccaagagtaatcgagtgaagggtctcagcttccatagtaagaggccatggatccttgcgagtcttcacagtggtgtgatccagctatgggactaccgtatgggaactttgattgatcgatttgatgagcatgatgggccagtccgtggtgttcattttcacaaatctcagccgctctttgtatctggaggtaggaattacattatgatcttcttcattctcattttgtaatgttcaattgcgaagtttactgcctaatcatatcttttcttttcgttggtaattctaaaggttaatagtacgtagtgtgattgttgaataatgctagatccatgttttggatctctgctgggtaggtagaagtcattgcttttctaagtggtgaatcaaagtagtgtgtatctttagagtcattttaacgattcattgatcttgattaagattaaggttggatagcgctgtggtggagagataggaatgatagatgttgtagtttccctaaatcccttgttataaatgttatttataataacaatagctaaaatggtaaacgtgttaggcttagggaaaaagaaggaaaccattattctgataaaactcatcaaatctagtggttggtccaagctttgaattcctcataggaacacctaatattaactgctgttatagttttttgctcccccaaggtactgtagaattacgcaaggaagcttacaataaagaagaaaaaatactgatgaatcccacatcaattctagtggttcctgaaattagttgatctgataactgtttcttctctagtctttgtcctcatgcaatccatgctctgctcattgtgaaaacttaactcattttattttcttcttcccattggatagggtggtcatatagatagtgctgtttataaattatatatgttaacaagttattgcttctttttcaggggatgactacaaaataaaagtttggaactacaagctgcataggtgtctttttacacttcttggacaccttgattatattcgtactgtgcagttccatcatgaaaatccatggatagtaagtgccagtgatgatcagactattcgcatttggaactggcaatcacgcacttgcatttcggtattaactggtcacaatcactatgtcatgtgtgcttccttccatcctaaagaagaccttgttgtgtcagcatcccttgatcagactgttcgtgtttgggatattggtgcccttagaaagaaatctggatctcctccagatgacatgctgcgattgagtcagatgaatacagatctttttggaggtgttgatgttgttgttaagtatgttttggagggtcatgatcgaggtgtcaattgggctgcattccaccccacccttcctctgattgtttctggagcagatgatcgtcaagtcaaactgtggcggatgaatggtattcatatgatggtctatttgaccaagtaaaaataaaatttattttcatttttttctttctttccttttagctggtcatttctctaaattgtgttctctatctgatcatgtggtggtgaattaatgattactagtggttatactaattagttttatatgatgctttttatacttggtgaggtagctagcgtctacctttgaaattcttctatgattactgactgaattaagatgttttgtgggttctttttgctgtttttcagacacaaaagcatgggaagtagacacattgagagggcacatgaataatgtttcatgtgtaatgttccatgccaaacaagacataattgtctccaattcagaagataaaagcatccgtgtttgggatgtaacaaggcgaactggggttcagacatttcgcagagagcatgatcgcttctggattcttgctgctcatcctgagatgaatctgttggcagcaggtcatgacagtggcatgattgtctttaagttagagagggagcgaccggcttttgcagttagtggtgatagccttttctatgttaaagatcgattcttgcggtattacgagttttcaactcaaaaggatacacaagttgctccgattagacgccctggttccactagtttaaatcaaagccctagaactctcagttacagttctactgaaaacgctgttcttatatgcatggatgcagaggggggctcttacgaattgtattccataccaaaagacaacattagtaggggtgataatgtacaagatgcaaagagaggtgttggaggatcggctgtttttgtggctcgtaatagattcgctgttcttgacaaaagcagcaaccaagttctggttaagaatctgaaaaatgaggttgtaaagaagagtgtccttccaatagctgctgatgctatattctatgctggaactggtaacttgctgtgtagagcagaggatagagtagttatatttgatctccagcagaggcttgttcttggtgatcttcaaactccctttgtcaagtatgttgtttggtctaatgatgccgaaaatgttgcattgcttagcaagcatgctattataattgctagcaagaagcttgtgcatcaatgtactttgcatgaaacgatccgtgtaaagagtggtgcttgggatgacaacggggtatttatttacacaactcttaatcatattaagtattgcctgcccaatggagatagtggaatcatcagaacccttgatgttccaatatacataacaaaggtttctgcaaataccatattttgcctggatagagatgggaaaaacagagccatagttattgatgcaactgagtatattttcaagctgtccttattgaagaaaaaatatgagcatgttatgaccatgataaagaactcacaactctgcggacaggcgatgattgcttatcttcagcagaaggggttccctgaagttgctctccattttgtgaaagatgagaaaactcgttttgatttggctttggagagtgggaatattcaaacagctgttgcttcagctactgcacttgataagaaagatctttggtacagattgggagtcgaggctctgcgtcagggcaatgcaggtattgtggaatatgcctatcagaagacaaagaactttgagaggttatcattcttgtatcttgtaactggtaacacagacaagctatccaagatgctgaaaattgctgaggtaaaaaatgatgtcatgggtcagttccataatgctttgtatttgggtaatgttcgtgaacgcattaaaatcttggagaatgttggccacctcccacttgcttacattacagcttcagttcatggactccatgacattgctgaacgtttagctgagcaattgggagataatgttccatctttgccagaagggaaagtacctacccttctgatcccccctactcctgtcatgtgtggtggtgattggccacttctaagggtaatgaaaggcatttttgatgggcatttggataatttcggcaagggagctggtgtagttgaagaagatgatgaagctgctgatgctgactggggtgaagagcttgacatggttgatgttgatggcttaccaaatgatgtcactgcaatatctgaagatggagaagctgttggagaaaatgatgaagagggaggatgggaccttgaagatttggagctaccccctgaagctgacacaccaaaggccaccaatgcacgctcatcagtttttgttgctccaactcctggcatgtccgtgagccaaatctgggttcagaaatcatcccttgctgctgaacatgctgctgctggaaactttgacactgcaatgcgtttgcttaacaggcaacttggaatcaaaaactttgctccattaaaatccatgtttcttgatcttcaaactggcagccattcctttcttcgtgcattttcatctgctccagtgatacctttggccgttgaacgcgggtggaatgaatctgctagcccgaatgtgagaggccctccagccctcgtctacaatttctctcaattggaagagaagctcaaactaggatacaagtctacaactggtggaaggtttaccgaggctcttcgtcttttcattagcattctccatacaattcctctgattgttgttgaatcaaggagagaagttgatgaagtcaaggagttgatcattatcgttaaagagtatgtgctaggtctgcaaatggagctgaagaggaaggaacttagagacgatccggtccgccagcaagagcttgctgcctattttacccactgcaaccttcaactgcctcacttaaggctcgccttgcaaaatgcaatgactatttgcttcaaagcgaagaaccttgctactgctgctaactttgccaggcggcttttggagaccaacccgcctaacgagaatcaatctaggacagccaggcaagtgttgcaggctgctgagaggaacatgaccgatgcttcagagctgaactatgacttcagaaacccgtttgtgatttgtggcgctacatacataccaatctaccgaggacaaaaagatgtttcttgcccgtactgtacttctcggtttgtaccaagccaggagggacagctctgtgctgtttgtgatcttgcgactgttggagctgatgcttctgggttgctgtgttgtcctgctcagattcggtaaactgctagaccagaagaatttgtcaaccattttttttttctgctcatcatcatccttttggtagctgaggcaatggcgtggtctcattcatatccgcctatgaaaggtaagaaatactatagaagagttaaatttcgaatgaatcattggtgcttaatctcgcttcttctttttttttttttggttttacttttcatttcttatgggattatcctttaattagttgattatgattttcaatgtaataaaagtttgagaattttgttataggctattcttgttagttgttcataagcaagaatggtcatccgacatttttattactgtaagcaaaatttgcgtattttctatgatgatttgtgttaccaatttgttgttgttgttgtttaacatgattttggctcgggtttattataccggttcaattatttttaacatgatttttgttttggtttgtgtcatataaataataataataattcgattgtttatcatgatatggtggcttaaattttgttggggatatttagttggaggtgataaataaaatggaaggaattcattcctattcattttcatttctcctaatcaaaaaatttaaattttaatgagaataaaagtgtgtttagtcactcttgctattgctaatagtaagatacaggatactatttgaaagtcccatttattagtattgatgattgttaattacgattttctatttgaacctttttgcttatgtttttacatgtttttattctaatttattttgtataatagtgtttgttatagttatattatctcggtacattcttaaaaaaattcaaattgttttttatttttaaaataaatttgaaattttttgaactcgagtagtgaagggtatacatcaggtaagttttaatgggttttgagtttctaggttcgaattttataattttgggatcgagcccagccgtatgtaaattgggtttttcgggtttcgggtctaggtgggttgggacgggtttgtttgggttgggttacgggttagggttggcttttttttttttaataaaataacacaattatacaatatattattatatccacatattacaaaaattatcacaataacaatttaacacacactcacaaattcacaattaaaaaaatatatttataatataattatacaatatttatacataaaagataataaataaataaataaatactaaccggtttcaattgagttttgagttttcaaaaatattaaacctgaatctgactaggtgcataattaggttacacccgaattcaatgtactaaaattgaaatttggtttttttaggtttttcgagtttcaggcttaaatgtgcactcctagtaaatttatcaggaactctgttgttatagtataaattgtttttttattttgaaaattataaatttagtatggtaactataacgaacattgtgaataaacaaaattataagagaaagatttttttatttgttttcggacgctgaggttatgaaagaaattaaaataagagcttatggtagaactaaagaaaagagctatgaaattggttttcttaatttttaatttttaatttttttggtggtaatcggtttattttgatcaaatgactaaagatagtctctcattacacttatgttgcgtttggtatatatttggtgggttttagttgagaggggttgaagtatgtaaagagtttgagattaccttcaaaattaaaacttaaaaatgggacccatataatcataaacccctcactaaaaatataccaaacatacatttggtcttacacttgtggaattataaatacgtttttttttttaatatatgcattattaatagaaaaaattaatgcaccttctttaaaaatttacccgtttatcaaatttctaagagtatttctaatggtattatattcatgctatttactatgtttagtatttgaatattttattaatactaatttgtatttgttaatataaattaattttagaaaataataaaaatataatagtgtttttgattaaaatactattaattttttttttttatcaaaaatgtaaggagctccttacatttagagagttctttattcattttttattatagagaactattttttatgtgattggagcttatattttcaagtcttaatttgtaccacaatatgctaacattttcctaactacccaaaatactcatgccattttaaattttccctctcactctaactcttgctctttctacccccatttcccacctcttcaacccaccaacgacctactctaccgttcgaccattcgatgacctaaagcccccaaccgctgccattccctcattgtcaacccacctcctcaacgaaatgttagatttttattattttttgaaaaaaataaaaattgttatttaaagaatttgtttggtggatttagtttaatttgatcattatatgtattgtgatactatttttcttggaattctgtattttttttttaatttgtgtttgtttgagaccttagatggtgttgggtacgatttttcagccaaaatatagttatcgatagtttttgtctatgtaccactattttgtgcacaaacataaattatcgataaatatcaaattgataaaacacaaacagaaatcattgataaattgtcgataacttatcgataaatgttaaattgacaaaattcaaacataaatcattgataaactatcgataacatatcaataaatgacaaattgacaaaactgtgttacacaaacataaattatcgatcaacacattttggccagaaaacatcataaccaccactatctaaagtcttaaacaaacacaaataatgaaaaaaaaaaaatataaacaaaacaaacaaacaaacaagcacgaagacaaaggtataatttggtgggcttttagtcgggctcgtagacgaggtcgccttcttggtatggacaatgcttgtagatgaaggcggagatagaagttcggggcctcttggttttgtcgacgctcgagtgctatggaggtccgggtcccaggcctctgggttttgtttggatttttggggttttttggatttcattgccactgaggttgaaggaagggaggatttcgatagtgacgccgagcatacagagagaaaaggaagggaaataaagagttgtgattttttaattgaaaggggtagtatagggagggtgaaataaagtagacatatattagtataaaattattaggaagctaaattttaaaattgggtaaaattttaagtattatttatgaaattctccaattaatattgcattatcgataatggttgagtggccgagtacttgtgtttcgtttgattttgtgatagatgtagatgaggctctaaaatgggtatgggcttatttatttatcatgtggaatctttcaatttcaatgcactacaagatgcaagagaaaaagtatcttttagtgatattgacataattaccaagaaaaaaagggactatggataaaataaaaataccatattcttttctaaggaatataaagtgtggttctaattactaaagaataaataagatttgccttccaaattattactcttttagagtttttatccttattgtttgttgcaaaaattcttctttaattataaaaatgattgtgaatatgtctctctagttacattataatcattttttaaaaaaatttgttgatgcaacattaacataatattaatttaacgtaatttaagcgttcagaaaagaaaaaaaaatacacaaataacaatttaataataaattatgaaaatattattatgaattcttagagttaatatttatatatttaattctaataaattaaattcaagtagaaatagaactctcatactataactatatttataaatcatgaccccatatgtaaattaaatgatttgttcttaggtggtgttgcctagactattttaaaataaattttggcatatagcatagaatagaatagaagtgagttttgccaaaacaaaattgaaataatgaaataaaattacaatacttattgaagaaggtccttgccttgaaagcttttttctcacaccccaaaagaaaaaaacagaaaaagaaaaagtcttagaaaagattcgaacaagacttgcaaacatggtaacatgaaataaatgacgtggcataatttaattgggtagttatacgtaaaccaaagtctcggaaatggcgacacgtgtccagattattaccaaagccaaagccataaaagctaaaccaaatccaaaataactga

SEQ ID NO: 43178 - DNA, 3722 bp, Cannabis sativa
  modified_base (3669)..(3675): a, c, t, g, unknown or other
gaataaaacatataatactttttatataatgaaaggtattttaggtattaaaaagtaaaaaaggacatttgttttattattttaaaaaaaggacattaactatatataaagttagaaataagccatttagttagaagaaatttattgggcacaacattataattttacttactattaaaatgtgaaaaagtacgagattttaaggtaaaattatttcattaatctaatcccatattagagagatattttttgtaaaattttattttaaaatatcatctctataacaaaattacattataaaataaccaatcacaacctatgtacaaagtagaattcccaagtaggaatactaggaaatatgcttaagcatgattggttatatcttgttgttaattcaagttggttcttatggaaaatatattatcaaaagggtaccctacaaatacaacaagtatccgaaataggtgcatattatttcattttttatttatatccctcattggctcattcttttacacctacttttttttatttattattattatataggtattagaataattgtgtttggtgccaggtaaaatgcacatggcaaaatatccaagtttcaaaaattgtgaaaatctaatagatatcatcgaatatatatttgcatgtgaaattaattaattgtttaatcctcgttagattctatctaacagatgggatcacgtgtaacttgggcttagtattgggcctgaagtttatgaatttgggcctgaagcaataaaacaacaatcatgtgattcttgtcagttatacttccccaaccgaataccgtcaccgacactaacttattaatgttatccttttccactcacatcaataaacggctctgagtttcttcaatgatgtcacaaccatcataattattttactatgaaattataagtttttatatattgttttttttttgtaaaaatataaaaagttgaaaaatatgaaaaaaaaaataaataggggtaactagatggttaaccagttattataagagaaaaaccaaccaagtatcatatgttgttttttttttaatatatttttttaacttttttttttaaaattttcttataaaataaattttttgaaaaaaaaaaaactatatttttacatatttatactttaaaaatcataaaaaaataaaaattctctttattttattatatgtatttcatgtaaactatatttaattaattagttaaatatgtcataatgactcacaaatatatcatgtaagactgtaaatgtgttaacattaattgttttaaacaagttaaagagttgataaattgacctatattgaacatagtcctttatataatttggttaactaaataagtcggtcagattaacctgtttataaattaattgagtttatgtttaaatttttgatacaattaataaatggatcaaatttaaattgacatttacttgtaaactttaggtctcatgagacaaaaaaataggtacaattcatgaacacgaattgtcactattagtataatttaacaattcctcctaaatatttttaatttaaataaaaatatataagatttaatattaacatgatgaacattctttaaaatttcttataacaaagtgtatgttctttttttcatcaaaatatatagattaaatataaaatgtaacagaaagtaattaagtgtatatttttgtaacataaaaagtagagttatttgcattttgtaactttcatattattactaattaagtgtctaaaaagaagttacacaacttaatcctttgaaattcaaagctataataaaaatataaatgttggggatttattttttatttataatgtgtataagtgatataaaattaagtgagaatgatttagaatgctttggggagttatttacgaaagctaaaaaattcggtaactagtaactagctactgattttttttcagctttaacgtttttttgacaatgggaatattttttaacagcttccataacctccaaatcagtaatttgatcctatttacatttaattaagagatggtaacagacatgaggtgtatagggtgttgaattttaaagtgtgtgatcataaatactataaataagtgcctaatgcgttcatatgaaaataatgaagttttctatcaacaaacacttgctagaaaacacaaggtttgatcattctcaaagctatttttacgagaattctcttagtgcttagagataagggacataagcttttgcacaaaagtgttatacattgttcaagtagttatggtgatccccactaagctacactcaagattgtgagtaagtgtttctattcatcttcttcttcttcatcaccatttatatatatgtgtgtgttatattacatatggtgtaatctctttcttttaccttttttatatatatatatattgaaatttcgtattttaatattacaaatttattatttaattaatttctcaattaaatacagaataataaaattggtgttaaaatagttattctatagctacagaaaacaattctgtaacttcaaaacaaaccaaaaaataaacagtgtaaaaacgtaaaaatgcacaagatttgtgtatgtggtttcaacaatccttgttgattgttactagtctacgtgtcaccacgcccaaagataagattcattagatagatctcaaaaatacaaattaattgatttatgcataaatagactccctcttattatatgctgcaagcttgatgtattctaccttctaatcgaatcttgttgaaactttaagtgctcgaactctctttgatcttcttgaagagtgcttgcttcctcccgaagcaagacttaaaaagctatctcccaaaagcttgttaaacattctcccaaaggtagcactgttgttcttcttcttttgtagacttgaatacaaactcaagagaatagaaaatatataaacacaaagagagatgaataacctcttctctacaaaacaaagactctatttgctaaagatatgaatacaattcaaagggtatgaaagagatacactttattgataacttatctcatacacggtctgaacaagaccacaatccacttgaaaattttcttaaaataattcttcaatcagcacaatgatgaacagtaagtgtgactttcttattatagaaaaggaaagtcattcttcgttttactcacaaagaatcagatatacatatctcaatagataaaattgtttgagtcatcaaacttatcatttatgtcttacttttcacaaataaaaaaacttatcaatataaaaataaaaattatggaaataaactaaacaactcaaccgaaattaaataattaaataataaaatattttttgttaattaaacgatgttaaaaatagaatttacatatataatatttatagtgtagtatatgttgttgtaacatttatttaagagactattttacgaatagacaaaaaaaattacaaaaatacggttttacagaattttaaatatttttatgatttttttattttatttatagaaaatacagtctttttatgttgtacgcttgttaattttttgttgaatttttattatctgtatgttattttttgttgttgttctgatattatttagatgttatttttatgtnnnnnnnatgtagttttcttattgttttcgtgttgtttcaattaaaaactgtaa

SEQ ID NO: 43179 - DNA, 5967 bp, Cannabis sativa
  modified_base (1699)..(1704): a, c, t, g, unknown or other
tagatttaggtttgttttgattttgatattttttatttaattcagttttatttttttatttttttaaatatttaaaatgatttttacttttaaaaaaaaataaatgatttggaccactgagtgactgacatctggggctgacctggcacttaacggccaaatacttacggaagttccaaaagtatgacagaaggtatttttactgccaaaattttaacttaggtattaatctgcaactaaaagataaacttaggtatttataccgtaaattactcttattaatatttatttatttactttaagtttattttttaaggatacattatttacctattttttctctttttatcattttctattttctctttttcttttttatttttaactttaaaaagaatttctaactatgtcgttactcgattgaatctaaaaaaaatattattttatagacatacatgataatagattgtgtttgaaaaataatttgttgtttcaatatatgaaaaatatactaatagatatattggtgtatatcattatgtttgattatagtttactctatactggaaaatataaactaatagatttattagtatatacgaaaagaaaaatgaaaatttgtttcaatataccaaaataaactaatagatttattagtatatacaatagtatagcctatacaaaaaggatactgtgtaaacaatgaatgaaaatttagttcaatatgccaaaataaacttttgtatgtatgagtataggcatagtatagccatatatgccaaataattttatgaacaagacattttatgtgagcaagacatctcattatatttaaatctttgacaagtgcatatattattatccaggtttagtatgtaagtctgtaagacatgttacagtcatgtactttgtatacaaccaaatttgatgtctcaacctggaagaaaaatagactaattagtttgttattttataggcacacattatgtttgaaactcaaaataaattgttgttccaatatatgaaaaatagactaataggtttattggcgtatatcattatgattggctataatttaatttgtattgaaaaaaataaaatcttattccaacaaacagaaactagtaggtttattgacatatataatggtaggctatgaaatgaaatgaattattgttcaaatacataaaaataaaaataaaaatttgtttcaatatgccaaaataaagtaatagatttattaccatatgtgatgataggctatacaaaaaatgtaaacaaagaatgaaaatttgtttcaatatgcaataatatccaaaaataaactaataagtttatttagcatatatgagtacagacatatctgattatagaatatttggtctaatcatcatctttttattaaaaaatttattattttatgaaaagtaaccaattggtatcttatcgaaatcataactaatttgttcaaaaaaatgtatcttatttgtaataatttaaaagttatttgtaacttgattctttatttagctattcaaatacatatattaatttatatttaaaaaatatgattgacttaaacattttcatgatatatatattttttttaaatacagtttactaaaatggtagcttactcgatgataacttattagttttgaaaataaatttgaaggttactcaaatgtattaatataannnnnntaattaattaattattaaagtgtatatacataagttttagagataaccaaactgtatctcacattacataatataaaagtgatacttttttttatgaaaaaaattacttattagtttcttatcaatattataagtaaccaaaaggttacttacgaaacacaggaaaattaaaaaaaaaaaatcgagattagtttcatttcagacatattattttagaattaaagtattttttaatgacgtggcaagacattattgtaattgagatttgttaagttatttttgtaattattttgtattttaagtatattttttaaaaaaacccattttaaaaactgaaaacataaccaaacaacctctaccctaacttatttgttcagccaaccaacaagagtcaaagactattttctcacaagagtaattcggcccaaacacaatagcagcccaactataaaagctatgtattttggtaaatttacatcctattttaacggctatttttttacatagtatattttgggaaactaacggtaagtttccctatattttctaaccctaaagctaatacacggcagccactatctctattcaaaaattcaaattttttttcaaacttctcttcttcttgctacagctgaaacaatggtgatgatgttttctagggtttcaaaatttagggtagggttctaagatttttctggctcttctctacttgttttacccgaaacactaaccccagaaaaataagtcttggtcaaaacacactaaacccggaaagaaaccaacccagaaaacttgacctagggggtgaaatcaatataccagtgtttaagggctggttgggtaatttggtctctcctataaaacccaaaatccaagccccaaaactcggttgtgaaaaactcgggacagtctgcctccgttgaaatctgctagggttttctcaattcttcgcccctccatatcatcaggtaaagaactttaatttatatcttttccattgttttggcaactgcttcctctttccttcttcaacatttacgtggtagttttgcctaaattttttctccatcgaaaattctctgagatgtttagggctttgtagttctttgtctccatattgttttacttctactgtattttgctcctcttctccgaatttttgtctgtataaaaatctcagggttttgttcttaatttgaactttcttagggttacccttttcataacgaaaaggaagacctaaaaatttgatttttttaagccttcccatcattttttatttgaaagggccctcatttaataggatgttaatgattttattaatctgtttctcttgtatgtatacatttgttaattttgcttactgtgtttgaacttcaactaatgtcatattccttttttatataactttgtactcgaaatgaatttttcatttaaagtttttttctttaggtttttaatattttcagatgtgttcatgctcatttttgtattgcattttagtttagtgtttatattttatattttaatttccttttatgaaaaaagaatataataaaaataaatttctttactgtttgtttttattgagatttagtttttaattcaaataaattatagatttttcagtaataatataatctgaattataaaaattgaatattatttttttttttgtaaaaaagagtatgatatagtagtgcttgttatatttatttatatatgtttgtattatattaaaatatttaaagagttatttaattttactttttttggcataataggaaagaaagtgaagatgggacgtggaaaattaccactggaattgataccaaaagtcaaagcaagaagaatgacatttttgaagagaaaaagttgtctaatcaagaaagcttatgaattaagcacactttgcaatgttaaagtttgcttaatagtctatgattctatgaaccaatcctcagatcctatagccacgtggcctgagaatcctcatgagattaggtctctcatcaatgattacaaaactgctatggctcaaaagccagactcaaaaagactccataccatagcagatttcataaaggaaaaaatcaagaaagtcaacacagagatagagaaattagatcaaacttccactactaatactccttcaacatcaacaacaagtttcagtaataatcaacttgttgaatttgtttctgatctggataacaaaattgaacaagtgaatgagagaatgaggcatttgattcatctcaaccattataacaattttggtatgcaagatccattcatgagtagttgtagtgttcaatattgttctcctaatgatcatcagcttccttattacaacgataacgagcctcaaattctactacaacaacagcatcaaatgccttggatttatgatcagtctagctcttcttcttcttcaaaggctcctctatttaccttcaatccaagcttgtcgtttgacatgagttatcattacaacaactgtgacccttttgattatgcaattgatgagtactataatggtaataatcttcttctagaagatcaagctaatcaacataacaacaacattgtgttggaatctgaaagaggagtaggagcagggctgcaccaaaatgatcagaatggaatgatgttgtctcacaatcctcttatgcctatgcaacaccaaaattacaatgtgagccaaacactactgccattgatgcctagctcgacggttgacactgaatggcattacaatcaggctattccattatgggatttgtccccacattgtgattcattagagaatttaatcatgtttgattagctttgatttttttttttttttaatttttgtttatctgtctctatgatgtaataagtaatgatattttcttattatggtactgattttttttttatttcacatacaacgaaagattaaaataattaatttttgaggtactcatttttaattgaaacaaattttgatgggcttgttattgttttgattttggtaaatttattcttcctcctttctttgtatgaccatctgaaatgatcaaaagaaacaaaaggttatcatttttaagtttaaatacgcaatatgattacataatttgattaatttattatgtaattaggaactactttatatttgtataggttgtatttgaagttctcacgatgtcttaacatggatctttttcttctgtttattttcatataggttattctacttaacttttgcaaaaaaaataaaaattgttatcatggatttgatattttaacttgtatcgattatagattcatagagataaagtatgtaattgagcttaactaattggctaaaacttaagtacaacatttatagcattaagagcctcaagtgaatgcctcatattttacaatccatgaaatttatttcctaataatacatatatagatcaatttatggatgagaagtttttttttttttttttaaatctgattttttctgtagttaccataatagtttcttctctatgttgacaaacactttttgtcagacaaattatggatataatccttctgaattgctttattatatagccatggagccaataatgagtgatcatatatgttatatagtatagtgttttacatgttgtagaccccaacccaattatgtctcacatgttggagcaacaatctatcttgtagttttaagtgttgatatatctatactttatttctctattatgttgtgtataatatatatttttgacaactttggttagcattttctcttttctttttaggaaattgtttcaagccatgctacaagcctacaaacacatcaaatcccttttgaccttcagattttaaagaggctcaaaatattgaaattcaaagggagaggtactatgttgtagtagttattgtatttaagtaggggtgttcatcaaaccgcctacagtacaaactgtccgcattgtataaaaatgtagtttaaaattttttgtggtacggttgtggtttgtatttttgtcaaatcgtgcaatgcagcgcagttttgaatttaataattgcagttcaaacagcacgcactatatattataaagttaccaattttacaatatgatttttattttatttttcatataaagataaatatatgtatatattaaattattttttaaacaaatttaattataaatattaattttaaaaatatcaaactatcgaattttgatcaataacgaataatgaaattacaaa

SEQ ID NO: 43180 - DNA, 4993 bp, Cannabis sativa
aagtcatttttattttaaaaagtaacattaatatataattaatatgatgaatgtattgccaaagctgatggtgttggttatacactttgcattgtgtgaatttctatagaattttcttttttacacgttgtttaatgtaaacagcaattaatctcaatttaatatccatgtataagttaaatagtggatcatgaactggaaaggtaattattactttagaatattactatggtataaataaagaaattacatgcacatatatatgcattaataataatgattctatttctcttgataaatttattatattccctttattaaaattctatgtaacttcaagatggactaagttttaagtttaaagtttttcatgagattttacttcaaagccaagccaacacaaacccaccaacttacatcacattattacatctttaatttattaaaaatataattgaaattgctcaataataatatctatcatcaaattaattattagaaactaccacaatactgaaaagagaacaaggttttatttaaacaaaccaaaaaaagaatagttgtcatgatattttcccaaaaagaagaaaacaatctgttacatccaattactcaaaccatcataatcatattcctaattttttttcttattattttacaacactattttttttttcaaagactcaaactattaccatacactcactccatgcaaagattaaaagaaaaacaccaaaaggaaaagaaggttaaaaatataggaaaagaaatcacacaaatcggttaaatggtctccttccaaccccagctggcaaagaaaccgtcgaatccacactcatgttccctactgaaggtgcagattggtgttggttcttctggtgttgctctaatgcccttgatgaactgttatccttatttgagaaaaatgagcctttgttccacttgaatgatccaatgccttgtgtcaatgggaaagaaagtcttcttttcgattcgctgcttggagttgccataaatctctcctttggattactgctagctctggctttcgccttggctgaagctgttggattcatgtagttaggaacagagaatggtgggcagcttgtgaggctgtcatcatcttttagtggaaggtcaaatggtgatccagctccaacactggctcttggtctagaatacttagatgcatgaagcgccattggtgttctgctcgatggtggtgttcgcattggttttgaagcaggatatatggttgatcttgtggatctcggtgttggggtatccgtagtttcaaatgcgaaatttcgctgctgctgcttctggttctggttcggggcactactagatggcgttcgtgcctctgaattcggccttggaggagtgagctgaaaggtcttcatgatattagtggtctgaggaggattagatggagtaggtaactgcttctctagccagttataccaccatggaaatcccccagctcgaatgtctgctagaggcgtttgagcagattttggactgcctttccacaactgtagtgcagccaagagagaaaacaagatatgggatttgaatatggaagaagttgaaaataaaaatggaatctttggtttcagggaagtagcatacctggtgagaatatgcatatgccattgctctttctctcttgacaagtgcctcaacttttctctgcatccttacctctatttcctcctttgttagcacactgtcatcccaatcatcattacctgtctccgactgtgccaaagtgttcccaatcaatcatttttagtgacacacacaaaataaacaagtatcatcacaaatgacaaatcactgttttgagaaattataggtacatctgaacttacattccatttgccaaatgtactgtctgtttccttatcatttttatattgagcttggcgtcttgcttggttttctaacatttggattctccttgactgaatctgcgactgaacacgcaccaagagctgcatatatttcatggcattcatcgtttggcgctttacactctgtcccctcaccactccttgaagcctcaccaaccccttaagagctctaaagctccttctagcctgtaaaacaagcataacaataaaatgatgatgatgatgccaattgcccatgaacttaaaaaaaaaaaactgttcaatgtggtgttgtccttagataaactcaccgtataacctctataggctgcttgaatcttagtagccgaaacatgatggtgccttagagtaggttcaggtctgtagctgatctccctatgatggtgtacaattctaggagatggaggtttaggagaaacagctctgggagatcgaaccctcggagaaggagctctaggagaagcaacccgaggtgatacaacccttggcgaagaagctcttggagtaacaactctaggaggaggcacaaaagatgaagtgggctgctgctgctgctgctgctcaggagataatggagtcctcaaggttaatctctgttgctctctttcaaaatccccaaagattttctcaatgctgctaggctctctgaaaagaggaatgaaggaattggtgtctccatgcctaagttttcctccactcttcttcttcttttccttctccttgctggttttcttatcggaatcctgcaacatatatgattacattcattctcgaaagactcaatctataacaaaaaaaggctcaaatgaaccaacaagtcacattcatttctacaaaacacacatgcccaagtgaatgcacttacatttactggcttctccttggagtggggagtaaaagccctcttgattgcagaaaaccaacctcctttctttcccatattcgtagcattagtgttaatccaaagctagaacctgcacaaaatcaaaagaaagaaaaagaaaaaatgacaattctgaaaaaacagttttctaagatgatgtcaaggcaagcaatatgactatttatgagaaacaagtaccttaaaaacagttgatatgatcctcaaacttagtttattccttttcacttattatccagaacaaaaaactcaaaaacccaattatgcaagtaccacaatatgctcaaaaacaaaaatgaaaccaatgtttttaaggttttgaggctgtcagccgccaatgaataataacagtaataagaggaatcttaagaatcgactcaattatggtcatatcaaacaaatatcccttttatgcatccataaatttgaggtcaaaatccatgtatataataataataataatctacaaatatatatatgcatatcccaacaaacacaatatgccaaaattatgatgaccctatagttacaatagccaaatgaattaatattattgttattatttctgttagctatctgaattagaaaatacagttaaatgattttttatgtaactggctgagacaaaaaacataaattagaaagcacacaaagttcaatttggaatcatatcacagagtacagacacagtttgtaggtgttcacgagtccagttatcaatttttttaaaataataataataatcaacactaaaaaaaaaaagggatttcttaaaaatgaaaattatactccaaataaaaaaaaaaacattatatgacaacctgaagacaagaagagggatcccaagaaaaaaaatatataaatttatttttaatgaaagatataattaataacctacctcgaagaaaacacaaaatcacttattttcctcccccaactttttcagttgaaaataaattaaaaataaaaaattgtgatgttgggatccaaaactaaagaatcatctttctttcatacctgacataccagattagaaacataaaaatcgtacctttggctttgatgtaataaaatagttgaagttgaagagagagagagagagagagagagagagagagttgagatgtgggtatttgaggggttgttgttcttcttcttctcaagctcttctcctctgcaactcttcaactagtgctttcttcttgccttgttgttctgttctgttttgttcccacctttccgtccgtcgtggcttttgacaagcaattctcttcctttttttaatattatttaataataacatattatataaaatataatactctctctctctctctctgtgtttctctctctaagactttagacttttgatggggtttgaattggatggtgagggagataaagggatttgcttggttgtgtaaattttcttgcttttggtctttgccacctttcaccttttgtgggatttataaattactatgatatttgaggagaagagaaagagaagagatgagtttaattaataaggtttcataatgattattattaagaaaagagaaaaagagagaagagatgatggaatggaatgaaatggatggaaagaggttaggggtttgggttgggttgggttggccactttcacactcaagtgtggccaaacttcaaccaactttacttatttggacagcaaacactttcaattcaattcatacatacattatacatacatacatacatacattcattcacaataattatctatcattttgacattttccattctttgtaatttttcagcaaattttaaaaataattcactatactataaataaattacgtatacatttaaataactactatataaattattatataaaaataaaataaataaagaatatagaaatacccttttaaatttgtaactaaattaactctatttagttgaaagaaaatttagaagtagttgattatgtagcatgcttaaaatattaactgatgaaattaacaaaaattgaattatcattaataagaaaattagacaaagtgtattacatcatgatagagcaaaattaataaatgggcaaattatgatatgtactaaatcgtgcccctaaattttttagccgttaaaaattctcctcgaactatggagattgttaaatttaaggacttt

SEQ ID NO: 43181 - DNA, 1935 bp, Cannabis sativa
attttgatcattttaaacaatgggtttgtgtaaagttggttacttttttccttctcaagctccaagttttaatctttctttattgtaatggctggtctggttcctttgtacattttttgaatgtgggtttttcttctacttcggtatttgaggtttttttattaaaaaatatatgtaatagtaattcaaataatggtgaatctgctaattgtttaatgtttttttttaagtacttgcttagtaccactaagaatcctgttcgtttttctttaaaccaggtgctgtttctacgccgggaatctcggttttctttgggctcctttcatggatgctatgcttgtgcttgagcccacttgtatagtatattcttagtttttttttatgttttaatattctggtggaagacagtatagtttgtctatttgatatttcagatctgtctgtattattagtttaggtttcaggatttttgatcccattagaaaatggaagttgtagccgctaaacccttcaaaacctcttcaaacatatctgaatttgtttcaaaatttgccaaggtctgtaaattaaggtccattggtgtgtttgcctctgaaaacaatgcctcacttgttgttgatgataatagccgtgatttgacaaaagagactggatttgagggtcaaaaagttcatccccaccctgctgaagtttggggggagaacaatggcaaaacagaaatggagaagttgtttgaaattgtttcagctctgaaatcatcttatattcggcttcaagaagctcacattccctataatcccaagatgattatagctgccaataaacttgttgtggctgagctcgaagcgctctgcaagatcaagcgcgcctacaaggagaaacaatttagaaaatccgagtctgatttgtcacacattgctctactgcaggcgaaaattgaagtaaatgaggggtttgttgaagaattgaagttccaagtgaaagctaaaaattccgagatcaaacaactggcacaagagcttagagaattagataatggcaatgcaaaacttgctgagaagatcaagcagatgagtgtggaaagaaagtttgctgttgtttacaatgtcaacacattacagaaagcctttgcagccacttctaagtcaattcatgattttgcgaagccattaattagcctgatgaaagcttcaggttggaatttagatctggctgctaattctattggaggggaagttgtttactcaaaaaggtctcacaagaagtacgcatttgaagcctacatagggagaagaatgtttagtgggatgaccttacaaggatataatgtggatgatgtcatgaggtttgatgatcctattgatgctttgatcaatgatccagactcagagttttccaaattttgtggaaaaaagtacctacttgttgttcatccaattatggaagcatcattttttgggaatctggattacaggacacttgtattgagtggcaagcatcctagaacaccattctaccaaatattcgtgaaaatggcaaagtgggtttgggttttacaaggcattgcaggatcattagaccctaaagcaagagcttttgctgtcaacagaggaagcaaattctcagatgtttatatggaatctgtggaggaggataaggagggcacagtttgttcggttcaacttgaatctatgcgtagagttgagtttatggttatgcctggctttaaaattggagaaacattattgaagtccagagtttatctatccaaagtagaattccctcttggtaaatcctagatggaggtgcttattctgactgattggtagtttcgcagagcctgattgtctattgctttgaaaatgtttatagttagctctagcctatagctactgagagctgttattggagtttttttcaaactgcagcttgttg

SEQ ID NO: 43182 - DNA, 4666 bp, Cannabis sativa
cgatcaagtgataatcttgtagacatattcagaaagtcattatcaacatcaaattttgagaagatggttcacaagattggaatgcgtcaattaaaagatctccatgaatgccaaaatgagggggagtaatttcatactaaactttttttcttgaccgagttttgtcccactgggttttctcggcgagatttttagtgaagcaattattatggacattcaagggggagtgttataaatattaataaatctatgtatgtctaaatcttttatttattaccattaattgtaattaatattcttttttttttattttcttaatatttgactctcattagtgtataaataggagatcacacattggaataagatactaagaaaattatcatctcttctctattttctctctaaattataattttatataatacgaatttgctatgtaagtgtttcaattttgtgtgtaatttatgtgtgcaaatataatattactctatatatatttatatattgagtaataagtgttttgttttatattcaaacaagatatatgtacaaagtaatatagtgcccacatgaagagggaagggagatgtcaagaaaactaggagcaagagtggatgggctgatttgaaagatcaacaacaacaacatgcatgatcatgtgattgtgaatggaaccttatcaaagggccaaaggccgaagaccaaacaccaaaaaccaaaagggacaatacaaatccaatatttcagaccttttttctttctgacctatcattaatatcacgtctttatgaattcaatcttcatctttgaatccatgtgatcattcccctcacttctctacatcacttaattctcttccaattatgaaagattgactctctaattttcattttaaagcatatttgttggggccacgtgcgtgcatgatgcataagattagtatagtattagtaaccatatgctaatgtatagtgtgctttcacattcattttataaatatactaattttagtcattaggttttgagtattgattaggctttaatgatcatggaatttgatttggggggtgaggggttctcattgtatagttgggtttaataataatatagcctcctatattttggtaagaatagtaattgcggacataaatgaacctcattactattatgtgttatatacaaatgggcataacataaagccctaaaagtaaatgatcatataaaaatatgtacatagtctaccaccacacgttatggctggctacgtctcgcatttgaacaaaacaaaataaacgtttcttggtggtttgaacttggctatgcacatgggagtgtttctcccttgtcccatttcaagagatacacattcaattttatataacaatgatatacaatattacatacactaccattctacactgataagattaagtttcatttataaatatattatctctagactacggatactacttcaagggctttcttagtctggttgttaaatcaaaattaggctctcctattagtggccttgctaaattaagaaaatagctaggaagacatggctaagaaaatgagtgggtttaggtttgaaggtaccaaaatgggagtgacattttctgagaacaactggcacacagaccattcgtctaagacattactcaaacctggttttgttggactaatattggacctcattccttaataatgggttattttcagatgtgatttatgaacaataatttgatgcatgcttttctttttttccatttaggtattgggagagggtgagagcaaagctttgtttgggcagatagcgacttcgtataaaaaaatttactttggaacaaatctctgcacaggacaaattactaaatgactaagttacggccgccagcattgtcaattaattccactgaaataaatacgtaaaaaatcatattatagcactctcggatacaccaaaaattttacttattttagacttgtaagttttgataggagaaattttagagctttgaaagcatatgaaactggaaggacctagcttcttcatctatcctctcctccaaagagaatttgaactcattgtttttacccactttcaaggtaaaatttgccagaacttttactgtcttgtctacctaacaatagaaaaaacaaccccccacccattaggtgcatagctactataataacgagaggaacaaccactaccacaaccaccacctctgaaaacaaccccccttgggggcctatatggttataagattggagacaaaagtaacccttaactggttttagtaaccacacaagttattcactattttttcaacggcagatatagatgctgatgctgaacgtgagtaaccttaccccaccaacgaaatgagggtcagagttagtacccttttgaactgaaaactccagactctcccaaagtgataattactcgtgaaagaatcttgtgagaagccacgttaagagaatgaaacaatttaatgcccggtagtatacaactattatttacttttcatctatcaaaaaagacactggatatgaacacatcacttccaccatttccctcgattgttgtttcactcattattagtttatcgtttttgtttttcttgctactttataaacaactacatcacacatcaggaaattaatgttcaagctctgatacaacaataataatgtacctataacatttttctactatacattattgatcaaataaaattaaaccttactatttggctacaaaaatacaagagaatggggcatgcattgcttgcgcaaacacggtggccattatctcaagaacatttgatatctttgcctgtttaaaaacaagttgggtcacaaactgaggagaaaacttgttgtggcttcttgttagacatggtcgattatcaaaacagtgtcaatgaagaatttctcatcctgctcagtttccataaagccatcgtcattgagctgaaactgggtttgttccacacaaaaaaggatctgaccaaaatcacataaaaggctgttcatttcccaatacactgattttcagtctcaaaacaattataagggatcaacaaatgcatttgccagtaatggtacacgaaaataatgcttacttgtagtagagatcattgaagtaattttgtccggcaatgtgtcgactaaaaggacctgtttataattcttaactaggaacctccttaagataaattatatcatctcgtggatgagcttcttctaccagaacccatacctcgtctccaacctgtgctgtagacacccacacagatgcttggaaccccacctacaaaggttactgttaataatgagtgtcccaaaaagacttgtatattcatgaagactacaaattcgtaccaaaaggaaaaagaaaaaatttggagacaggaaataatgaataatacgtaaccataattgaaatatgtagaaacacctcactatttctatggtataattttgtatcataagaatagacatacttttgaatggagatgcaagctaaacctacattaatcgttagttcaaatcaaagtgacaccatcctaaatcagaagaaaggtacaataaacctaaggccaagctattccatgtcaattaggttgatgaccatatgttgtgttaaactaataccatcacggtataggcttagtttttcttttattagtggaaaaaatggaatagcacaccttcccacgggatacatttgaaaaacctccataatttcaattattgttagacccaggattaataggagagggtacacgagttattgaacctttggtttagtttattctaggagaaatgtacctgaaagaaataaagaccaggtaatcatcctggcacatggtcaaacggaagccctaagcaacggtcttccaaatgttttaggtaattgttctcctacttcgcttacttagcctgaatctagtataggagtaattccagaaaacaccaatttatatcttcttattgccttaagaaaaggaactcgtacttgcactaaatatcctattagtaaatatatttcttacaatcatttgtcaaaaaaccataaagcattttctacaaatatttcagaacttcttgtgcctagaaatatacaggaaggattagatgatccgaatttgaatttggcagttacagaggaagtgaatgccttgagtaaaaatggtacttgggagattgtaaaagtactgaaggagaaaaagattgttgggtgcaaatgggttttacaataaaaaccaaagctgataagagtgcccaaggtattaggctaggcttgtcgcaaaaaggttttactcaaatctatggaattgatgatcaagaaacttttgctcttgttgcaaaaataaattccatttgggtgttgctttctcttattgttaattctagttggcctttataccaattagatggtgaaatgcttttcttaaaggagatctagaagaagtgcttatgagtcctccacccccacctggttttgaaaaaggtgttggatttgggaaagtttgcaaacttaaaaagtccttgtatgggcttaagcaatctcctagtgcctggtttgagcgctttggtagagtgttgaggtgtcatggatatactcagagtgaagcagatcacaccatgt

SEQ ID NO: 43183 - DNA, 3389 bp, Cannabis sativa
gaaaaaggctttcttttcttatgctttcaacagtgaaagagatcaatttcgtttcccagaaaccatagaaaaataaaatgagtacctgttattcaagaggttcttgactgcgattctggtaccgtcaccgagaataccactgtagacaatcccatacccaccttccccaatcacattctcaggagacaacccatttgtggccgcttcaagctctctcagagtataccatcttccccacccaagatgcgaaacctcaggacctacgttaccgctgccaaacgacgtcgtatcacctccactcatcatcgttcccctgctttccccactggatgctcgatccgagaacacgacgaccctatggtcgggtttgccgatctcaacatggatttcaggctgcggatggtggtgaacgatctcctgtatttccttggagatcactggggtttgtaaatcaatggcagaggccatggttgatgtgggcttggtcgaagatttggacttgtgcttggtccgatggcgagaagtgatgcagattgagaggaggaagagtgtgatgactatgagtgaaccgacaaggattccgatgacgacccagagccgtagcccgaatatggaagtgggcttggagagctcagagttcacaaacgcagcgtcgtagattgacatcgttatcttatctgggtttccttttttgttgtcgttttcttgtgggttttaagaggcgtcggttcgggttgaagtgagttcggcgaggtgagttttgaggggcattggctccgccggaaaatcccaagaaatgttttttctctgtatgggaattatcggactctccggcgaccagaggaagaggattatagagagataaagatggagactttttgaaaacttgaatggattcttacagtggcagcagtaccagttgagctgtctgtctctgtattttttggattctttttcaaaattaaataataccctctggataatatttaatgacatttatatcctctctttctattataaatatttaattactaagatagatatacagatgatacttttgaaatcttcactctcctctctctctctttccttttcggcctctgaggatgaataaaatactaaactagtagtacatcatgcactgatttattagtatagggtttatataatcttaataataataataatattgatgtaattgcttgtagagacaacaatatattgtagggatcggtttcataaccatggtcaatcgaagatgatagtagtagtgtgagtgtgtgtgtatacaagatttctattattttttatattgggttgcgtagttaatgagttagaccaaaattagtaatataaatatttataataggcctaagttaacaagtggagaaaccattttggataatggtatcattggtctgtcttaaccacctttggtggcatagttcaaggctattggcaatggtgttagggccgcaaccagcctcgactttaagagacttattatttgaactcaacttgcttgttatattaattttcattatgttagttataatttttattgttaaagaggtttatagagttgttcattctttagctaaatcattcatttctataaaagatgacgtgtttcgtagtgttatcattgtaacatatgcctattatcaatgatactttgctcaattttcagactctctcaagttttgtgtatttcgagatatttttccatcaaaaaataagtcatggaaattatttagttgaaatggtttaaaaaaataatgctctgtcaaaattatacatataaggtaattgttatttgttttgctattacatacactgattaattaagttattactctatttattatataatatgattataaatatttttggtattttttttacctgatgaacagagtcacacataatttacaaagcaacaaatatatttttagtattttagttgtacacataaaataaaataagtattcttttttatgctagaagaagtgtcttttatatatacatgttttttttttgagttgtacacacctagaagtcaatcctataatccctacacatgcacctccctccaataccttctatcctatattaactagcctaatcaactggttacatataaaaaaaagtattttgatattcgacttcctcgttctaaattaactatgaattaatataaattataattataatttatctaaatatataaaaaatacttataatatctttcaaaagaaaaaaatacttaaaatatttataaacaagaatcacagcctaataaataattttatttcatcgttggaacttacgtggcagcatttagtgagccgtgggattagaatgttctaatttgtaggcaaatcccaaaccacttaaccccaaacacaaactctttcactcagttatttttctctcatttcaatttgagcattgcaagatttgatagattcctttaaaactgattagaaaaaaaaatgtacatataaaaccgtttttataataaaattactacgacagtattcaacataaaagcaaaaacaaaagggagaacattttactccaccatagacaacattttggttcctttcttttaattgctttggtctttttttaagtttcagtgctccactactactgaagtgatctataaaatatgatggtgtatcaaaacttttaatcatgatatttttttttatgtgaaaagaaaaaaagatcacttagtgagattcttttgcaaaacacacaatttttaataactttcaacatttagaattgtttaattcttttgatttcagtatttaatcaactatttctgactactttttgtatagaaagtgaaagctttggtcttaagtgtgataactatcggctgtgctggctccaacttagcatttgccattgccacacggccagccaagtggccaacgcttatgcattcaataatgtgcactcgaaaccatctaaatccaatatcaatatgtatgaggaaaaagaaaatcattactaatactcaacagggatgggatgggatggactttattgttaataactccactaaactatacccattcactcactcatctaactctaaccaatcatatttttttatgtacttctattttttttttttttttgagtggcacttaataatattcgtacagatacagttgttttttttcctttgtggtagagatttcttcgatatgcagagtcaatcatgtgttagtttgtgtgaataaatatagaaatccatattttgtgaaagtaaaactgtaagtttatttttccttttcaagttaaattaaatcaccaaattagattattagtctaaatagaaagttagtcctgtttacttcaattggtaaact

SEQ ID NO: 43184 - DNA, 3965 bp, Cannabis sativa
atgtattagtagcaataaatatgcaatttgtataaaaataatttaaatgtaagattaataattaaataatataaaggaaaattaactcataaactatttttaatttttttttaatttacggtttgagttgctctggtagtttttcatttagttttgatgtagattaatatacggattttaattgtgatttaaattgttctgttagttgctataaaatgtagagaattttgtaaaattataaaaaaaaaatttatttaaaaatataaaaataaaaaaacccctaatataaaaactagttatataacaacttcatatctcaaaaaaataaaataattctgttttaaaaaaattaattgtaataatgcataaatttgaacaatggaaaaaaaaatgattatttttggcaactttggccttagcaattgtatatgtggtgcaacaggcgctgctagactcggaggcagacgaagctgttcgaaatctgttacctgactacgtcaatggcgatttatcagccctctgtgtatggcccgatcaaattcgccactggtacagataccgctggagtagccctcttcacttcattgatacgcctgaccaagcttgctcctttgactattccagtaagtgtgaaaatacctaacccctctttttcaaatcaatgtaattaagataataatcatcgtcttcggttgggacttaggggactgccatgatcaacatgggtcagagaacatgtgtgttgctggtgcgatccagaatttcacttctcagctctcgcattaccgggaaggaacctccgatcgccgatgtaaggaagccctcactcataagagtacatgtctttgttttgatagttataatgcttgatcttgaaatttggagattattttgcttattcatgttctgttcttggattactttctttgtgatttgtagataatatgactgaggccttgttgttcttatctcatttcatgggagatattcaccaggtatgggaatattaattattcgtgatggaaaatgcaaattaatctcattatttaaaataatttagttttatttcattttatcagccaatgcatgttggattcactactgatgaaggaggaaacaccattaatctacgctggttcaaacacaaatccaatttgcatcatgtaatttcatcatatcgcgagattataatatataattattcatctgtgcatatatatgcatatagaattcattttgttaaagtaaatgcttatttataacgcagttaagttcttattcttgtgatctgtcccctcattaatttttttttcttttacattaatgtgaaggtatgggatagagagattgtactgactgctctaaaagattattatgaaaatgatatggaccttctcctacaagacattaagggaaactacactgatgtaagactatttactatactaaatttcattataaaatgcaatgcttgtgaaaaaacaagctcaattgaaaattagtttaaagttgcaaattcattgtttttacatttgtgtatgttgcacagggagtctggtctgatgatgtttcttcttgggaacattgtgatgatcttgcttcatgcataaacaagttagtatattatcctacctttttttttctctcgtcttactccagttctcatacatcatactaaatgagttttgattttgggttttttctctagatacgctgttgagagcataaacacagcttgcaaatggggttacaaagacgttgaccctggtgttactcttgcaggtataaatgcaaaaccatgcatgctgccaatgagttgtttttttattagttcaagctcatggtctaggggtaaattttaaaaaatagttataaaaatcaaattatgttatcacttactagtttctgttctaccattttattctgtgcaagataaaataaattgaggtaaacaaatgtcatccatgattagttgacagtgaattctcataggtacccctaataataattgagtgactcactcgtttttctcttaatctgagacaagcatgctaactgttattagtatcagttggaaataaaagcagagtatctctgttacaagtgggacaagtaatagtttgtcattttgtgtatttttgcagacgattactttaattccaggatgccaattctaatgaaacgcatagcacagggtggagtacgattagccatgattttgaaccgggtgttaggtgactccaacaaaggacttgccatgccaacttaaccaactgataattatgcataagaagatcatatctggatattcttcagacttattcctctttggtttaaaccatccccgagtttagctgaccaggtatactgcgtacattggttgttatgatgtacctaataatgaccaatcttgtaacttgtaagtgataacatgtgtagattacagttaattccgaactatttgtaacagaatatatgattctcatctttgataaacaatctagatttctcaacatatggttgttcttgttaacaaggtagccagattatgttacaactaatatcaccaaaaaaccatgagccatcttcatatcttgaaatggatcatataactccgctgttcaaactttaattgaaaaattctgattaatatgtgaggtatgtaagattgaaagagtactggaataaacattgaaagagttatgtgagtactgtagacagtagacaccccattcatccattaaaaaaaacattgaaagagacctgaacaaatattaaaatgttacaaacacatcatcaatatctgaaatcctggcttgggaaaaggtatttaaagaggttcagacttctccctctttctctcttttggtatgaaatttagacttgtatctctattctagttgtgattgggattgcttacctcattacataagctaaaacggtcggcaaccaaatcaagtgtcataattcaagaaaagtattaataggcggctcctagatagcagggcaagggtgcgtcttgttcaatgctcacaaaattcaaagttttgtttgatttattttcttgaacttggttattctgtgcaatctattttattaatatgagaattaacttataagtttaggaaaaaaaaaatggataaaaataaatatatactgttaatttcgtcatgacacatggaccacctcataatatggttgaacgccaaggcagccatttacaattacaaacaaacaggttccaaaggtcaaaagtaccctcctactcaggaaatcctttttttttaccctcctactcggggagaagggtgaaaaattcccattttggcttgcggaataatgtagagaattggcatttgccaaccgagcaaagagaaagaatatactatgtactacgtatctcaccactgtttccttcctcgaaccccgtgctctattttccaagacgtgaataatatatacatataaatctgataaatctcaactaacttttcttgagtagcaagtcgacatctttgattttatttttttctctttccattaatatattctattctattgtcttgagatcaagtgatataatttttattattgcctcctaattatcaccttattctaacttttgccttcaacttccatgtgtctacattatagcacccaaaattttatcctatctcattttcccccttctcttttatcacctttttttttttaacaaatagatggggaaaaagaaatcacgtgtttagctcctcaaactaaagaaatttaaaacttcttaataaaaaaggtgtaagatggaagtttcaaaaatatttttatgcattttacttgtactaattaaataaattccctttttccttacaaaataataataataacataaatgtgttgcgatatttagcacacgcaagtgtacgtatcgtttaaagtagtagactcactaggagtgaggtcgatcccac

SEQ ID NO: 43185 - DNA, 2578 bp, Cannabis sativa
agggcataaaacccaacagagggtgcatgataaagctagatttacaaaaagcttatgacactcttgagtgggacttcttggaagaaaccttacaagcatttcaattctcgaaggaatttatcaagctggttatgatctgtgtgcgcactcccatgttctcgttgatgtttaatggaactcttcatggttactttgagggaaaatgaggacttcgccaaggtgaacctatgtctcccttactttttgttcttggaatggaatacttgtcaagaataatggtccggattggagccaatccagaatttcagtttcatgatagatgcaaggaacttaagttgaatcacttaatgtttgctgatgatgttatcctattttgccacggagacttcaaaagcattcattatttgcttcaagggttgaaactcttttcttgtacatctgggttacaaccgaatcctactaagtctgccatttactgttgtggaatggaagaaactgaagtgcaaagagtcatggacagatctggtttttccaaaaaagaggtaccatttaaatatttaggcattcctatatgtgccaaacgtatctcagggaaagagttcatggtgttagctgaaaaaatgacagcaagaaaagaacatggagcacaagaaacttgtccatagcaggtagagcagtgcttgtgaactctgttttgatgtctattcatgcttattggagtcaaattatgattttacctaagagatcatcaaagacattgaaacgatatgtccagcttatctttggaagggataccacacggcaatagggcctggaccaatagcatgggagaatgtttgtcaatcgaaggctgcaggaggcattggtttcaaaagaatagctgagtggaatagggctgccttgacgaaatacgtttgggcgattgcaaacaaggaagataacttgtggatcaaatggatacattgtgtatatatgagaggagagaattggtggacctatcaagctcctcagcaagcgagctggtattggaaaaaactggtctatgtcaaagatcaaatcagggcgaaaatggatgtgcaacagtttgttggcacttattatgcaatctctaaaggttatgatttattttgtcctccttaaggaaaggtaaaatggagtcatggagtttggaataggaaaaatattccaagacaaagttttgttatgtggactgcagtataggatcgacttcgaacaagggcaaggctgaagcagtctaatgttattgcagaggatcactgtctcttctgcagtacacattctgaaaccaaaagtcacatttttttctcttgttccttctctttacaatgcttactgcaggtcaaaggttggctgaattggaaaattgagtcaattgatttggatgccatgttgagatggattgagagatcaaaggctggcaaatttaggcaaagtttctggtttgctgtcatggctgcaatggtataccagatatggagagccaggaatttggctctgtgggaatcagaggtgccgattgcttctgaggtggttaggaagataaaggaagaagtaaagagcagatttttttatgtttggcctaaaaatgtaactccacatgataaacaatggttcttagagattgtacaggtataggaaaaaaggaaaaaaggggggaaagagaaggggattcatgtaaaaagtgacaagaaccatgttcataaatagttatagatcttcaatttgaagatgctaatagaatgtaatcaaatgtttgtagtaatgaattactctgatttaccaaaaaaaaattatcgtttcatttgactttaattgtctaagttcaaattttagcggttaaaccctccaagctactaaattagtagaaaatttaaggtaacatcacgttaagtgtcaatatggactgcttatgtatacgtttttgtacacatgacacgttcatttaggtacacctaatattattatttaaaaattattttcaaaatttattttgaaattaaataaaattataataataaaaataaaatataaaaaaattaaaaattttaaaataacttttatattttttaaataatattcagtgtaccaatataaatgtgacacgtgtataaaagtgtacacataagtagtctatataggaagttaattgtggaaaatagatgtcactttaaatttgctaccagttcactagtttggaggattttaccatcaaaatttgagtttaaaaagttaagtgcaagtaaaatgatagttgagagagtttaaccgcaaaaaactcatataccaaatattgcatactctataatccataatgcatggtaaatctatacaaccaactcattcaactaataaagttaaaaaaaatataaattactattttagataatgtactttacaaaagttacagatttcactttctattttattagatgataattcaaacattgtatttttcaaaatagtacaaaatagaccaactctattttcgtcaacttttctttttaatataacaaacttgaagccaatttctagcataaacaaatacaaaaaaaaaaaa

SEQ ID NO: 43186 - DNA, 3055 bp, Cannabis sativa
acaaaaaatggtgccttatgtaattattccaaaaaaaaattattgggcccttattataaagataaatagtatttttaaaaattattaagagctaattttttaatttgagctcctaaaataagtggactctaggtgcgggcctagcccgtctatgtccaagaccggccttatatctaatactataattatgagatatagtatctgtaaataattagtaattttttataatatttgttaaaataaaataaagtaaattttgaattacattcaaagtaatattacacatgatgctaagactgtcatacccttttagcatatatttctctatctttaattatgcaaattgtactacattgagtagtttgtagctttttcttgactttattttgagtgacacatgtcagcatagaattaaagggaccaaaaaaatgggacaagaaacttattatgtgccccatattcccacttttagattttgaagattctttaatttagatatgtagaagaacttattatatgtatagagatatccttgtcgcataggcaattgattaactcactctgttgtaaataaatccatcattatataatcagaaagaaaaaaaccaactcaggtggtgtggtatatagtaatggtgactgtgtcccctttgttgagtttcattattttttgtaataatttcatttaatttcgacctatggacttacatttacatgcaccctaataatcttcaacaaatcccaaccaaccacaatgttttgactgtttattgttatgatttctatatgattaatcatcaaaagaaatattagtaatatctaataaaaaaaaacagcatggaaattttatttgattcatttataaatgtatatatgaatggcacgtgtcttggtgagtgggggacaatacatgcaattagatctcttcacgtgggttcgagaataataaaatggcctgaaaaagagacacgtggtgaaaatatatggtaccctccactaaacgatactctcatcatacttggccatggccactgcaccaacaacctattcaattccactccaagttaccaggctatataggaattttgttccaaagaaaaagactatatacagtaaattaattattctatcaaattttaccatgacaaacaaaatataatataggtgcttaatcaattactattaattaattaaaaaaaatatttcctcttttttttttttttaatttaattttacgtaattttttttaaccatattgatattagtttaatgtttttcttaaaaatacatcatttttatttttttaatattaaattatatatatgacgctaatgtgacaaatattaattagctaagcatttataatatcattttatttgccacaggtgtgactaaatttgatagataagaaccaatttacaacattgtgaatagttcaacactatttttaacatgttgaaaagttcatcgagtacaataatacataggctaggaacaaaaatcttaaatagccaaatattcattttatgtattatgtatatatattttttatttaataatttacagcgtaaatatttaactttaattctcagttgcagatagttacttgccaaaaatttaataacattgatcaatcatagattatcacgtgaccattaacttgacatttaacggccaattattcacaaatatttttaaaaataaattaaatattattttttttagtgtatttaaattaattttttgtcaaaaaattatacttaaatatttattcgcaacataaaattaaatttaaatatctataacgcaaattgttttattttttttcattttcttcctcaagtcaccaagtgtcaaacatctattggaatttctgttggttcccaaaaatgaagggcaattattatttatgtggattatattaagtttagtgccggccatgaagtaagaccagcaaagcagtttagaactctatatataaaaaaaaaaaaattatacatttattactgaaaatatgcggtagttgtttggagcaatgttctcgtagggctgaatttcttgaatagaaatatgtgttaatattgttattagtttaattaattattgggtgtaataatatttaaaaactatggttagtcaatgcaaaacaatatatctaaaggtacccaatatagcaatgttctttcttaaaagcttgattatgtttcatggatatacaacaattttttgacaaattaaatttgtgaaattagtggctatataaataaatataatacattattaattaagttgacagtatatgtgtgtcctgctttatttattaaaaaaccagtttgcatctcttgtttttataaattaaaatccacaaaactataaattccttggagaaaaattgaggaaattaaaactatatataaggaggtccaaagctaagatacaattttttttattaccaatttacacatgattgtaatataattatttgaaatattaatatatatatatggtccaattaaagtaaaataaaataaataagaaaaaaaaattcaatctcttttaactacacaatctatatatctttgagattcttaaaaattaatacaatttgtattatttttttaatatacattttgatattattttctttctttctttctgtaaaaaataatattttcttatttaagtattgacttttggttgatgaagtttgttacaactcttataattaagtcaaatttaggggtaaataatttttaaaaagtcaatgtggaatgatgtagtttagctaagaaaagaagatagattttttttaattttttttaactttgataatatatggtaaaactaattaatatttgatgacttgatccttaagtgttgattaatagcacaataagcctctaaaattgaattaatatggcactctaataagttgttggactttgaagaagaggttggccactaaagggtacccacttattaaattaagaaagaaaaaaaaaagaaagcaaatcaaaaaatcattatcactactactactaccagtagtactgat

SEQ ID NO: 43187 - DNA, 6212 bp, Cannabis sativa
actcactacatcagcgctcatccacttcacagcagctcagccgccgccggcaaaggcttcgtcgccttctcttccatcaccaccggctccgggctgcgttggtgagctggtcctgttctctccatgcctatcttttgtctcgtctccgcctaacaaccgctccaagacggccccatccaagtgctgtgatgcgttcattgctgcgatcaactccggtgacggcccctgcctctgttatcttctccgccagcctcgattgctcgggtttccggtcaatgggagcagagttctttctctgtcttcggtatgttttcccgacaagtcctctaggagaggcaatttgcaggcgatttgctccggtacttgaatttctttcacttcttgaaatgaataaacttgaaaaagaaaaagaaaataaaatcatttcactttctttgtttcacctataattgattggtttgatatgtatgtatgtacgtatttatgtattttcatggtacaggttcttctcaagcacggccaccattcaagaatggaacagtatcaggggtttcaaacacttctcactctggtaaactgttttgacctataacacctttcattaaagaaatctttagacctaattttgtattgaaggttttcgtagttaaaaggatcatcattcttagtttatataatctgatatgaatttaatatgcaggtcctaataatcagtcaaccccctttaagagcttgccatcaaattctaataacacgagaacaccatcaagttttccatcagacactgagaactcgagtacaaaggcgaacccaccagcggaactcaaccagggacaacaaacaccgtcagaggcgcccagttcagtggttgttgatcagttctccggcagcttcaattctacgtctcaaaaggacttgctgccgctggttcttcttctcatcctcatttgcctatagtgttatgctcagcatgtatcagcatacaaccattttttaagcattgttttccatcactgacatttaccttttagcaaatttgaatagcctgttatttcttttgaatagagaaatgaaataattttctgattctttaactcttgtcagttgaagttcagcaaaaacaatttcgctgagagttaatgtagatctcttacatgatctttcccttgttgcatagtacaaaaacatgaacatggtaaaatgtcattatacttttctataaatcaagaaagctttccttgcagttatgctttcaaatttcagactctatagagtagattgctcatcacttgctaacatagaaatattatgtgtataaaagttctacagctaacaaatcattacacaccaaaaagagacattgttaacatcaatattgtgagtaatcacttccatccatcagaccattcagcttcatcagtaccaggtttaggaagctctgattgtgagggctcttcaccctgaacaacgtcgagcgatccatattcttgcacgggttcctcatcaaaaaactcctcctcctgcctttcaggtggaggacagccttgatacgagttgttgtctatgcaacgccataaaagcatgttccagtatgtatcctgccagatgtaaataaatgacattagaatgatgcaaatcagtgaagaggaaaatccaactaatggtatgagtaatgaacaaatgaaaaagcattttcatacttttatagaaagtagaaagatgaagatgtaaatatcaccaaaaactttgatgctaaattataagttataaggggaaaaaaaactaattttctggaaaacaaacacagatggttattgaatcgggctaaatgtaaagggatgcattgcaccaaaatcctttgtgcaaaacagatttccatattccaaattttgttgattgtgggtgattaagaaaaaagtaggcaaaataactagatggcaataaaaggaaaaccttaccttacagatgatatgtggatttccaattataattagcaaagatatagcacgagtaatagccacattaaaccttcttggattgctcaaaaatcccaggcagtggtttttgtcaaattcgttgtgtttaattgttgatcggacagtagatactatgataacttccttttcttgcccttggaattgctcgacacttcccacttttatattagtcatctctaaaccttcaaaagctttctttagtttgagcacttgctgtctatatggtgttattaccccaatgtcttcatcttccaaatccccatgtgctgtcaattttcttatgatttcaaccactttgcttgcctcaaaccgattaaaccaggatggattacttccttccctctcatctaagccttggatgccaatgaaaagaacagggaattctctgtccggaagaaagtccaccttttccatgaaagaacttcttctatctctacatggaatcaattcttcattgtaaaacagtaatgagggtagatgtaaaatttctggatgacatctgtaatttctgactagctttgttatataattttcatccatatcgttgtaaagctcagattcaaatatcctctccaagtaagactttcctaaaccatacctttctgcatctttggagtatataactggacctaattgcaaggggtcaccggcaagaactacaacagtattcttgctggagagatttgctagtgaaatcattgtttcaggttctgaagcttgcccagcttcatctaagaaaatgtgagagaagtgacccctctttataccttcactaaacaaaagagaggcactcatgtatgtggatacaatgatcctatagtatcgaagggcatctaaaggaggacatttaaagacattttcagcaaagtagcaaaactgaatataatccggattcatctcttcataaggacgagcagatgcattgagcctgaatatttcactatgtttaagttttacacccttttcataaatgagtttatccagtacgtggtctgctgcactattagaaggtgcacacacaagaatccgagcatgtctttgagttttgtagagctgaaggattgcttccacaactgtcattgtcttgcctgtgcctggaggaccatgaatcacataaggtggtgctccttcgcagccaagtatcatctcaatggaacgggtttgttcctcattaagagcacaagatatggggacaagtggcttccttataatctgcctcctttcacaggcttcagatgggaacaaaaagctcttctcaacttctgttgaagcatcaacagcttgatataaccttctcatgttaattcggttatatgtaaactgtacattatagcgattatcatctctatgccgtaaatgaaattctggggcaaacttcagatgcacttcatcagcctcaactcggtggatacaaccctaagtttggatttggaaaaaaaaaataaaaaaacagtgatgtctgaaatatttgtgggaatttttcaattatatcacaagctataaacaatatatattggcagaattccagaaatatgaaattattttcaaagagacacattaatagtacctcatttttcaagaaaaaaatcaagcagcaggaagttgtctcgctttgaaaagttgataactttagtcttcttgtccaaattgtctcatcttttatttctaggaattttatggttcataacttcaccatttaagatgatttgttaaaaatttgtgctgtttttccttcccttgagtttttcctagtagttttgaacttggaagactttaatgggacttcactctagtttgtgtttctcttttggctatctttaaggtttctttttttaattattaatatacattgagagtgtgtcatttggtttttgagaataatatcaacctagctaaattctattatttagccttttgttcctattatcatttttattagatagattaaggaagggaaaaaaaaaaaaagccattcacctaatgaagagcagtgaagttcaaatgtatttccttgctatgactacaaatcaaaagaaattacttccatggacccaatggccaatagtccatgttacatcaacttaacgagctcataaagttatagtacaatcaaacctgatatgagggactccctgcatcttcgaagacaagcttagtgaaaattatatccccgtggactagtgatggtctcctctcagcaagcccgagaacttcaagggacaaaaattggcttcccttcctcctgaaataaacattctccatgtcatagctcctcatgtcttcctgatttaacaaatggccaatttttagcacccaaaaagaaaaagaaagattttttgttacatatcttatgaaataaagaagctacctccaattgtagctcttccataataattaatgttttaaagaaagtagaatagtttcttctactagtaagcccctctaaaatacaatcagggacctgattttcttgtagaagttctttaatatcacttggaatatcatatcgtggaagcctatttctgacaaagtcgcgagttcctcttgaaggacgtggagctgtaacatatgaatccacagtaaactgttttttctttcttatgttttttgaataaggattcctggatgcaagagtatgagaaatcttatcatccgccaagagaaaaacaactctttctatagtttcattatcgatatcaaaatgaactattcctgtgtgcatacacacttccttgggtttgcaagagagccacaaagtcaaagtctcaccaggctgaagcaccctgtcttccaaggaatgagactcaaggaatgcttgtatggctttcacatcagaatctgcccgcggaggctccatcagggaaattgtgaaagtatcttctggggttgaagcataaatctttacaccccagagatcaacaggttcgggagttgtgttccttattgtaattaaatctgaagttgtttctccagcaaaaattgatcgaggctttccattcacaaatgggaaaggaacagaaacaataattggaccttcttcctctgggttgtaactacaaacagacctgtcatcttcatagtcaatgaaaccaacttctcctttatctccaatgacagagcattcgtccccccagtcatcaactttgctcatccttactagagattatctatgatgttgtcaaaaccaattaacaagaaaagcacgagcctgacaaaatatataagtactcaattcacagcaaaaaactataaaggcatctcaatctcttgtttcttcacttgaaaaaaaccaataaaaaagagcaagagaataaacaatagcatacattgcagtgaaaggaggaaacaactaaaattataaaacattttactgtaaaacctcaactcaaacatggattttttccaaaactctaagaggggaaagagtttttcttcccccagtcacatttatggctcaacacaaatttggagtttttgtgtcacagaacagaatagtataatttaacagaagatacatgagcatacattataaaggataaacaaaccaagtaaagttctccaatcaaaagaaccaaaataaaaaaccaaacgactaatccactgacattagctcttaagtcttcccttggaatatcccatcaagaaagttttacaaagatatctagaagtgtagcttgttcctctcaagtttcgtacatgaaatttttctgagggaacactaaatcactaggctacattattgaatcaaacttggaccaaacaatggggttaaagatcggaacaacccagaatgtcctttggaagaaccattgtagatactaaaatgatgagattagaatgaatgaaggttacaaagtaccttcagtccaaaagaaaaacaaaagcaaaaaaagtttcacattacaatcgtttggttcgctggaaatttatctagtggaatcaattattgtcttgaaactcaatcaaatccacaccaagtgtgaaattatacaatgaatatagtattagaggaaattttatttattattaaaataaaaaagaaaaagacgttaccttgagaataacaaaatcccacctttgatcaaatctcaaagcatggaatccggagagacagaagagagcaataaagggttcaatgcagatcaatgtagaagcagaaaataaacgcaaagacgggacctttctttcactgctcaaaaaactaaaccattgctg

SEQ ID NO: 43188 - DNA, 6984 bp, Cannabis sativa
ttacctattaataaccctgctattagaggtaaaaaaaaaatgtaagcatatggttacaataaaaatgtaactattgaatagtcacctatttctttttattgtaattctatttagttatatcttctcaattaaaatgtaatttactaaatgtattgttttttaatagaattttagtgtacatctatctaattaaaattattgtttgttgtaccatgtgtcaaaatctcaaattgattttttttttcttttttcttaaaaaaggcaaaaaactaattgggttaccacaaatctcaaattattattagaaaaataatttgctttattgaaaattgaactcatatcaaacatgattattgagtccccataacaagaaagaatacatctttagacttctaacatatatctctctcactcacaccctgcagaacaagttattagaagaattcagagctactgtttcacaacattcaaacctttgcctataattttattattggaaaaccaatacatttcaccatacaattaaatgttattatggtagatacggatgacccttgaaatttcttaaagtgaaaactcaaacatcaatggacacccaagaagtggttttgtattaaaaaaaaataataataataaaaaagagaaataaacccatctcatgttgataacttgataaggactagtcttccttgagaaatacattttatttcttataatctaaaagtaaaattgctaactgctttagatgccgaatccactcctgtcactcaaaatttgtaaaccatttcttctgtataaccaagttctttaagtatgccagagacctgcaaaaaaaggaaaagagtaatgaactcatgaaactatgaaagtgtaatagtaataacttttgtgtgttaaaaaatcaggtttatcttcaaaccgcaagagacagaaatatggctactacctctccttgtgaccagtctttggccttgccaccagaaacatgcttcatcatcccaggagggccacatacctgcacaagtagaaaaggtgtcacatatatgatgtaaccgtattttcctatatttatcttcaaacctgtatgtaaggtttcatcaaaaggaaaggaaaggaaataaatttaaatatgaaccagatctatagagacaatgcttgctggtaaagggattcaaaaatgtctcacttgtcatggtgcttgtaaattcaattaccagttcaattgtaaacttattacttacaaaagtaccaagtatctcgcataatgaataattctaatcaaaccaacattgaatcgggaaacaatttagaaaccaacaaccgtcttatagtgaataaatgtatgattaggatagacttagtctatataaaaccttttaaaagtaacacttacaagaatgagagaatcttcaccaggaccaggtaagccttttacaaccatctcctttgagataaaacctttgcccgctttccaattttctgttggattatcaactgtatagaatacctgagatttttccatgccgtcgaagtaaagaaagccaaatttgtatgagacaaatatcattttcgatgtgttcagcaatgtagtatctatataataataataataaaaagggtacctttaggtttgggtggctcgctgcaagtaagtcaagtttctgtttaagcagtatgtcatctggggagacgttagcatacaaaagagaaacctgggagaattgaaggcaaccattaagtcaaaatgagtcagacgctacagattgttgtaagacccaagtaaaaatcgagagccagagagagtgagagagggagaaaaggagagagaaagagagcttggtcacttcacatacaatattttaataatgaaacaataagtgaaactgcagcacttataaatgtccaatttatctttgaactagatcaaactatatgaggtggttctgaatcttttaacatttacatgggaaaagaatgagattgtgaaattgccaataagacagctcatgtctcacctgtgtattgtcatccggatttttcaggatagcctcaataacctgaagcattggagtaattcctgtgccaccagcaatctagacaaaagagagaaaatgtccaattgctttttagataaggttacaatcatgttattttagataaagtttatcaatcatgttattttaggaagcactcaagaatgaacacatctttaacaggaaacagattgttggcaggagagctacagaatagatgcaaaaccaataataactaagggggggtgggataatcaatatacagatactaaatttttccgcttaatttatgttatagctattactactacaccttcccttaccattccaatgtgtttcttcatattgggagaatatctgagcttttcaataggcctgtgataatacatgatgttgattatatacattattacaagaatatccccttctgataatagttgtagaaaaatataaagtaccctttcacttcaaccacgtcgcctggcttcaagcttgcaaaatgctgactcatttttccttctggatacacctgcaattaatagaagaaatccacaagttacgcattaaataaccttaacaacaggaatatgaggagtatgtgacccccaccacattgaggatatgtagaactccagataggcataccttaatcaataaatcaaaatacccctttgaatctggatctgatatgggagtgtacctgaacatcaacgagatgtacataaagggggaaaatactaaacataaaataacatagtctagttaagcaaggcctcatttatatttgtacagtgtaagtactggtaactattactctattatgattttctcagcacaatgacaaaaattgggaaaatagtaaaatgctttaaatcgaggatgttatatttgaataggaacttacgggcgaactacatattttggtttcccttcagcatcttctcctaatggagccctgcagttaacaagaaacactgttcaaaaacaaagtggaaggaaaaagagaaaaaaaatagaagctgattgcttgcaaaaagaaatttgagaaccaagtttactaattttgaaaagcagtgtaccgcgtaaggaggcaggaagcgacatccaaacccaacttggcggagggatcaaatgaaaatctggtattttgtgaagggaaaaagaaagagttaacatttttacccaattataaaaagttaaaataaataagaaaacaggcagtgcaacacatgaaatcactacactgaagtcacacagataattcagcagcttctattccattcaaacaagtgagcacttacctgaataatttagtattgtggctaaccctagcagtgtcttgcaacttgaattcaatccacgcatctggatttaatgctgaaaataggtgacacacccagtgagcgtacatgctatgatagtgttatggaaatcttaatccaaagtccttaagatagttcagctttacgaaacagttcagaaaggccacaacttaaacatgtacgccaaaatttaacgcatgatcatctgtcatcaaagaaaaggactcaccaacttttgggcctgtttcttccttgattgaatctagttgaacctgttagagcacaaaatgaggaatagtaaacatttaagacaattaaattttcaaaggaatgtattaaatctacaagttttcactacccttccattcatttgacgacaattttctttaaacatcatttcagcaaatgataaagaaattcacaacagtctgcacatactccattataaatattaatcaaacagattcattattccaattcacgaaacttaatcataaagattaccgatcatacaaacacaaaaacctttactaacgtttacaacaccaaaatttgtatcttcaacaaatcagaatcctctcatcacaatcaaacactcaaaattgcatcaatcgagaaatcttaatcacaaacccttaaagatacaaaactaaccagcattgcaataagcaaggaaaaataaataaaaccctaaaaaaataggaatcacaaagaaatgattaccaattccgaggaggaatagtagtacaagtaagaaagtccaccagaaagtgcagcaagagctccaaaggggataccagttgtggtggacttgcgttggccatgaaatgctgctaatggagtagctttagccagtctgtgaaagaaggaagccatttttgtttggttttttaagctcagaagacgaaggagaagcaatgaagttgaaactagaacaaaacgagaatagaagcaaagaacaaaggccaaaaggtattttattccctacttccgatccattattaaagtttaaggtcaccttacgtgggtgctttttattggttaaactatgtaaggaagaaaacaaataggttgactttgctctatgggatataatgaaaaagggttttgaggagagagagagagattcgctatggaaactggaaaccctaaaaattaatttccctcactcgtcttagccgcaaccagccctagtccaccctccgccaccacgcacgatcatcttcccagcctcaccgtcggcgacttgcttctggcacccacgacaaggtgcagccttgctcccaccgcgcacgaaaccgtagcgtgcttgcttccaccacacacgacatcggcgcctcccaccaccctccgccacatcaccacctccatctcttctcccttccacgctcaacagctcaagattttcttcccaccctctgagctctgtctatttctccctttgcccgagacgaaaatgcaggtttctaactcacactcatggtttttctttgatttctttacttttttctaattgcaagctcactcacatccttggtttctctatgattctttttcttattcaactatttgtctacaacatttcagatttgaggtaatccaacctcctcttctttgtttgtgaaaattttcggtaacactcgaatccgttgtttaattcagatttttgtatatttatgtgattgtatatatgtgttctgttcaataatggcataaattttgttttatattgtgtttgtctcctctgtttggtttaaaaattgatgttgaaattaataatctcttctttgggtgaggtgagatgagttcagttatacagtagatttataagtgttttaatgttgttaggtaactttgggtgtggatttaatattataagtatctcacaacaatgttaacttttcttgtatgacatatttcatttttttctattttgtttctcaacaaggtccacactaacttattttgaaatagctatagcatattatttacaattattatctgatatgccgcttataatattttcaattatttacagaaatcagttgcatatctaatcaacttttcagtgaagttttctttgaaccaacctctattttggactgcttatgaatttttaactatgaaactttgctataaaatttattacgatagtaagagcatctccatcaaataagtgatgcaaaactaaaagatatctcatttagcaaaaaaaatgtgctccaattgatgttttagaaggtgatgcaaatttgagacatagtgatctaatttagcactacttttgtgatgatgcataatttgcatcaccattaatacactactttttttatttacttatgtatcatttttgttatttgattaatatatttagctataatattacattatgaactatttatattcttttctgttgtttgcataataaaataagaataaaattaataagagttattatttctttaatatttttatttaaaacattaaattttgcatcaaactttccaattgtacattggagcacaatgttaaaaattggtgcaagtataaaaaaattttattttttgtgccaaatataacacattttttacattaggtaattttttttttttgcgttattttttttgttgtcttattcatatctttttctttttctcctttgggataaaattatgttaggctttgtgattagaaaataccacgaaagacaaagacagcaaaattaaaaggaaaataacaaactaaaagaaggaaagaaaagaaagatgcagcagccagcgtccatgatccctgtgatgccttcatttccacccactaacatcactactgagcagattcagaaggtgccattttctctctggtctttccatggttgatgtgttttgtctttgaaagctgaaagcttttgttgattaatttgtgtgtgcgtgtgtatgtgtttttctctgtctaaatcatttttttgtatctttccttttttttactgaatttctttgtttattctttaatattaaaaggttttatttttcaatagtgggtttaggttggaaattgtttttgtcatttatagctataggatcttaatttggcagcagaaagacatgaatgggattagttcaaggagtggaaaaatataactttatttactgaggaaatctttggtgaaagacaagatcattttactttacagattcattgtgtacttaaattttggttaatggcgatttgatgcaattgtataaaggaagatatttaattaatgttgttggagagtgtgtcatacaaaaggttgggattcaatatttaaattgtccttgtcagaagtttttgatacattctgagtataaacgttatggtatttaacatattgcttttcttaatatgttatttcacaatgtgttaatgtgcgaagctgggagacttgaagttggatttttgtttgccctttgcctgaactttgaagtaatttacttttcaatggatataggatcttgcgtatcaacgtggtttgttagtggataattgtactttaggagcttcccacgctaaattaactaaaaaacgaaatctttaattctgttagtatatctgtatataattcctttttatggatatcactatcaggtata

SEQ ID NO: 43189 - DNA, 2523 bp, Cannabis sativa
ggtttattgatgagaatgaaaaaaaaccagtggcaagatgtgattgatctaaatcttactggtgtctttctttgcacacaggtgtgcaacaattttttattattgtactttcctttctatttttttttcccaaagaaaataatggtggtcctatgtgtgaccatgaagtttattccatctaacattcttctcttaaacaggctgcagctaaaataatgatgaaaaagagaaaggtaagccttgtctgaaatatattttgtgccagtggagatttttttatgcagaatattttgtcaacaatttggaacaagaaacactataattatataatttctaggccaaaaaaaaatcactcagtttaattgtatgtgtacgcttgggagctcatcaacaataatttttctatttgagacaatttggcacctcatgtcagtagtttagtagggtgtagtgtgtatcttgttctctgcaactgactgaagatgagatgtttaactttacgctcagaatgatttgtcttgaattttgtgtttatttttttcttctttctgcattccctaagttcattatattgtcctttcttttgcaggggagaattgtgaatatagcatctgttgtcggtctggttggaaatgctggtcaagcaaactacagtgctgcaaaagctggtgtgattggtttcacgaagtccgttgcaaaagaatatgcaagcaggaacattaatgtaagtaatctaggattatattataaactgtattgggagaggtatcatttctattttattgattttgaggtttcttgttcttgattatgatatacctcaaagcaaataataaatcctcctttttcataggttaatgctgtggctcctggttttattgcatctgatatgactgcagaacttggagaagacatagaaaagaagatcttggggggcattcccctaggtgagctaaataaatgtttgctttttttataattataccactgaagtgtatctgcagtcaaaataagatatgattaaggttttaatcactcccgcaggacgatatggtcaacctgaggaagtagctggactggtagaattcttggcacttaactccgcggctagttatattactggacaggtacaatcctatacttgcaacttctgaaagaattgtagccaaaaggaaaaatagtttgtgtggaaaaggtgatatgtatttgtgttctttcattttaggtctttacaattgatggtggaatggtgatgtaaagccggagttcagcactgttgccagtttcaagaacaattctctttcatataataggtcttttttgtttagtttcactgttgataagttcttgtttctgctgaataaattacataagataggagaggatattttgttctgtttttgaggggattttatttttgtatgctttattttgaactaatatgggttttaaggcaaatattctatggaaacatcaaatacaaaaggaaaagaaagcctttactaagttaactttttttctctttttcttttctttctcttttcagtcttatagggagtaattcttgtaacatcaacaaaaaatggattttgccgcatataaaaagccttctctcatctatctaactactttacaaatcaataccatttttccccctagagctatgttgcaccattatttaccatggtcccaactcttaatcctcaaacataccctcctctgaaaccttagaagattcagtcccattaacatgaggctggtttgccatctcaagactgtattcactcagaatgctgaaatcaaaatcatcatcgtcgtcatcatcgtcatcttgacttccgtctgaatcttcatcatcgactactcttggcttaattcctttagcttctctttccgtcttttgtttgatgcactcatcatatgacatttcgtaccacacattgcccttgccaacaatagatttgttgtgggcatctgtcattcgctcttgcttgctcttctctgaattctttggctctccccagtagtcatagcgatacagagcactgtctgggtcatattgatccttcccaaagtaactagcttcgacataccttcctggctcttctagtggtaatcctagagcacgacggctgaatcaaaataataagtttcaacatttagtaatttagaaagtttatataaactagacaatacaatactagaagcaactagaaaggccataaaaaatagtaagctatctctaagagaaaagtgaacaagaaaaccaaaaatacatataccctgtgaaaagataacttatgtgaaccgacatagcaagcttgctaaaaatgagtgcacataagtttgtaactcttgcatagagtggaacataagactaagaggaattaccagctcatgtctctgatcaaggcttctcgttcctcaaatgatcgacgccaatgcagcaaatcatactcatccatctcatcatttcgtctcatatttgttactttgtattcctctcctctttcttctgcttcc

SEQ ID NO: 43190 - DNA, 3934 bp, Cannabis sativa
ggctctataagaacaaagttttcatagacttattcttttgctaaattctgtaaaggcataattgagcaacctcatttacttttcttccagcctcttcaacatgctcttcaagggctttcctcttcttgctatccttatcctttaaagtttgctctatctctgtaatcttcgcagtctttttctcaagtttaagggttgtttgatctttgaaagttttcaagttgagattcttcttttcaataagagagatcatctttaaagcagaatcttgctcgatagcgagagttttttttatcctcatacttcttcaaaagatgattactacgagaagagtgctaagtatgtaaagaaaagctcttgcgagccattagagaagcctgaattttgaggaaaaagacaagaattagaacttcccatgaataaaaaataggatggataatccagcagttttcaaaaaaaaaaaatagtgaaagaaacgagcttctctggtaagatactcgaaaacaagattggctcttacaatgctagctgaaggatccaagagaagagatgagtcgaggagataaactttgagtttcaaaatgtcacaaaacatttgttttatcggcattgtaaatttccttccctttttaagtttcttgagagccatctcaacgtcaaaaaccttgttgcgggttggaagtaggaagatcttgtgagagagaggggttaagatccttagaaatacttacaacatgaggatcagacttttgcttcttaagagccactttaggtttcgaggctccatctccttcttttttgcttcgttttttccttttttcataggaaggttagtcgggctctgaagaagttcaacaaagtttaccgattatgtaaaaccaataagtaagaaatgagtaaattcatagataaaattagtaaagaacaccaaacaaaaatccataaagtctcacccaggctactatctgaaaagttagttgagagtgggtccactcgagtattattttactctctaaagttagtaatttcacaaatatctaatgtgttaattgggctaagatcctaaatttttactgaatacaaattcgagctatattggtccgtgataccataatacgagttgttgctagtaacttggacatgatatttggggtaccaactatcaaacctatgggcaatgagatcaacacaattccaaataaaaaaagtagtatttgatatcaaagaatttaactagacaatttcattcaacttcgagaacagttggggaccatctataaaaatgatttttttacctcggggagccccttcaagtttttaggcaacatcccgagaaattgtggctttgataattgcaacacaatcttaatcttcttcttcggagaggacccttaccgatgatcaagaagagaattttcactctttcatattcacggtagactgatcctttccaagcaacccacatgctactaggtttggcttgtgaaggagtaaacttgatgccctcattctaaatgacaaattcactagaatttggtgacgttgcaacataatttcagatggagtaggttttagcatcattgttgttaaaagaaaaaggaggtagtgagatttgaaacaaatacaagaaaatcgtcataagacaaacaagaaaagtgagttatgaaacttacatttgaaaagttgtataagcacaaggatgtaatttcataatctagaagaattggtccttaattctttcttgttaagaatgtcatgaataactttgtgatcccccgtgtaaattctgagatagaaaaagcctctagaataattcttcttaacaggaatcgctttgagggtatacatgcaagtaatctcgtatggctcgggaccatcccatcccaacatatgaaataaggatttaagagaggctaaaatcctatatccattagggatcaaccagaatgaaacaattctaacaaaattgcaataatctttgaagtagaggaagaataaccccaacacgtatatgtatgttcaacactccaagctccaatttttacaaaacagctcgtactacactccaagtcattagtaaggcaaccaggcggaaagcaactcctcttttttattcctcaactgatcgacatacaaaagcgttgccttgtttaatgccacatgattataaaaaaggcctggcatatgaagccatagaggttactttcgattcaaaaaaattggcctcaaattgtactgtgagatcttgaggaagtttaggttttcaaattttgggaggggccatgatttggatatctaaagtaccaggtgaaatagcaatgttagcaaggggtcaaaataaaggttttaccaaaggatacttagtaagatgaagaggctcaggccaggcaacttctcacagataactcacagataagaacgtttatccttagctatttcagttataaatcatctaaatcgagcaaaaacatctagcttatttaatctcactatatgttgaagaattttcacatcattatcttcgagttttattttagggattttggggtttagtttaaagagtaacacggaagaaaaacaaatttcatgataaaaagattttggatttcaagttctgtgttagatagattttttttttcttaaaacctagaattataaagatcctataaatcacccattaccaacgttatctcaaaccagtttaaaaggaaaaacaagactctactcaaaaaatgaaaagttcgtaaaacaaaataagtaatgagataaaaaatcaaatgaagtattgtggacaatgtcctacatagaataaatggtagagcattgagtcatatataagaacatgggctactccactcatcactaattggttttgagatggaacctcatgattctcaacatggtatcagagacaaatcccttccgggcatgtgatcctatccgatccgtacctatacaaatagtgatcatgtccactctggtacagttcaagattgatgagccaaaaatagccactaccttgagtgagaatattatggacattgacccacatgaaataaatagtagagcattgagtcatatatatgaacatgggctactccactcatcaccaattagttttgagatggaatctcatgattctcaacatgaaaaattaaacaaaaacttattttctctttttttaaagcactaagggaactctcaagggaatagctttggaaattttcaagccttaaggttttttagcaaagtgcttttttgatagaaaacttgtcatcccaaatgagcatcaaagacctctttttatagtatttttaatattgcaatttgaaattcaaactcataacctctcatggatgttatggactcaataaaagatgtaactcatgtacacaccataactcctgtaacattaagaatttcaaattaacatgtgtaacacctttttatacacttaatatttgtgataattttggaggttactcatagtaacaagtaactcctctatatattataaagtgatgacaactaatatattatcatatgttacatattattgatttattacatatatttaatctatatagtatattctttatatataatattacaaacaatgctcaaagaaagtatcagaacaaaatttgaggagcataaaaggattattattattttagattttatgttttattaaaattaccgatcggaccgtctgttttgtaaaataataaattggacttgtattttcaaaaccggtacaaaatagtaccatgagctcaatttaatttcgatattgttttttttaataaaactaacttgaagataatttctagcacgaacatatgacaaaaatatatctaattttgtcataaaaattctagattgagttattattaacttttattttgacaaaattagttcaaagtactatttt

SEQ ID NO: 43191 - DNA, 3548 bp, Cannabis sativa
  modified_base (51)..(52): a, c, t, g, unknown or other
attgcataaaatacaattcaatataaaacaatacaatacgacctaatacgnngttccaaacgagccctaagagaaaaatggaatttaaccaaattaattaatcaactatagaaaatgcaaatgtaacacatctagaccgatataaaaagctatgagcactggaacagacaccatcgtcccaaagataaccctgcaataataaagaagaagtgttttagtataattttaataatcttatttatttatttatttcttatttaatattgggaataaattatattctcttcagaagttttttaagctaacttacgctgtgctgagtacttcagcatgcaatccgtattctttggcaaagataaaagatgcaatcgcttgtggtagtgctgactgaaaagaaaaataataaataaataagttcatatatatatatatatatatatcaatatacaccgcacaattaaaaattaggatttgtgtccttccaaattttaacatatataaaagtgcctagaatcatttcttttaggatggctgagaaaacttacaatcaattttactagttggatatgtctgaggtggacagaaattcgggttacatatgtaacataatgaaagttaatatatttactaattctattaccaccaaattaaaatcaactaattgaccatctttatttaaaagtagtcccatctatttcaatgtaatttatatgtacacatcgttactatattaaaaaacacacactgctcctagttgacttgagatctagtcagtatatacgaaagaagtaatatgtatgagtatgagccgtgcaaacccatcgaaataagaatctactaactttattttgcatattaattcaaaacctcttttttatattcttttattattggacagtaatctacaaaagctgttttggcagctgctattaattattctcaattactttccacacaagaataaaaaagtcaagccactaatactcgtattactaaactttatttgaatttaatagtaatagtgctgatattaattaattatagaaaattgctaaatgcagattaaactgacataagtgattagcgattacgtacacaaagtcaaaaaaattcaattccaaaataatacattctaaaaatttataaatttaatcacaacaaaatttataatttaaaaaaattataactaattataaataatatatttttacttaataaaattaatggagactattagtcacaaaaattaaaattttaaatgtatttttagtcaatatttattaaaatttaataattagtaacaacttgaaataatattatattttagttaaaataatattttattctgacataaaattaaatttagttataaaaaatttatattattactaaaactattttttttagtgatacataaatagctagcgagatgatatgacattttccacaaataaaatcagtagagagaattttataatgttttaaacaaagatcacccttaataaattcaaataatgctctcaagaccttaatggtgatctaattaatatttcttctttttagattaaagcattaatataatatatagtttaattaatctaatacctgaacgatagctacacgtagaacatcaccatgcaagccggcggcaatacatccgatagccatagcggcgggtccggcaataaacctcaataccattccaaacactgttaatcttaacccacatgcaattatctttttttgtagcgccatgaagatccctacatgttatttacatattagccattaatgtatgttaattaattaatttattataacatgacgtataattatataagtacgtacccatactaaacatggcagtgcctgccccagcttttgacatgatcgatatggacccttcaattatgcttggcatcttaatatgacacctgtacaatgttccaaacaaaaaaatattaatacgtagacattataaaattaagctatatatttagcaaaaatattatttgatttgtacatatatatattatatatattttaatagttgattgtgaaaaccgtacaaaataataaataatttgttgtaataaaataatattctagatacatttcgcacgccaatgttaaacatactccaataataaataaataaataaataaaattttatatctatttttgttcacattatttctacagaaaaaaaagttgcactacacatttcaaagtttgagagggcctataaaaccatacgcactagacacatgcatttagaaaagaaaaaaaaaatattgacaaaagaatatatatatgtgatcaccaattattttactcttgtaaagatattatatcttatattatacctgctggcgatgatagcccaaataaggccaatgaataccgcataagagttggggttcatagccactttaaaccccacaaccttaatcaacgaccagtaagactgtggagtatcactactactacttttatcaccaacacactcttccaccgcgtttatttccaaatcctttgtggtagcagcagtcaccccattatcattcaaatcagcaaagacactaatttttttgtcgtttgacgaaatatcaatcccggccgtacggtaacactcgagcacaatcaaaagaagggtcatccaaatgatggcttgtacgacagaagactgaacgacaatatcaacacctatttgaccgtacatggctttcattagaggcactccaacgacaagagaatttgtcaaagtgcacaaagaaaagcttgtaatggaccaagcatagctgcctttgttactcaacttggcccaaaaggccaagatcacaacaatgatcaccttcgatatagcatcggctgctatgaaccgatagttccacttgaaagggtcgacgtgggctgtgaaatcgaatgtgtagaggggaagagtgaagaaacaaacgaaacgatttatagcaccacactggtcaggagtgaaaattttccaccatttcactgacccataacctaatattaaggccacgtagagtggagccgtggcttccaccaccttgtaaacatcttcccactttatcatgagtttttggctatgctaccgattaaaaacagtatatatgataggtagtaacaaaaaggaagaagaaaagaagaaaggaagaagaagcgaaaaggttttttctttcttatttttacgtacgtttgagaaatattgtcgagcaaacaagaaaatgtagtttgttgtgatattttcagctctatttatacttgctcgaatttgaattaatggtatgatttaaatcagaatggggcactcaagtcaagtgggctaatcccttttgactggaagtttcgttaaataatagataaattagtaaaagttacaaatgactatataaaattattattgaggatattaaataaattagttaatggttacgtacgtgtacgattttatgcgtacttggttgggttgttgaaaccggacatgtgtaatatatataagttaatttggatttggctttgtattgttatt

SEQ ID NO: 43192 - DNA, 1884 bp, Cannabis sativa
tgactttccctgatgctgacgagtaaggatataacttggacttgactagttctgttttgtgagaacttccttgggctgaagatgggcccgtatcttgttgggccttcctgatgagaaggcaacgtgtctccgggtataaacactaacaacactaatatataatttacgttgtatatgtattgttactatgtaacatattgcaatattcacatgcatgcagattgtaagtatatatcatcataatttgttgttactcgaataatatatagaacatgtgctgctaattaattataataatttatttgcaatatatataagatcatttatgtggtatgacattttgatgaaagaaagagagattattattaataattatggcgtaaatttcactatatataaaatgaggtacctattacctaacaaagcacgagacactatcataaaatgcagcagtactattatttactcaaaaccctataacaaaaaaaaatgttatcacaaggacacaagcaataacttctcttatcccatataactataaatacatttatataaatatataaatgaaattttgataaggaccagagaatgataaataggtcgtgtgtggttaattggttgttgtgggagtagtccaataagcaattagaggaataacataaagataccaaattatttggattgtaatgtaaccaaaatgattttgtatacaaattgagaaattgtgtatatttatatagggaccatatctttggattcattatgaagatcaaattaaaggaactgccaaacccatatgccagtatacatcaaattagctggctatatataccaaatatatatacagctaaacagtgtgacctttccgacctatcaaccatgaaccaacccaccctctttaattaatttctattttatcaaattataaagttaagttgtttgtggctaaatagtattaatatgtagttatataagttcttatatcaagtagctatatatagtcgcaaactgatgatataaattatagtggcagcagaggcggaggaaaggggtgtagtgcatgtgcaacttatacattttttttttctattcaaaatgaacaaaaaaattgcctatggaactttgtcatttataaaattatgccccttaacgttgtcaaaaatatcgtattgactttatcaattagtgaaaagtaagattttctttttaaaaaataaaactattttgtccctttgaactttttcgttcatacgattccctttgtaatattggtgttattaacccttaatcaattagtaaaaattaagatttctgttaaacttgtgtaattgcttatgcggctgaaaaataaaaaaaataattaaattttaaaagaaacttaaaaaagaaaaatacacaaccaattatttataatgatcaaagttttaccagcgctcatctgaagacagtcacgcgaccatgagccaccacgagcacaggccagtcttctctctctcgtccactatttctcgtaatttctttattattatttttatttttagattaatgtatttttgaaatttttgtattttacagatcttagaagattttggggttgtgatttcggcagaaccatggcccttatctcgactcttaggggctcttaaggccaaacaaaacttctatcttgagtgctcgccaaagaagataaaggatcatgtgatgaatgaaacattagttaattatatagttgatgtttaaaaatcgtggcttatatcactataatcgacaattttaaactgtagcatatactataggcgacggttttacactgtaggctatgctattccttgactgtttttaacatcgcttattctacttagtattcgcaacgctcgtataggc

SEQ ID NO: 43193 - DNA, 3252 bp, Cannabis sativa
tcaattttttattattttattttagataatttgaattaaatgtgttttcaattgtggtctagaaaatataaatcccattcaattagagcatcaaagtttagaccattgaatttcttcatggcaaaattgaaaatcgaatatgaatttgagaagaaaatatattcttggatgaaaattatgaatagttagaaggttgcattagatcattttgtgttgtttgagtattatatacctgttgaatgctctggtataataaatgttttacgttgcaaagttgattcatttctattatacattttgtaatgaattgctgatgctgtctactttttcgttgacagtgtttaatttttagctatagcaaaatgaaaaaaaaagctcttccatttactatttagctagcccaaaaaaattagcacacctggattggattgtagatgtctatttttttgatgagcaatgtattgattatgcatgtgacaggtacatggcttatattatggacaccaatgaagaggagagggttaaggtaggatttaagaaccatagttttttactattgctctctcctaagttatcggtaaatgatgttttgaaatgccttttatggccattaagtatctaaattattgcatacatgatcctggctttaggggaaaacagttgaagttggaagggcgcacttcgaaacagagacaacaagatttacaattttggatgcacccgtaagtgaataaaattatatgcttgctttatgatttgaatgtattattgtcatggtacctgtagctcattgcagaattctgttttaatttggcagtacattatgtatatttattaatttaggtccattttagtctactaaaaggattttcaaataaagagaaagtatatgaattttcaatagtatcatcagcctgcaatcttaaatatggaataagtggacattaaggacaacgacttttattgtttaagaagcagcctgcaaaacaggcactttgaatgggtgttctttggtcgagatttggaagtgattcacttgttatatggcttgggatatagagctttcttcttcatattagttgcttatttaagtatataattggtcaatcttcaaaatataaatctgttttaatgatttaatggactattaaaaaactgtattaaagaattttcacttggatttctatttttttttattatgatggttcatgcttttttcatttgtgttttgtacccttttttgaactcttttttgttttctcaattatgtttggatagggtcacaagagctatgtgccaaatatgatcagtggtgcatctcaagctgatattggagttcttgtaagtttgtttgtattttttttgttggtattggtttttcataagggaatatattggtgggtacagcatcttggaattatattcttctttaattttctgaaataggttatttctgcccgtaaaggagaattcgagacgggttatgagagaggtggacagactcgtgagcatgtccaacttgctaaaaccttaggtgtatccaagctacttgttgttgttaacaaaatggatgatccaactgtgaactgggcaaaagaaaggtgtgttaaactattctgtcccacccaaagactcaatcctctttgtcaaattcatgtgtgaaggcacctatcaagtactaaagctggttttgtacattgataatactccaggtacgatgaaatcgagacaaagatgacaccgtttctaaaatcgtctggctacaatgtgaagaaaggtaatggagaaagttccaaaacttttcaacaaacacaatcttttactaagattgctaccattgactcatgttttatgaaatctttgccatttcatatggtggtaataagcatgcagtggcatgtgttacaaaattatagaaaaatatgtttcattatagatcataagttgaggcaatatgccctctaaggtaggtgtctgctatcaattttgaattcaattacttaggttcattgttgatactagcacatcaagtattatataagatagtaattaactagaaggggtacagtacctattcttggcctcgttgtgatttatatcatccaatatcttatgtagatgtgtacagatttatagggctgcttgcattgatacttgtttaattgacagatgtcctatttctacctatttctggtctgcttggcacgaacatgaaaactagattggataagagtgtatgtccgtggtggaatggtccttgcctctttgaagccctggatgccatagaagttcctctacgagatcctaaaggccctttcaggtatttaatatattataatcttgtgtgtaagaattttatcattaatccaaaaaaaaaagtttttttttctatcattaatgggttgttgctacgaacatacagttttatattttttccctcagatttctattattatttcatgaatattgtatggacttgggatataaaaatttagttgttttgtgtgtatgtgaggagaagcattttgaaaccacaaaatgcttggttttcattacagtcgtaggtgtaaccaacccactattaaagatacaacagatattgtagaaactaggaaaatatgttcgttataaagatctccaatttttaataaacagattgtatacctgtatatatttgatattttgtgttggagagtcagctcagttgattgctttttcttttgttctcataatttatgttgtatgtatttagcattgagaaattgatttaagttgctagtatgagagccatatttaatctaattctagttagaagttgaaaaataacttgtagttgtctcatcagttgtatatattaacatagaaattttgttaatattccgaattttacttgtaggatgccgattatggacaaatttaaagacatgggaactgttgtaatgggaaaaatagaatctggcagtgtgcgggaaggtgattccttattggtcatgccaaataaggtgatatctcttttcgtcatgttatcacccttttatctcgtctgcttgttttctatggagattgatggttttatgtgctaatttgcaggctcatgttaaagtcctcggtatatattgtgatgaagataagactaagcgtgcaggacctggtgaaaatgttaggatcaggttatcagggatcgacgatgatgacatattgtcgggatttgttttatcaagtgttggtatgcttttctcttttttacgattc

SEQ ID NO: 43194 - DNA, 3945 bp, Cannabis sativa
  modified_base (697)..(697): a, c, t, g, unknown or other
tgcttggtcgggtgcccacactaagcaaggggcgatgctgcccttgcacccgtacttcaagagggttacaaattatttttgcctttgttcgacccagttcactctcaaaggcattaaatacgtgtctgccttgttcgtcctctacgccattcaaggatggggtgtgccgtccccacacaaggtcaactggctttttgacttgaagtctacccctaagcagagcaggtcggggtacttatacttctctcagccggattgcaagtagctaacgggcactgtagacaaggatgttagcaagattgggggttttgttgacaagtactacttcgtggaaggcatggataccacatatactcggtttcaacagacactactacaaaaagccccttttaagtccattaaagttttactagataagtatttggagtcccttttgtgttggacattatatctagggacataaaaagggtatttttctagtccaacataattggactagaaaaacatttctagtccaacattaatagacatgatatttgaacccacaataggaacccttttctagtccaactttgctggacattaatctatatttttaaaataaaataaattataaataatttacatatatatactttcaaaatattaatttacaaaattatttttaattttaccatcattattattattattattnttattattattattatttgatggagatgaattgtaactcaaagtgattaaagaggtccattttggggcattataactacaaaaattataatttctagcaataaatctgaaattagagcaaagtaaacttagaatatgaaaacacaataacacttacaaaaaaaataaataaatatagaacactacaaaattttaagttaaaaaaaagagattaaatactcaaatataccaaaaacatatacaaatcaattacataataaaaactcctaaaataatgataatataaataaagcaagtgaatcaaatgtcgaaagaataaattttttacagtgggcggcggacggtggcaacagacgatcttgttggtctcggtctcggcggctgatggtggcttccttgtcgtgctttgatttgcctccatcatcatcgtcgagatactccttgctagatgaagccgatggagataaagcaatagaaggaagagatgtatcagagtgggctgagagaacgacggagagagcgtgagagggcttcacaacatggagaatgagagaaaggagccagcaacgaagctcacagtctccgtttgggtccacgaacggcgtagctcacctccgttggaagagaaaccaacacgaatggaggagaatgggatttttcgaggctgacgacgagatcgtggtttcgtttggggcggctccgctctgctcttgtccgatctattattgctggttgcgatgatttttttttaacctgtgaagagaatggttttgagaggagcggctggttatggaaatattagggtttttaactttttaatgagagagaatattaagcaaaaaaaaataaataaataaaaattgagatatgtagctgtaaatgtaatgtccgaattccaagaccaaattttatttatttatttattttatttaaaaatgagttaagtctagttaaattggacattatatattttttatagtccaataatattagactagaaaactcccaaattaaaacaaaaatttaacaaataatattaattaattatatatcaagtcctctcccacttttctagtccaacaatgttggacatgatgtaatttttttctagtccaacaatattagactagaaaacttttccattttttttatgtccaacaataattttgttggacttaaaaaagggacattaaaagggttttttgtagtagtgtttctatccatatgaatggttagatttactttttcagttgaattctaaagttgctatcacaagtgtcatccaaataaagatgagcttagaattttaaaattctctcactcaagtaaggtactgtgatgctatgtctaagaaccttattggtatctattttattacaacatcaatatattaaattggaacaaaatacaagatcaagaataaattctaataatttgctaatttgttcattatattacatccatatttaatcaaaaatatgtgtgccataaggatactgtggtgtattaagtatagtctagcgttcaaaatgaattacatatgtcaatagcttcatccatccctaagtgttatagatatcatgtggaattatgaatataatccagagttcaatagatataaaagattgttgaattgcatatatcattcttaacttctttcacccctatcagatcaaaagatctttttattaaacaaaatcctaataattgcttcagaattaacaattattcataaactttgaattgaaaattcttagtgtttatgtggtattatctctttgcagagaagaatataccataaattttgtattagtaatataacacaaactgtaacgccctgtccaattgggacgccacgtgtgtgcttttgtaaaattcttatttagatactatataattataccaagacctatcacaatggaaggactagcatcagcctcagcctgagtcagggtaaacactctagtcgtagtagctgtgggcaattcctcttcatgtgacccactatcccacagtggaaataggccctggcctgacactcgccatggtggcgccttttacatctcgggcattcagggaaactctgccaattttcgttcccaccatgacggaaaccttggttaccctggaatattttgtttgggcctgcagctaatgattcactaggccttttcttgcggtcaccgagatcagtacccctactagaaccaacacctgatgtttgcttccacgaatctcttctggcaatatttttctttcgtatctgatcttctgcaccctcagaaactagggccagttcaactatttgggcataagttcgagcaacccctagttgtttggaagcaacaatcacatcccgcgcaatatgttcatccaaccctcggataaactttgcttttctaacagcttcagtagccacctcatctaaatcaaattttgccagtcgatcgaacttagtggcatactctgtcactgtcatgctgccctgagtcaatcgtataaactcttctgcctttgctgcccgaatagactcattatagtacttctcataaaacaaggtccggaaggcatcctagatcatgttattcaggtcatgaccctgagacacaatctcccacaaaatacgggcatcatctcgcagcataatgatagcacacttgacccggtcattatcttcgatccgcataaaatcaaaaatggatgttatcatactcatctaatgcattgccttgagtggatcagcaccaccctcaaacactagcgggttttgcttcctgaaccgctcatacaacggttctaaacaattccttgcatccggtggcactaccagaggtgtcggaggatcaggattagggtttagagcaggccgagctcgctgctctctcaattctctaatttgttcaccctactgccggatagtctcttgcatcacagcatataactcttcccagtttggtggtggtggagggttctcgccctcaccagcaaccccgagcccagctagctcgcggttacccgtaccagtctacctcaggtgcataatctatacacctgcggttacatcctaggtaataacaatattgttaagtatttcatatatcataatccatcccacacacttccatataataacacaattcataaaatcaggcaaccagataattaagaaattatctattaattaaaagcttactgaaccatgagtcgaacgagtcttcgtagccgatgtacatatcaaaccagtcttca

SEQ ID NO: 43195 - DNA, 4265 bp, Cannabis sativa
tcctgcacagtagagcacccgtgagccaagtccaataagacagtataaataacgatatacaatatattctcaattcaaataaatattgatgccattctactgtctagttagcatagacatatgtgttgcgctcacatgtctatttataataaggcattagattagtttatctcggttttgattactgagtctaacctaattatgcctcacctaaacaattctttatctcaacatacttagcatagtattgcattcaaaatcatttaaacactagagtaataaccctagatcgtataactgctcactttaggttaataaccctaatctcagtttcttactcaatgacaagcataatatcaaatatgagcgccacaacccttaactctacttgctaactactgtcttacctaatatcccaagtatgtggagattccaaatccctgggtcttcttgagcaagtgtcggcaatcctagtcacaaattcttgtgttttcacaaatagggtggatcccaaaattcaatttcacataatcacataatttgcatcccaaatacagataagcatatagagcctgaaacgagccttcgaacgatttaagaacatcccaaacagagtctcgagtcaaaagttatggcaaaaacaaaaacccaaaaattcctagggaaaatagggcctcgctggggagagcaacgtagaagtttcccacatcgcgacgagcccagccgtggccgcagcaaggggccctggaaacccaaaaatagcaatttttacataccctcaaaaaataaacgaaaaacctaccaaaactcaatccaaaaaatgctcaaacctaaaatcaaaaccttactaacatactcaagaattaggcaagaaattgagcttaaccaaagctaacaacaacactaaaattaacaatttaatcaagcccttcaaaaccacgactaaccacaaccatgaactctaacttcaaagcattcaaacccataaagaatacccaaaaaaaatagagcattaaaccataaattaaaccccaattctcaaccctaatctcaaccaaaacaatctaaatgcactaaagataatccaaatagctcaaacacacaaaattaccaagatattatccgaaatccacaaaaaagaaatagcacaacatgcatccatagttaaaaaacatcataaacactaatgatcatcacaatatttaacatttaaattcagaaataaagaggtaaaatagcaccctcaagcttcaccaacaaaagcaagcacaagtaactccaaatccaagcttttctctaccaaaatcaacaaaaaaaaaaaaaagagatgaaggagagagagaggtggggtcggctagagctaagaaaatttagaattttttttttccaatttccaaaatttcattttgttgaaaatgcagtagatggtcaaatgaccaaattgtcattaaggcataaataatgacatacataagtatcaatggtaaaattatcattctaatcacacatatataacacattattttagatttcctcaattatcatattaatgccaaaattaaatcccaaaaatgtattttgggtcccaaacctggtttggcccaaaatactcagttgtgactataccgtgccaacttgttagaaaacacatgcacgtagatagaataaacatactatataataataaagcccataagcacgatatatcataaaattatatgttgacccttctcgagtcaaaattataaaaatgtccctagtacaacaacagggtcttaaaatacaatttatcagtatagtttcacatattaaattatataataatataatttcttattaatacataattaaactcgttagggttgctaatccttctgatcatgatacagagtgttgttatggccttcataagcccaagtgcctctcacagattttagagtttagtgtcatctccagctggccttcgagtattagaagtggacgagacctcacaactaggagtggtctgattggtagttgtactagtgtttctagtctcttgtacgcttggcatgaacccaactagaggggaatttactccacgacctaccgtaagaggttgtgcattagcttgctcagcgtttgttcctagtggcactctcatgtttctaggagtttgcacgttgggatctttcaccatttggttgccttgattagtaaggcctccccatcaagtttgtacaaccatcctgttcacctatcaaaacgaagacaaaggcttgtgtttttgctcttaatggaagcaggaaaatgttgacctcacttctagccaatcacaatgagtcaaaaataaagcaattaaataagataaataaaagaaagcaaaaatagtaaagtaaagtgaacaccatattttaaagacgtttggccccatgagaatggttatatcctactccccttgtatttgtattgacttgagagaaggaataaattattcttcctctcgaaagctcttataattgatctctgagttatttctcctcttagatcactattctctctcttaagtgtatttctgaatcaatttttcccatccctttcaaattgagattatgacaatatttatagggccttaatacatgaagaatgatttccctttgtctataataaataaaataggaaacaatattaattttataattacaatgtaaagaataggaaactaaagtgtgttgcctctattctctgactcaatcccacaattatagggattatctttatgtcttcgaaacaatgagattcatctctgaaatttccatcttacaggagtcgctcggcataagaatgtttgcatcttggtcggacatcgtctcgaccatcctattcgggtatccaagtgttacaaatgttaaataaccattaatgggctgctaggaatactttcctttttcaaggtatcaaaaatgtgggacatgtatcatccattcttgttaccacgtcaaggtgctaaaaataggataacattttccccccaagtctgcatgagaccttcctgatcacacgtagacttcactcagcctggagtcttgtctggatgggtgacgcatgtctttgatgatggatgttgattcaatgtgactctgactacgggttctttgatatctgaccatttaatgcttattgacgggtacacctcgaattagggttcgatacttgagcacgattgatagttgtactccctacaatgagtgcttaacgtctacttttggtggggaaacccaaaaatttgaattttgaaaagattaattcctttttcagattgcttataaatagagctaggagcccttggtataacttttagccattttaattctaaataatcagagcaaaagattttcagccaagttttctcccaaattctttgagtaattcatatgaaaactcttgacaaaactatccaagaagggcaagaaagcttcaaattagtgagtaagttcttcattcctttcttttacacatttgcactgaaatgcatgtatggtttctgaaattttgtgctatgaattttgcatgttcttgaactattataaattaaccatagaataactaggtttaggatttggaaatttcattcatgactaaccataacatctgattatctaactgcgcttcaattttaaccttacaacgttcattttcactcgtccataattttttagtgaaaatcagattccaattcgatgtttcaaacttttaggatcaaagattctatttttgggtgaaaccttttcttttgattctgaatcagccatggtcggtatacacaatctatttttcatttgttactccaacaaactcttaatctcatgtctcccaccttttgtagatgaatcctagagagttttggggaagcaagcatcatatctactaggattttctttaactcttttaccaagatcatccccatctcagtgttagcccatcctcatctagtgatgatctttcaaattttagcttcaaagattgggaaataagtagcaatcgtacaccttccctggagctcgaggtgcaacatcattcctatcccggtcagattcgtggtgagggatacgatcatttcatttgggaacttaagaaaggttggaggcattatcttcctgctagttggacgttagggtccatccaagcatggttgataaattgcgcgagggccgcccggccccagctgctgagggaaaacctattgctatttttgttttgaatattgcagagcatacctctgataa

SEQ ID NO: 43196 - DNA, 4745 bp, Cannabis sativa
  modified_base (4598)..(4603): a, c, t, g, unknown or other
aattatttttgaataaaaaattaatttttttaaaaaagttgaccaagttgactgggtcaactcggccaattgaaacctgccaacccgtgccctatttgggtctgtgtttgatttcatttttttgaactcgaaacctgtgaacccgaaactcgtgaacccgaaatttggtaaacccgcctgatgtttagccctaatttcaacctctttcttaatccccttatataaaaacacttgtcagaatatatttttcagagtaatgtttgttttagttataatactaactctgtaaattttcgagtagtttactagatcgacaatagagtttttaatatttcaatatactattcgcgtttcaaaaaaaatttaaatttattttcagcatggcaaattattcagaattttttagaatttataaaattaacagtataactataataaatattaccataaaaaaatctcgacatgtattttcaaaaattgtaattaatactcctaatcaagtattaacaagttgagaacttggctaattgttataaaccacaactatatatcatgatcttctatattaattgagtttttacattgtgtgatatcatggtttccaattatgtcccttatccttccaactatacatttctattttctattattactagctagcctattcgatcatatcattatcaactgtttaaatctcttacatctttcttagctggaaatatacaactgataagcatgctattgctcattcagttagaacaaacccctattcttgacatataaaaaacaatatataatcacattgtgttattgatcttctcaattattaccattatacataaacacaacaataattttgtattaattaattcaaagaacaagatgggaatcgaacgtttgtacaagtccaataataacaaaaatgttatgatggttgggtttatgatgatcctcttagtgtgtgtccaatttattggagtttctaatgcaagaactttggaattttgcaacaaccaaggaaaaaaacatcttgaagattgcatcggaaaaccggttaataacccaaccttcaacggagaattttacgagggcatacctaattcgggtagagccatccatgtccctaaggtggtcctcggaaatgaggcctagatttgactcgataattcttctaattcaatccaatccaattaaatatttctttttctttaattaatgtgaaaatctttaaaacataaccttatttgtatgttttaaaatctgtgttagtaacatcaataatttgggtcatttttccatgtatttaatgtatagaatatatggttggttggtgatccttaattttattatgtaattgcttcatgaaataatatataagtatatatttaattttagttcatgtcttatataaagacttcaggagtttaattaacagattaaagtcattaataataataataataataataatatacaaccagaagagttttattcacaaaaacatttacttaaaaataataccctcaattgaaaaatatatataaaatgtttaattactataaaaaaaacttaaatgttagaaaataaaaaaatttaaggacttaattcaaataaacaaataaataaaagaagaagcaattttctttcttcattttatcatatgcacaacaacaatttttcagtacatcaatcaatccatacataaaaatacataaaatacaataaaatttaaaaaaaaaaaacaaaaaatacaactaaaatattacatctacaaatagtggttcgatcagatcaacgattagtaaggcattgactatccttatcacaggtcaaagaaaaaatgacctataattcttctttcttcttcttcttctttgacaatcataaagaaatagccacctaatgaatcaaaacactacaacaaggatacagatacacagttgtattgtatcatatttcttaatatttaacaaaattaaattaataaataaaaagagactcgcatgagtggcaaattaagcatattatatagaccctcctccttataataagcaaaggaaatggcattcttcatatattattattattattaagcatactgaggattgagtgctatagcctcctggtagatcatatctttcatttgttcttctgtcaaaggttgttgttcgaattcgaaagagaaaggatttgagcacactggttcatcagcaacatcatggagtcttgtcaaatagggatgagctaaagcttcttcaactgttaatacacaaaagttcccccaagttagttaggcactgatatctgaatcaaaggagaatgcaaagacaggattttcattttttgtattgctattcgaaaagtcaagtattgagtatgaaaatttaccagtaattcttctatttggatcaaatgtcaacattttctcaatgaggtctatggccagtgggtgaacatgtgggaaagccctgcctaactgttggcgagggaacgaagggagttgccgtatgtatcttttagcatcttcatttcgaatgaaaccgagatctgactctgttggtgtgcctagcagctaagaaacacagaataatgcataagtaattacttcattaaacgtataatataacacgcaagaacttagatggtaaaaataaacaaaggaaagctgtatctaattgggaaatcattccacagttccaaaagttcttttagcattaaatgaagaaaaattggcaaagatggaaaaggtctcaatagttgaaatttggtattagaatctacagtacaagtaaaataagatgagacttcacttctgaaagaaattgttttgtgtatatttgtccttacctctgtcaataagcgcatctgatgaacatgatctttgcctggaaacaaaggcttcctattcataagctccataaatatgcaaccaacagaccacacatctattgaagcagtataatctgaagagttcaacaataactcaggagccctgtaccatctggtgacaacatactcagtcatatactcattttccgcggtgggacgagcaagaccaaaatcacatattttaagatcacaattcgcattaagcaaaaggttgctgggttttaaatccctgtgtataacattagcagaatgtatgtacttcaaccctcgaagaatctgatacaagaagtactgcataacaattaagaaaagaaaaaaatgtcagcatcaagccttgaaaagttagaattaagttggccatgaagtcaataaacaaagactagtttttttacctgacaatgctcctctgataaaccttgatttgaacgaataatttggtgaagatcagtgtccatgagctcagtagcaatgtagacatcagtaaattctcgccgcaaaggtggtggaatcacatcccttatagctacaatctgtagtagcataaacattcataccatttatatataatcaacaaaacaaaacctttgacttttatgtaccctatattgtatagaatagatattccaattaatgaaaaagaaaaacataacacagctttatatatgacttcttttatttatgtcaaaatttccatttataaattcattttgtacagagtcaatgtaaattggtaaagacctaatttacccaaatcatcaattaaacaaatactgagaagagacaaattgaatcaccaaaaacagaaaattaggcacacaaaacaaaagattacaatttttatatataaatattcaacagataataatgttactgacattttcgtgatccaaatgacgaagaagcttaatctcccgaagcgtgcgtttggcatccatatgattatcaaaggcgttagcaattttcttcatagcaaccatctcattcgtctccgaattcaaaaccgagctgtaattcaaaaacaaaaacaatatcatcgatccgaaaaagtagcgaatcaaaatcgaaagtcaacgattgaaatacttaccaaacgataccataagctcctctaccaataggcataatcggaggtcgatacttggttgtaatctcgaacaagttgccaaatatgttgtactgaatgtactgacctccatgggaaggaatcgcgggaaaatccgtgtactgaggtcctcctccggctccgggagcggcggcaccgggaagattgttatgagtggcatcaaccatattgaagtttctcttttctcttctctttctctttctctctctagtttctctttctctctctagaaagtcttcagagacttgagattgaaacactgaaatcgaaaccgaatgagtattgaagattttccaaagacgagacttttaaaccaaatttcaatcaaacaaaaatatttcttattattattattattattattattattattatgaggaatatatttttttaattttttttcttttaaatttatgatgtgggttatctttaaagtgagttgttatgtaaattttagttgtgttggttgattagattgctgtgtaaatttctctaaaattacaaaaataaataaataaataaataatttacagtaaaaaaaaactcctattattatttattggggaattaccttatatactatttnnnnnntttttttttttaaatttacggttaaggtttgtaaagtggtgcgctagttgcaatagtggtttctgtacgattttttattgcaatttaggttgcagcgccagttgcaataggggtttctatgtagaattctgtaaaaatgtaa

SEQ ID NO: 43197 - DNA, 2016 bp, Cannabis sativa
gcggtatgtaaataacaaacactcgatttgatattctcacatatttgcttaattcacacataaatgattgtgaccatgaccgttaaattatgttttaaccatgcaacttctgtacttcataatatgtaagcgttaatgtatgatttacataacctgcgagttctatcttctgcaactggtggcaccactggcaagaaaatgtatataggtgtttagatatatcattttattattgaggcagtagctggtttgttttaggagtttcattgtcttctgttggaatttattctgttaaactcacattagaattctagattgaagggtataattgagtacccatcacatccaactgctttaggttgcatggtctatggtgtgcatgtatctttcgaagtcggactatataatccctctatttcattggttcatttttgttttagtagatttttcctatgacccagtggatggaccctttacagttttgaaaatgtttgcttgatctgcctgtgtttgctattgtttaggggtttgctaagtcattattgattttaatattttctcgaaataaagcttgtctagtgttttaagcttttctttattttttgaaatgttgctgtattaactactcagtcaaatttattaggttcacgagtgtatctctgggggaggaaaagtgcttatacccacatttgctctaggaagagctcaggtatcctacgcggagattgtcattttgttacataaagacttgttttttttcttcttttgaatgaaaagagaaaatgaaaaactttgagccttgatcaatcgctcaacattgttgagaagttttaaggagctatgcagtttgtagtctgcagtctgcaaatttattgatctgactttgggagctcaagttttgtttaaggttcttgttcagatttgtttcttcctagataccgatagtatccttgatatatttcatttcaaatctctttaagcatcttagttttctaactatcaaacagacaaacaaagtatttttaatatgcatatttgttgggagatgaaagcaaagtttggactcattggatattctattcagtgccttattttcttctgaaattctagcagatataatttgtgttacatatcagtagatcataaatcttctgacttactaaagatcaaacagcagttcagttggaactaacctcagcccacttcagttctcagctccctaatctattctaatgattctctacatatattgctagcattggttatctcctcaagggtctagtgaccatttcgtaactgttgcatttgcttgttttctgtaaccattttgcgaaattacatcaatttgttcaccattttcttcgtataagctctcggctgttttagaaagtcttaaattcacttaaccaagcagtgcatgcatggcaatttggaatccatgtagcattttctttattctgcattacttgttattttattaaaatttgaatgtcgtattttctgttactggaagatctttgtcatgtgtttgacagtgctatcatcaagcaggaactttgtatcctgttagaagattactgggagcgaatgaatctaaaggttcctatttacttctcggcaggtgtgttccagttcttctgtactactgttaactgttcgatcaatatacgtagcgtacttaatgtgctttcaaactgatatttctccagtccctgataccttttaccaggttctaaaaaaccatatttggtatataccttctgacctcgcctttgggcttttttgtctttctttttttttttttgatgcatggtgcgatttgaactttgaagtatattgtggcaccctgtcgatgatcataactctttgcaaattcaataacttaaaaagtacttatattcttatgcacatattgtgaatcgcacacacacagctcaattattgaggcaaactccatgaaaatatgcatattttgctcatcatatacacttaaatgcaccattttccaatgataaa

SEQ ID NO: 43198 - DNA, 5317 bp, Cannabis sativa
acgaggttgagactgtttatggcattataagtagctcccagtcctcaagtaacttgaagcaattgttgaaatcgagtcaggttttcctctcaaacgatttgatagacaaggttctgaaaagagtcagatttggccatgccaaccctttgcaaacttttgaatttttcaattacactggaaatagaaaagggttttaccacagtgcgttttctttggataccatgctttatatcttaggaagaagccgtatgtttgacaaaatttgggatgttttggatgatgtgagacataaagatcgaacgataataacctcacgcacggttatggttgttttagctagagttgctaaagtgtgttctgttaggcagactgtggaatcttttagaagattcaaaagggttgtctccgagtttgatacagattgtttcaatgctttgttaagagcattgtgtcaggagaagagtatgacagatgctaggaatgtatatcacagtttgaagcatagctttaggcctaatttgcaaacattcaatatattgttatctgggtggaaatcatcagacgaagccgaggggttctttgaggagatgaagttgatgggtgtgaaacctgatattgtgtcatacaattgccttattgatgtttattgtaaagctagagaaattgacaaggcttataaggtggttgagaaaatgcgcgaggaggatataatgcccgatgtatttacacatactagtatcattgggggattgggtttggttggccagcctgataaagctagagatgttttgaaggaaatgaaggaagacggttgttacccggatgttgcagcctacaatgccgtgattagaaacttttgcattgcaaagaggcttggtgaagcttacggtttgatggatgaaatggcgagcaagggtttgaatccaaacgcaaccacttataatcttctctttagagtgttttattggtcgaatgacttgacaagctcttggaatttgtatggaaggatgatgaagatggagtgcctgcccaacacacagtcttgtatgttcttaattaggttgtttaagagacatgaaagagtggagatggcattggtattgtggagtgatatggtggagaagggttttgggtcctacatgttggtttctgatgttttgtttgatttgctttgtgatttgggaaagttggtggaagcagagaggtgcttcttgcagatggtagaaaagggccagaagccaagtaatgttagtttcagacgaatatgtgtgcttatggaactggcaaacaagcaagatagcctacagaatttgacacagaaaatggccatgtttggcacagtaatcaatccttgtaataatagtgttagtgtagatgtttcaactctcactcattcccctcataattgaattcgaaagttttttgtttaatcaattattttgtatcacgttgcattgtattgcatattgggatgggttcatgggtggtatggtatataataataatttttttttagtaaaaaacaaaattttaatagttttaaaaaatatgagccaaatactattaaatttttaaaatgacaaaaatttattttctattcttacttttaaaaattaaaaattaaaaatacagccaaacagcccctatacctccacctatgtaatctgtttttgtaaatgatttaggtatattgttattatcaatataattagtttcatgtaaagggcaattctttttttcatgttcaattacagaaatacaaaactatttaagctcctttaatgaaaacagaaaccagaataacaacaagaataaaggatcatctggtcacattattaaggccataaaacatccaattaacataagctccacaatacaagattaaataatccaaagcagctcagatttcacataagaatttaagcagaaaagaaactagatgggattcaaatctattaattcataagaatccgtcctagtaaccatcatcccaccggtccttgtacccatctcgcttttcttttatgttctcgacgctctctccactcccctaatctgagaacatagcaaggtttggcatccaatctgcattgcacagtaacctctaagaatcgttgatcagatgaaagaaaaactaatgtaacaatttataggaatttatgatatgtcaaaggtagatagatatgctcaggctcaaaggcatacaattaacaaccaaagtgagtcactatgcagaaaaaggtagttaattaataatgagttcactgacatatctctgactcggaataagcaactgcaaaacttggcatttacaaaaatagaggagatagagatatgatacctcttgattcgatcacggcctgtcttgatcttgaaacgcttggtgttggtggaaaatcttgattttgttgagttggctgacaattaaaactgttgaacacttctcctcttgactcactggctcagtctccagaatcagctttgagtccttccttcagaatagttatgagcttgacttttctcttatttcgcttctccaatggtgtgcctgcatttttagaaagattttttattattttattcaacccaagtatcatcatctgagatgtcaaaataaaaaaataattgtttgttttgaaacagaggaacatgagagttataatattaatgaagtacctttgaattgatgatgtttaagtagatgtgtttttgtctctcaccacacaagcaaacaattgcccttctgtttggtgagttccaattccacttttgcgatgtgttgaatctttggccaatcttctcctcctttctcgcaccgttgctttactaaaggacaatcccatatctctaaatcagaaagggaattaggcagcccttcttctggtaggcactgcagcctttcacaattattaatatataagtaagtgagggatgtgagttgttgaaaggccttgccatttaggctctcaaggttgctacaattttggattacaattttatcaagagtgataggtaggagcccttcttcaggaaatgatttctcttcccacccaacgatatttaccattttcaaacacgggagtctctgtagttcccatttactacggttctcaaaaagcgatcttgtgttccataaacaaatattctctactttcggatgtgatccccaatctagaagtgactccaacacaggacaatttgatataaatacaaaagcaagaaagggtggggctgtgagagtctgttgagtagttcttggaagcaaaacctccatttcttcacaatcctcaatatggagatcttcaagggatggaagataacaaggtaacccaacatttagctttggacaaccagacaaatcaagttctttaagaagagggaacgtctgaccttctccaagaatatctttggtacaaaaagaccattctttccacatcaacatatttttaatagttaaactttctaaacaaatgaattgaggacaactcttatcaatctcatcacctattgacaacacactgtcacatccttcaattgtgagatctttcagagaagctagtcgtccgagtggtggcaaaaagaagcagcttttacaatctttcaaactgattgatactaaattagaaaacgcatagtcaataatccagttcgagaatgttgtacctctataacctttaatcacaagacatgtcaagtttgtatgtggtcgaagtgctcaagtacatctaattctttttgcgaactatcaaccccaacaacatcattgttccacctcaaagttaacttcttaaggtccttcttattgtttaaattagcctttgaagcctccattgcatcctcaatattttccaaacctgaaatgcaaagcctttcgcgtacatattcagcttctgctaactctgtaattttaaacccatcatccttatatttgtcactcaatactacctttggtaggaaattcaaggacttcatctgactgatttgttgtggcatctctttcaaaggtaccctatcaatatctaagtaacgcaagttgattagtcgtcccatattcttcggtaattgagaaagctttttacaacgtgacaacaataaagtttgtaaattgtacaagctacaaatcgaatcctgtaacacttcaatttcagtaaaagacaaatctaggtaccttaaatgtattagaatgccaattgaatcaggcaacttcttaagagtagtccggcttaaagaaagtactcttaaacaacttccctttgtaggcatgactgagtagtttggagagacttcttcatatggagactttgatggcaatgcaatgaaggtacgcaaagacgtagctttactcaaattgatatgcttgttaaggtcacaagtgcttcccttacatgacagacgccgaatcattgttgaaaagctatcactgatgtctaatctcgaacaaaaatcatttgaaacaaatatggccaaatcatgtacaaggtcatgcatttggagaagggattcagtcttactacttgactgttgaaagaatgaccttgatagaagatcttcaaagtattcctttccaaattcctccatctttttacttcttgtgtccattggcagaaacccttcagccatccataacaaaatcaatttttctctttcgaattcataatctttgggaaatatggaacaatacgcaaaacattgcttgagatgtgtaggtaagtggcgatagctcaaccataatgctggaagaatggaaccctccttcttgtacaactcctcccatgtgtcactattaagtatgtcctcccatttcttggcattttgttcagaacgtagcaatccacctaaagattttactgctaagggaaggcctttgcacttttcaactattttccggccaattacttgtagttctttgtagtcattgagatcaattttactaccaaaagcatgtttgacaaataattgccagcaatcttcattcaacaaagttggtagatgatgaatctgcccagttgccatagtagaggccacaattgtgcttcgggtagtcactacaattttacttccatttgctccagactcgaaagaactcttcaaagtgtcccacaaagaataagactcgttccaaacatcatcgtggacaaagagaaatttcttccccttcaatgcttccttcaatctccttctaatcagttcatctgagctctgagtatcacattttttggaagtgaccccttcatagatctcttttgttatctttgaaatattaaactcatctgacacagtaacccatacttttagctcaaaatgactttgaactctt

SEQ ID NO: 43199 - DNA, 2093 bp, Cannabis sativa
taaaaataaacattgagattatgccagttacaaactttcaactttgggtacttatgtctctatttacccaatatttatttagggtgaaatattatttttaaaattaaatttaacaaaattcttgataattaattcaacattataaaattaccactctataattttagctaggcccccttttctattttgccttataggtgagaacaaaatttgagccagccgtgctctcaaatttgaaactcattaattaaggaagaaaaccaactctttctaacaaaagatatatatgtattaggtgcggttgctataaaataatgatatcaaatcttacaaaaaaacaaaaacaaatacactgctaaaaatctcataatcctatattttcagatagaagggtcttcaaacaatccaaacaaaatagttttactcataaataaatatgtgtttacatcttattacatatgtattagcctatttatggaatctgttatcaatcgatgcttatatagactcattatacatttacaatactactaatttctcactcattcttacatatatatacacaactctagggccactcaaagaaggacctggtttccactaaaatcaataaataacattacatgcatgcatatagtttgtatataaatataataatataaaatactatattcttaaaaaaaaacacacaaataatcaaacaaacatatagttatgtactcttcctctcttcacaacatggtttatgacttctcagtagtagtgtttctggtggctatgctagttatagcagcacaaccagctgttactactacgagatatcatgaacatgatcgcgatgatcatgttcgtgataatcttaataagtcatcagtgacacaacaagcatctcctcaaacacaagagacgatagacaagatttgctatcgagttgaggaatacgggttttgcaatcaagccttcaacgagaaccttccatcgccgaacacagaccttgtgggtctgacccgaataaccatagacctatccaccctcaatgccactaacacactcgatttcgtgcagcgtctgctggcgaacaccaccgattcggggcaaaagagtgcacttgaagcgtgtgaggacgggtacaacgttgttttgagatgttttgaagatgcaaaggttgatttcaatatgaaggattatagaagcgtggcattggatgaatatgtggcgcctagagctgtgggaaactgtgtggttaacattcctccttttaatgaagaattgtatgagaggaatcgagagatgaggattcttatagccatgtctttggttactgcctatacactcgtcgatatacagccctaattataatatatatatcattatgtactgatgattattattttattactactactacgtgcactgtcgtcgttgttctgataataatgtctattataatattaatataaagacaacatttttacgtaccaaacaaaataatgggcacacacttatgaaagaataacatatcaagtattcatcatttttgttttatttcaatttcaaattatctcaaagttaacttcacttgataaggacttaccacaccaacgaccaaattataaaattattaagagaattattaaaaagtattattagtgtctaatactctctttgctaactaatcagggccggtcctaaggtatacggagcctaagacgaaattaaattttggggccctacatatatagtttaactattatgaaaattatagctctagtgcttagtttaatggtaaaatttttaaaaattagctccaaagttcaatccttcataactacacattaattatatttttttaaaaaaattaaaatgtagaggttgggaattaatcccatgacctcttagagagaagttaaaccttttatcactacactaaataatttttactatatttttttcttatttaaaattttatctatatattaatatttttttttcggggcctgagtgttcggaggcccgaggcgcatgcctagtagggctgaacatcgggcgggtttaccgggtttcgggttggcgggtttcgggttcacgggttt

SEQ ID NO: 43200 - DNA, 2372 bp, Cannabis sativa
gtgttaccaaacggcacctaattagttagttcttgattaagcttttgtaatcctagtctataaatactagtttgtgagaacatccgatccgaggtaagctttgttcagctagaaactttaataattttttttttcgaatttctctttgtttttcttactttaaaattatacatggcatcaattaccttggactactgtcgatcatggagtccattacccaagatcccactgctcgcaaagcaccagaagctactcgagtccttactcaggccactgtaacaacttcaattccggcgaactctgtttggaatcatttctctagttctttgaacctcggacctgaacccggatcctggaccccaaacccaaactcaaaccctagactcaacccggacccagaccctagaccccagaatcggaccctgactcggactcgaaccctgaaccccgacctagatcccgaacctcaaactcagaatggaaccccaacctgggccctagacccaaacccagaccctgaacccaaacatggaccccggaccccaaacaccggacactggaccgaacctaaacgtggatcccaaaccccagacctggaccctaaacaacggaccccgaacccagacatgagaccccataccccggacagggaccagacctagaccacaaacctagcctaggacctcacacctaaccccaggtccggggtctgggtccgggtttggatttgggacgaggtgcaggttcaagtcaaggttcgacccgaggtaggatgggttcattttttttcttcaaaaaatacataatttatagatgaaatcaaattaagcctaatggccattgcaagcaatattatatgatattgaggatgtttcaaaactatcaattacattttgactaaacgccctcttaagccaaattatgggcttcaaattaagttagaagatctaggaacctttaaaaaagtacattttaagaaggagctcataaggcttctacaatgagtcaaatagctatcaattttctacctcaggttcaaacccttgactattttaagaactgtgtcaaaattacttttcacaataacaaattctaaacctttctctgcatcaagttccaacgccaacatacaagaaataatttccccaataaaagcattggcaaaaggcatgcgcttagtaccgacctaaagtatcttcccaacatgatcttgagccacaactgcaagcatcataagcccctccttaatcgccacatcatagttaagtttgatccagtccacaaacagaggagcccattcagtgatagcagggaaaagttaagaatgatccaaaagagattgaccatactttgtataacaataagcaatagagtcactataaaaatttatgttatgcagatggctattatgtaccttatttatcgctctctaaatagtgtgaactagtatagacgcatataaaaaaatatcatcaatcttcacatctctcactggcaacctccaaatgaatttgacatagtcccatatcttggcctttggttccttaacaggaatgatgccccaaggagcggctctctaaagatgagaagccatgttacaatgaagaaaaagatgttccatagtttcttcctctctcccacaaaccgggcaagaggagtctttaatgttcattcgatctataagaagtgatcgaattggaagtgcattggatagaatgctccaccaaagcactttatgtcgttcaagtgttttgttactccaaaatttattccacaaagaaggagcggcatgacagtgtttgtctctctcaagagcttacaaaaggtaagcagatttggtggagaatttcctattcagttctttaattcaaatccagcgatccctccaatgtcctagtggtctttctcttaccaaagtggcactcattgtgtcatgatcatacaacctatttaatttgtaaatatccttactcccgattttctagtaataaatctgccacagtcataaagctgggggccgaaaccccatttggaatggggcataaatcgataccatgggccacccacagatcctcccaaatgttgatatattccccatcagctatcacatagcaagcacccttcttcaggaacatccttagccttaaccacattcttccagaacctcgaattagagttcttataattgcaagcaacccctctcatgaaacctgcgggtgatgttcgacaaccccaccttgaaccaaaacctccacgaaggtagcacaaacccaattatcattaatgttatggaaccaaacttctaaccaaatgttactccctcccagaatatgcaataaacaactcaacaaccaggggagtgacaaaaagta

SEQ ID NO: 43201 - DNA, 2605 bp, Cannabis sativa
  modified_base (2468)..(2468): a, c, t, g, unknown or other
ctgatgcaagggccaatgatgagttgctcccatggaaataaatagtcgaacaaatgtgagtttagcaacatgagaaaaagtatcacaatagtccactccataggtttgagcaaaatccttggcaataagacggacctttaagcgagcaattgttccatcttgattgaatttaaccgtaaacacccattcaccccctattgctcgttttcttgaaggtaaattaaccaaaacccaagtatcatttacaactgaagccttcatcttttctatcattgcagcaagccaaccaggatgagacattgcttcacgagcagttttaggaataatgacagaattaagagaagcaataaaagagcaggaagaagaggatagaagattataagaaataaaagaagaaatagaaaaagtacattggcgtttacctttatgtagtgcaatggaaagatcatctttgagttttgaatctgatgacaaagatgcaagtgcaggacatgaaacaggaggtggaggagggggacgcctggtgtacactattggaggtcgagcgagggagtggttgaggtggtggaggtgtaggcattgtgggagttatgactgaggtaggtgaaggaacaaaagacttgtccattagtgcgacctcttccttgagacctaccagtaccaccaagatcgtcctccactgttgaaattttgattctgaggaaagtagccacaacctcaaccagttgttcaaaaaattatttttgtagccaaattagcttgtggtgtagatctagttgttttcccctatattgagagtttgtaaactctcaatcttactatcaaagctaaggataatatcttgtagctctagccaagtagtttttagtctttcttcaatctaaaccatgatggataggtactcaacatcaagtcccgagagcacattaataataagatgtgctttaggataagggtctctaataagagcaagcatgtttgcccaattctttgtttgtctaaggcattcagtcattggtgttgagcatttgctcactgtttggattagcatgcgagtatcatccatcttgcacttagagtaggcaccatacaaactttctaatgcacgtcatagttctgcaccagaagtagccccataacttcagttgcaatactatctgccattgagttgtagagccaccaccatgaggagtttatcattgatgatccaatgctcaaatttgggttaactataacttgagttttttcatattcatctagctcactgggaggaaggaactccactagacattctttactgcaagttagatagtcgtgcaatttgtgaccttgaacgattgtagggaccatggtcttacggaaggtattgttattttgatcgagtttgagtgaaaaatattgattaagagggtgagttggttcgagtataggtttatgttttaagaggaggaagcgccatttttgttggcgtgagttccatggactgtagaggcactatctatgcttacaacatgagatgtgttttcatcactatgagtcaccattggcataggccttcaaaaactctaataccaagttaaaatttaagaaaaataatttttggtaatcctcaacttatttcaactatgagacagagatattcatttatagcaatgggttacatgttcatctatgaaaggagagtaaggagccaacaactttcttacagttgtccattagaaatatcaaaggaaatattaacaaatatcctaatgattgcacaattacacacataatagaattgtcagagaaaaaatctatctaggctatggtgctatgaggtacaatgcgataccctgcacactcaatactgactcgccattataagtttgctcaaattttagcaagatgaagtacatgttataatctaatggagatcagtatgcagacctatatacttgggtcccttcggacagacccatattggatagaagatttgagcttcgaatctgtgataagctctggaaggacttgaccttggtaagcccataagactacgtggataggttacttctgcagtgtggatgtgcccaaaagactatctcccaagagcagtaatgtttggaaggctatcttttggatgccttgttgattagtaatgagtccaattttaggtatcgttacctagttttctggagggttcagatgtaccttcctgaacgaatacacgtttgacacgtttaaattctattttttttcaaaaaaaaataataataactaaaccaattgaaatgtaacatgtgtctctgtactttgaattcgtctaaatcactccagaaaaatattgaattttatcaaaatgtagaataatgacacattttcaatagtgtcttttgaaaaaaaaaaaattgagagaatatttttgccaaacaaataaattaaaggaaaattacctcatatactatttttataatttttttttttcaaanttacggtttgggtttctaaagtgctttcttcggtggtttctatgtgggttgctatacgatttttaattgcgatttaggttgctccgctagttacaatggggatttctacctagaatcccgtaaaaatgcaaaaaaaa

SEQ ID NO: 43202 - DNA, 2321 bp, Cannabis sativa
ttatattacatttctcctaatatataaaacttgagtgcagaaaccatataaaactaaatagtatagtaaacatttcatacatgtataatcttacctcaaaaagaagaacaccaagtccatatatatttgacgaagatgtacaacctctttcatcaaacccctctggacaagtataccattgcttttccaactgacctagtaaagccatggattggtgttgccttgcagtagtagtatttcggtagctggagtctttatacacttgggattctctacttccatgagtttgtgaaacagccatgtaacattcagtctccttacctattttaggctggtttctaagagacctcatagcctcactaagtttttgctgcttagcagcaattaaactatggctggaacttgagtttggctccacttgtcttttcttatttaaatgtggaagaacactgttcattgtgtctgtcaaggtcaatgaaccaatgtattgaatcttatttgatgacaaaatagtgaagcaggttggtctcaagtctagcaaggcagaaccttgagagtgtgcaaattccaccaactgcacaatttgcttaaatatgagcagtctttcagctttgtctaccttacgagactcgcatttgagccattccctcaagctgattccactactataagattctggaagagacctgagaatggggttgtgatcaatgttagtacttgtttttaaaccagcagtagaagctacctcagcatcataatcatgtttttcattgttttggtctaaacttgcagagtatgcttctggatatcttgtaactattccctttcccttcacttttttcttcacaagtaactgagagaagctactccttgaaatgttcttcagttttttattcccaacaagtaagccattacttgagatgaccttattatcatcattaaatctagtatgtgcagatatttcatctttgtcttgcccgacatgcttgttcgaaaaatgctcacctctcttattctgcatagcaaactcctcccttactctagacaaaacctgataattctcttcttggaacaaagaatcatctaataaatcattgcttctaaagtcattatttaccaactcatattgattcctccatattaggccttgtctagaactacttgggctaccaactgaagccaaatccaattctgggtctctattgttcaccattgttaatttaagcctggcatcatctatggcaaaaggggtattacataaaggatcagatccagccaaagaagtaacacatctattcaaatccttatcttccattattcaaaaaaaaaaactgacttcttgattggtttcaaacacagaacacaatacccttttgctgaaaatctttgctcccttccacagcatttacagccattttatctcattccacaccatcctccgcctatcaataaaagtcacatttaaaaacaattaataaatataatttataacccagaatttcaaaagaaggaatttgtcaaaaaagtatagttgtttggaaagttaaaacattattttacaatacataacaaatacaagtgaagaggaaatttatttaacaaaaactaatcaataagaaaaaaaaaaaaaaaagctaagaaaaacacacgttcaaaatatttagttaaactcagaagaaatttctgatgaaatagatgaaaagggttagacacaaaaactaatctgaatcaaacttgacaaaatataagaacagagaaggaaggctttaccaacattcagagcaaatattatcattatcatcatcagagaaagaaaacgacacagaaagtgactgaaagaaggacccctttgaagctttaaaaagagaaccccaatagcttgaaagactgagactcaacgagagtcacaaactttttcttgttatgccacaaaatatcttgatgaattttcttactcgcaggtaaagtaactcgataaagaaagaatgtggatgatgttgtatatatatatatatgctatgttgtaatctgaagaatagtaatacgtacagtgtaatggaacaaatcaaattttctttatataaagactgacacccttggacctttgggtgtctggtccaaactgcagccacgacatcactatttttttactcattatataatgctgttggaagatctatatatatatatatagttttggaaatttgtgtgtatgtttttttttcttaagaaaaagaaattcagaatcttaccttttttaatttatggattaattacttttttactctcctaatgggcctgcaaaatatcatttatggtgt

SEQ ID NO: 43203 - DNA, 2817 bp, Cannabis sativa
gggtcaatttttgtaggtacacatgtgcaacaaacttgctagtcgacatgtgagagttggcttagcaaatcccagtgaagttcctaggtgtgacatttgtgaaaatgcacctggtatgggctctaatcatattatataatatgtatattctttatataaaaggctctttcattgactgtttttctgtgaaaattatatgtagcttttttctactgcgaaatagatggaagttccctttgtttacaatgtgatatgattgttcatgttggtggtaaaagaacacatggaagatatctcttattgaggcagagagttgaggtttgttcactttttctcaatggcaactaataatattctctttctgtcccaagtaagaaaatgtatgaaatatttatataagaaatggtgttgtaaaagtttactcttttacttgtttcattgaatagtttccaggagataagcctggtgctggtaatgttgaggaacctggttcaaacccgggtagcgatcaagtcgaagcagctcggagaggacagaatcatcagcagccttgttctaaaatggcaggtgaagagaatcaacagcagcaaaatcataatagagtttctcctgtgcggttacaagaggccaatgctgatggacacactcacactaaacgtgacaataaaatgattgatttaaatatgaagcctcataagttccatgaacaatcttcaaataatcaggttacacacttctctaatagtagctagctttatctgaaaacttgtctttgtttttttatcaacatcatagctctctatttaggcatttgttatggaaaagcacaaactgatcaaccaaagtttctcattcttacattactacaagtactagtttatagtttagatggtgtttggttcgttgcaatggaatagtaatagtaattgattgtaatcagaatagtaatgggaatggtattatgatatttagcgtattttttgaatgataactagagaagggtataagagtaattttatttttatatagatagtgtaatggtgattataatagtgtagagctggtgattacattgtaaaagtattataatgtttacaaaaccaaaccaaataatggagttgtgatatggtgatttcattactattatcattggccaaatcaaacatggtcttagtttctagttgaaattgattagttttgatctttttctccatgacatgtggtataaatttgagaattctttatctaataacattgaaattcgttgttttttttttcaggacctatgaagaatttgcagaaaccagaagcatgactgctgcgcgaggcattagaaaaaggcgagctgtgtgtgtgatcaaataaaatttagagtgtgattgattgttcatatgaaaaaagtatggtctattgaggtttgcaaagtattgatttttccatttgttgttgtagcttaattgcacaaaagagtagtttgatagcatttataacttttgagaacagaaactataatgcactgcatcaaattgagttctcataatctcattcttcagttttgattttttttttgttggttcttgttacttgcctaaattaggacccttgtttgaattggccctgaaattttagatttaaagtttcaatttttatataattggttatgtttgtataaatatgtataatttttttttacattaggcttttaattattgtactatgttgttaagttaagaaactctgtatttatttgaaatgtttgtgttttttatgaatattttgaagattgatcaatgcaacattttctttacttatttttttttttttgaatgaatcaaattaaattatgggttgtataaatacatatggtccaatttatcttatgtaataaataagtgttttctagaaaagtttgaataaatatccttaatttgattgataactaaagcaacacatgtcaaaataagaagaaaacaatcaaagagaggattaaaacctccactaagaaacactacattgacttttggccacaaaatgccattaaactttaaaccatctaaaatggaccttgcttaaatagagagtttcattttgctatgtctttccaaattattcaaaataaaatagctagcaaaataaattaaaggacaagaatttgtgaccttactatacttttcattcttatttttctaataaatttctatttaaatgtcattttatttattcaaaccaatggttgacaagtgtttggtatattttactccaacacaacataaaaacatatttttaaaaaataaaaaataatagcattgtgttgatgtatttgtttttagacataaaaacaaaagtaataatatgtgcacacataaaatgaactaaaacactaaagctagtgacctagtagtatttttagtcaattacatcttattaaaacaaaattaacagttttttttttaaaaaaaatagtgttgttttagtgtatgttttttaaatttattgtttcgtattaggttattgagaataacttaatttgaatcaatataatttttttatatttatataagaaataagtaaatttaggaatctaaatgtacccaaagacttattaaatatatttagaaaggaatggaaactccaaatgctaattattatgattcttattcttcttcttattattaaaaataaatgctaactaatttatattttcacctaaatatgacatgataatttctctctatctcattctcaagtaagaaaatatatgaacataaaccacttgagaggctagctcaagtgacagggtgcgtgtgtgttgaaggt

SEQ ID NO: 43204 - DNA, 3420 bp, Cannabis sativa
aaaaaaaaaaaaaaaaagatactacccacaacacaataactgcctgaaaaaaaaaatagaagaaaaaaatgaacactaggacattcgggatttatgtaataattatttaaaattttaaaataataaataataaatttttttttttttgaaggaaataaataataatttttaaatacatttaaaacaaaaaaactgtcacaaaaagtgacatccaacgtccaatcatatttttttgaaaaagagttatttttaatattgatgtggcaaaattccgtaaaaacatatgtaacctacaaaaaataaagaaaaaaaaacttatacgaaaaaggcagtatactgctgtataaaacccaaacattatacacagtaaaaataaaaaaaaatactacattgacaatatttttataaaaaaatagcaaaaatcattatatcatgtaaatttcaatagttatgggcctatattaattgtggcccatgacacttcaataggtatgggcctgaatctttgttgcccgatccaatgggagacagggagagttttatttaactgacccacctgtacgcattgtcgtttataagatattgacttgttcctgctacttgtattttgtctaacaaatggccaccttctcgaactagtgctccgccggcacaccagcttaaacgaattgcattaatttattaattatattatagtggatttatacatatataagtataaggcatgtgtctgaattatgtatgaataataatgggtaatcacaatcctaataataacagcactaattatagtatcttattctatttgttcaaaataatattaataatatggtgtgcatcgccaacgttgttgtcccaagcccaaccccagcaaacaccatcttctagtaagtgcaatggtgttttcttatcgtacgcctacactggaggccgtcccatcccaccagcagtagtggaccaaataatagcccagccgtacaggttcgaatccacgttgacgctgctaaacaacggccttgatgagctcaaatcatggaaggtgttcttgggttttcagcaccgcgaagttctggtctctgcttctgactctgtaataatatcacaagcttcatcatcatcagtactcttccctgctcaagttggaaacggcgtcgttcttggtggctcagtattgaaggacctcaagtcagctgttgacactgccggtgatggtaaacagacaggtgtcgtgatccaattggttggtactcaatttggagttgggacccctgatgttcccatgccactcaatatctcccttgccaatcacggttatttctgtccgactcccactacccaaggtatatatgtctatacacgtgcatggatattttttttttcttacaatatactgaaacaaacattacataattaatcagaaggaatagaaaaaatctccaatctttcgagaacccatttagcattaccgacatctgcatggatttaattatatacaaaatatataaaccaatcattcgatgagagaacatacataatatagagatttttattcagtatagacaatagccagtaacatttgaatctctaaaacaaattagcatttgaatatttactaggaatgtatttgtttgttataaaataaattaaaattaaaataaagaacttattagaaatttatgcataagttaattaacattagaataagccgtacaacttaataacttcattttgtaataagtaaatataaaggtcgccggcttagaatttcttaatgccttagctagtagaagcttttttaaaccttattttagtgattatttttaaatgctttatttgttaaagcatttttaatagttattagtctttgtgaataataatttgcaattatttatataataattattaaattaaaataaaaaatatgtgaaaattaatattcaattataacaataacggtataaatttttattgaacatgtttctctatttcttatacaacaataaagaaaaatattttgatgagtattgcataattttccaagctaaccctattgaaaatgagaaatgttaaaggacaccttaaggtgtcaaacattacaagagatgacatatttttattggtgcagtttaatatttaattttacatatattttaatttaatcaataatatgacaaacaaaccgctaatcacttacaacacatcacatcaatataggtgcctaatagcaatgctcatataaaatacacaagttggttttctcttcttttttgaataaattatggaattttattaatagcaaatagctaaaataatagtttgcaatccaatcgggatatctttctcgttggagacacgactaaaattagaattagaaaaacgaaccaaataaccagtcgcctgatttccagatcgtttgacaaaaaaattaaaataaaatcagatgaaaaaaattgtagcatcacattaatcttaagaacacctatattctgtttaatccaccgctcaaaagatacaaccgtagataatattgtgtaaggtacgtaactgcattactaacaaccctttcagtcgcaaaaagcttgttatttctaactactaataacgatttgatggcaagccattgaagaacaaagaagaatcaacaacgaaataaaataaaacaaaatcatgtcacataaacaagactaaaacaatcaaaatcatgtcacacaaacaaaactaaaatacttaaaatcatgtgacagaaataagactaatcgtagtagtaaaaatcaaatggcaataacaaaatacaatcccgaacaagccgcacctaagctaaaaaaaaactggcgagcctaacttgagaaaaatgacaacctttgatatagatatagatttggaaatgaaagatcttatttttttttttttcatttagaatattttgatggtttaaaaaaaacaaaatgcaatttttacgacgtaatgcaatttattactttcgataagggagagtggttttctctcttttaatttcaaataaatgatattatttctttacattacatgataaaaattaaagtatatgtaaatgtaaaggtaaataatttataagtagctaaagttttatgtttatacgttgtataaatttaatatttatttttagcgtcggtatatgtactcaatatttataaaattgtaatttttctccagttctgtctgtacagatcccgttttaaatttattaaaagaatatttaaaagtaattaacactacatatttttatctagaccaatgatctagaatctgagccttatatgttctatgtttaagataataatatagtatgtactgacaaaattagagaaaaattacaatatttaagtaaaactcaacttttacttatctttttttttgctaaactttttttaattttttttt

SEQ ID NO: 43205 - DNA, 3279 bp, Cannabis sativa
  modified_base (2960)..(2960): a, c, t, g, unknown or other
tccccggtgaagcaacatctgtggtgccttttctggcgagacagtggcctcaattttcttgaaatgagccatttgggagagctcatggactgagtttgagattttctcaacacactcaacaatttcaaccaatgtagaagcaactgttgcagctgatatgatagccaataggtctaagtcctctattgctgcggcctcaagtgcactcttcaagtccttagcagcagttttcgagttctccacatgttcagtggcagagtttggatgtttcattgctttgattgatgttgctaatgatttcaaggtctttcctgtttctgagctcattttaatgcatgattcttgaattagacttgtgaaatctggtggtgcctgcaatgtcaaaattaataataaacagaggaagttaagtgaaaggctctatacccttttgactatatatggattggatgaacataatgatatatatatacctgtatatcagaagaacattggctattgagagcttcaatcagataagcacattggcgagcaagagctgcaatcttcaaatattgtttccatggatgacgaaacagaaaacgaccatgtcctggttcccacctagcaaaatttgcctgaatataaaggaaacaaaattaaacacaaggtcaatataagagtattgctattaggcaccagtggtgcctatcacctttatagcgttacgattgttatatgggacccgatacttaattggatcactggtaccctttagcatttcttgtcaatatatataagggtgtgagttaagagaatatgcatttttttttttgtgtttgtttacccaccagagattcttcattggcttttgaattgaggacacttttatatccttggagaaatgacttgtcgtttttgatgtcgttgacacaatctttgtcttctggggcagtttgaaaatatgtatctccaaaacctgtaaacagtgaaaccaaagtatatcttaaccaataattaataggtctctcccagtgtttttatggtttttaatattggtccataagaccctaacaagtttttcttacaaaaactataccttctaaatagtttgcaagcttgtcaatgttagaggcagtcaagttatgaagatcttgaccagcccaaactggacaaacacatatggagacgataatacaggtcgctccaccaattaagattgtggaaagtctttgatgtgccatctgaagtagcttgtcaactcgatatccagagatggaaatcatactgaatgtcaagatgaatatgatgagtccataatcatatcttgctttgatcttggggaaaaatcgtgtgaatgtggttgctgcagctgaaaaataaacaaagagaaaactatattattactcaatattgatcaattatatataaccccacatatagatagatacatagaagttaggagcactacacagtactataaaataattacctagtacaaagacaagggacccaagaataatgggctgctcttcctttggaaaaagacttgataagtgtagagccccaacacctagagcaccagctgttaatgttgcacaagctctatttataccttttccaagggttgcacctacatatacattatattgttattattattattcattaataagaagccaaagtactatatatgttaattaataatcactctaatagctaagtttgttgtctcttacctacactgaactcaaagactacaaccacagttagaacagcccatattcctgacataccaaaaccatcataaagaggtttcaaatagtaaaacaaggacactaatgtgagagctaatcccactttcagtgagtgaataactcttcttgggtcatcttttccaagcttttttatattctttccaaccatgataatattgtgcttgaccttacaaggcaaggccttaagcctggcaaaaaatccagacttttgttgaggaattactgactgatcaacaacctccatggctatagctcaaatgagtactttcttcagattataatgatcacttcctttggtttgaagtaatttggagaaagatgtgttaagggaaagaagaatgcccttaatgtgcttcttgtggctcaaatggcttcaactatttatagagctgtgtgagcaagactttggaataatattttattggttgcatgaattggtgtctcttgtaggacaataggacaaaaattcttctaatgagagtagttttatattttttaatataaaaaaagtgtgactgatgactaggccttttacttggatctgagagaagaatatttaattactgtaaaaagctttaaaaaaatattttatgtttagttgaaacccactaattaatggtaaagcaatgagtcttgataaccagccatggaatcataattaaacttagtacctaactaagggtacttaggatcctatgagctaagcagaagttatgtatggggattgctattgcttatttattgtagtcttcttcttcttctgatttcatagtgatgcacataatcacaaaaatgaagctaaattcttctaataaccttatgagagtggtcactgtaataaagtttgtgacatgtactgtatcccactttaaaacatagttgtttggttatggaaagtcagcggggctaccttaatattttaatatatatatatgtagaatatctgctttttcttaattgactttgttaacatatatgtcagttttaacttttatttaagcagaaatttctttaattattagtttaagtggaataatgataaagctaatgtaacttgtggcttacatttattcctctctctagtcatgtctagactctagctagtacatatatgtacaaaccaatattaacatatatgagcaactttttgcatggcttgacaatgtaattaatactcgataatatatatatagatatatatanatatatatatatataatatggacccttcacttgaacatggaatattccaattagtccctaaattttattttagatcaccactcttttcctaattaaagctaatgatatgatgatatccaacatttgggattatataaaacaatgtttattagttattatgttataattcatataggacagagataataacctctgtgtgaagttggaagtgctaatacaaagtatgaattttaatgagactaattggtgagctatgtgcatttattaaaaaaaactctacaaaggaaccattaacaataaacttattttaatatatata

SEQ ID NO: 43206 - DNA, 2798 bp, Cannabis sativa
tatcgtttaatcgccgtaaacgagacttacattgtctgacatgtcctcttatgggtgttccaagacgttttctccatattgcattaaatgcgaggtgactgtttgaacatgttctccttctcccggagatgctttgtatttttagcttccggagaggaaggacatgctttatgtgcctcttcgggggctcactccctgaagtacacttgccagtctatatatgactcagctaattatttggtgaggtgttcttttgatccacgtgtcatacgtaggtgcagtcacgtatttcgggaaaaattcgagacaacaagtcacaggtaacattttgttgtgactaaaagtgacatttaatcagaaaaaaattatgttgtaattaaaaagttgtcactaaaagtagtagtttttttgtagtgcgtgcctacttcgtctatccttaaaaccgaccctgattttatgggaccattctttggttatggttgaagaggtttttaggaatattatgaattgtgttcgtaatagattgaccatatgcatataaagaatattagttcaaaggataaagattggttggaagctttatataaagctttgtaagtaaactatttgtatacacttgttttagtttgttatcaatatacaaattcattttataaaaaaataatatatttttatatatttatataaaaatatagttctaactaatgattgattactttaacacacttatttattaatattttttttaaacaatttaacacacttattaaaactccaacaattcaggatggatttcaaagtcatcccaccagtactgatgatctggctgtgattctacatcactacaacatccactcacaaatctcttcactctctcacttatcttcgtacctccaaaagtaaatatcgactccgccatcttcaataacacacaaaattaacaattaataatcataattttctcgagaaacaaacagagaaatgttaatatattaatatatatatatatttatagaataaatatatatatatatatatactacctctgcatgtactaggtggaaaattgagtctccaaagactgaatatttggcatttataacatcagctctttcttcatgaagtattcgaatgatctcgtagaaaatgaactgattatcttgacctgttatgagaactatctcaatgatggaacccatctcatggatttctaactttggtgatgatcttatgctccccaatcccatcaccttattattctctttttcaaaactcgaactatatgatctttttttactcattaactccttcttctccttacttttcttcacctttgcctctaagctttttatgtactttatggcttcgtctacttgatcaggcaatgttagtgcctcctgaaattacacacatcccaatatttattagtacatttttattagctaaagcataatttgcacatttttttaatagttaggcaattgttaatttatactttttttcccaagtaaattagtaattttgcaaagcttatatcatcaatatatactctcaataatatttctataatagtaaagtgcatacacacatacatattttacataaatataaagtgagagagagagagagagagaatgtgtaccctggaattttggggtgggaggagagagttgagcttggaaaagaggactttcatgtgatttcttctgtttttctcaacaattttcctttcaattttggtcacagaagaagattgactatgatgacgattacaatcacgatgatcctccatgagtactggttctttctttgttgccaagtcctccaccacaaaaatgcccatgcgattaatcaaaccctatcaaaattttgtggagctagacctagaattagatgatgaggttgctggtttttaaatgtggagatattaatgtatttatatttatagctaccaaaaaaaaaaaataataaagcaaaaaacaaaagcttagaagataataaagtaaaaggccaaagcaacattgattgtattgtagagagtaatgtcatctcaaatacgtcagcagcaccgagtcactactagaattacaacgagtcgtccagttggaaaatttaaatggaagatttaagtcacgtggttttttttttcttttgattcgaatcttcgtggtagagactggagtggagaggtcttcattttttgtccttttcctgttttggaagttttctccggaaccaggtcaaacgccactcaccaccaaggcatcgccaacaatattatagcattcacattatgaatataattaacaccagttttttttagtctcattttattaactttaaaggtcttgagtttcaagaccttttccttcaagcatttcatagagcaaagtaatatttttctattaataacaaaaatcttttgccatattatattatggttaattaggatttttgcactctaaattttgacatgtattaaatattgtctcttgaacttttaaggtgttaaaaatacttcctgaactattgagattgttggatttaagaatttttttctaattttattcaattttactatttcagtgatggtttatgtactgaaaccatgctccttagattttaatatataccaaatcatacccctcgaactttgacatgtactaaattatgcctgctgaatttttattcatgttagatgcaacttcctaacatttaagcacgctacccaagatgattaagaaatcctaatcccctacacggaattactaataaaataagcgtagaaattaaacttt

SEQ ID NO: 43207 - DNA, 3016 bp, Cannabis sativa
tagtgatatgctaatatcgacactaagtaagcaacacttaattatgttattagtccgcataaaatattccaacatgtagtgtaacaggaagctcaattaagttcaaaatgaactccgtgtttgattgttcattggtagtcttagccaagaatcttgcttgaccgagtagtttggtgtctcattactactcccaaatatagatttattttattgcaagcaatccaatctcacctatttactagggatttcgttactggtaggaatatggttagactctgtgttgtgttgtttgcaaagttgaaggaaagtcaatggtgattacccgagttgaacactggctaggttttaatgcatggccgagagaacttgggaatatggtttgttgggcttaacaacaaagatcttgcagtgttacttcggagctgaaatatttatagcacgtgtggtttacaacatatggctgaataggaatttatgtatttttggaaagaaatgtttgtcaattgattgtatagataagctaattagagggagtgttaaagtgaggttatcacttgtaaacagggagaagaatacttagagaggaaaaactgccaagaatgtacataggacagctattgatccatactgtatagcttgtttttgatattgaaggcttaggtttggtaacttgtttttgatgaaggctttggtttgcttgtaaagtggtttgttgattaatgaagttcactctttgattaaaaaaaaaaccattactagtccaacaaagtcatcttgttgtatcccccaaagaaaattcaaaatactttatttaagaagaaacttttacagcaataattttgatgatgttgataaagtggtccaatttatgtatgcacccaatgagccagcaatgaagtgtgactgtgtaataaggccaggttgttgactctgttactatccattaacttccatgaaaatgatgttggatcatgaatttgtaatatttctgattttaagctcaatattaatatttataatttatacctcctaatatataatatctgtaaatatttcaaaagagctattttggaattattttaagaaaaagttattattaatttgaagctgaaaaaccagcagcctgaaaatccaaaagaaagtcagtgaacaatctctttccttgaacaagtttttccatattaacaaatggaaaattgctatatcagcaatctcttgtatcttgagattgaaggcatcgagtccactgcagttttgaggtccaaaccaatagccttatggtgcagttttaatgggcctgactgtagagtgtggcccaccatgccagcatgtgaattgtcctagtattagaaaaatcataatagctaggtatccatatatgtgttttctttttgtatatcatattaatgaatggtattcttttcttattgagccacactgtagacattataaatctatgtattctatgaattgaacttcagaatgattgtttacaaatttactgtttttttttttattattatacgattagcagagaatgatagagttatgaactgcttcatagataaatataagttatatgtacataaaaggtgaaatgtaatttgtgacgtaatactactaaaaatttgagttttagagccagtttttaaggccttttagcatcggttttgataaaattcactactaatgttgatccaagcaacgttatagagtcaaacataaccgataccgtatgtaaactatgacatcggttatttaataataactcacaccatatgtacactatgacgtcggttattgtaagtatataaccgacaccatatttatactatgacatcggttataagtatatataacagacgccatatgttgtaataaccgacagtaaaggcctaaaaaccgacggcgtggtgttaaaaattaatttatttttctattttaaatcttattataaattcaaaaatttaattaatttaaattagatatttattaatttaaaataaatataatttaaattaaataaaatatttattttttttaaaagctaaattaaatattatttaaattaattttatgattagcaaatatacttaaattaattttatggaagcaataattaaaaaattataaatatattacataaatattttaaaattagtccaagtgttaacaagttaataaatctaattaaacatatgaaaattacgagtgaacctagaaaaataagttaggaaagaaaaatgattatacatttcagcatcaatcgtccaagccgtaaatgaccgtcaacaatcgttctatcaattatcgctatataatggtaacaattcaatttttagatcttatgtcttttttttccaaaactgtaaaaaaatgtttatattagtatatatattattatttgttaatgtaataaataatataattaataaataaaatttacagctttttgaacgtttatataacggttagggttcgcacgtgtcacgatgttactcatgtatttcactacataaaaactatattcttggtttttaggttgtcttggacaatttgctagtaaaatttctagccacgccccaagaaacgcatgtgatactcctataatctcatatacgttgttttaaaatttgtattaatatttcaattcattaacatatatataacttagttaattaaaagatttgtaattacataaagagtaattaaattattacttttctaacattgcattaatttgtgagagatctttgtggtcacgtatagggtctaaatgaataattttttctcgtgtaacaacctctagcatccaatgcacacaaaaaaatatattgggatgtatataagatagtgtaaaaataatttcaagttataatatagaaaacaattttaaattatcttttaagtagtgtttacctaatattccaagaaattaagaatatttggtgttggttatattagaatattttatttatggaaataattttctatttaaggaaatgattttctattt

SEQ ID NO: 43208 - DNA, 2163 bp, Cannabis sativa
  modified_base (980)..(981): a, c, t, g, unknown or other
tttacttctctttttttttttttttttttttggttttctagaaaattttatcaactagaggaccttgttcacccacttttatcaccacttttccaaatcaaagttaattttacctactttcaatattctattttctgaattataatgtttttcatacaataatgttagatattgttttagatggcttggattagcttattatggtttcttttattaattttgctactagactaagcaaaatcaacttaaatttggtttaaccttttatattctcttacaacttagtagccaatattatgttctttttctttggagttttcatgaatgaaggtgaaaatattgttgtttttgtcgattgttgcttgcgacttgcgagtggcggacatggtgctggttttatattgataaaagaatatgaagatgagtttagtaaaggttcaactaaaagaaagcccaaaaagggtatctagctttgtgcaaataagtgaagatacacatatttgacccactacacatatataaagttgttagtttgtttataagttgtgtctaaaatatgtaacttgaagataatagaggtttagatatggtgtgtaaatcataaattctcatattctagtatttcacattattctcaaagtttgtgattaattattcaaaaatatattttaaaaggggtgaaagtttaaattttataaaataatatatttttattgtaaatattataattaaatggtttaattgttaagaaaattataatagagacttaaatataaaaataaattattatattaattgcttaaaagagtcttattaaatattcaaattaaaaattaattattttaagaaatggttaattatgttgaccaaaagtcaatcactcacttattttgatgataaacaaatatttgattattatttgttactaatttttttaaatcattttgtaagcaaattcacaaagtattaatatttgctcnntaaagtcaaacataatcaaagaagtggattcaacaagtatatcaactacttcatacttcgtaaaagcaaaagtttcatcaagagatcaagaatttaagaccctatccaaaagaggacctcaaaagctaaatgtcaaaagtcaatccaaaattcaaagtcaaagtcaaagtcaactctcagaaaaagtttttagatcaaaacatgcaaatcaagctaggaagctcatctacatcaagactacacacgatcaaatggtataaatttactttagtcttgttaaagtgatttgcatagtatactaggatttataagtacaaattttggcccattcactaacttgtgtgacaatttttctcacccgatggttcaaaatttttttttgattgactttctaaatcacattttatttaactaagagaataaaattagaatttttgaaaacagtaatcgagtaaagagttatacgcgctttagattcaaaaaatatatgttttgaacctacctgattttcgacctaccatttttcaataggtagtccatttcttacaaaaaggtagtccattttaaaataggtaatctgttttttcccaggattctttttaaaaacgtgctaacggctataaacggctagtttttgttcctacactatataagctcgtttttcactcaaaaattaaggttgcttgagcttctattcatcctataacatcattttaagtgttctaagctaaggaattatcatcttttcataaacacaccaaccacacacacttgagccaaaatttgtgtttatttatttcaagtgtgcttgcttatcactctaggttaatttctattgtatcatcatacttctagagtgaatttgcttgtaatttcaaatatatttccatattgtgattgaggtgaggttggcaccggtattataaacaacccagttatagtgagactgtcactacaacaatccgagagtgagattggtacttcaacaatccaaagacgttgatagtcctttggaaaactattggctgaatgaagttggcactggtagaaaaataactcggtcggtgagattggcacctcaaaaatacgatgaggttgatagtccttggaagaaaactattgtgagaggtttgggaaaaatcttggtaaaaaatttcctagttgtaagggttagtcaagccc

SEQ ID NO: 43209 - DNA, 6097 bp, Cannabis sativa
aaaaaaaaaaaaaacaaacctataaccccttatcattatttatttatgccataaaaaaataaatttttataattttattacatatggtatggtgtaatttgtacttttaattttaacttttaagggtactatataaaatatgtatatttattttattaaatataaagagaagacgtaaactatacacctacattaattgtcaacgtgttttagtgtgaaagtaatttatctttctttgagagtaattaagagaaactagtggaatgaaattaaacacgtttgcttaattcgcctctacatactaataacctgcttcaaattatttgtggttcattaataatcctttagtcatgattatgtcaaagaatcatcatcattgtcgtcaattttgatgatcagtatggcaacttaattctaatttttaaattttaggtcaattaataaggagttgaggtaggttgagttgggtttggtttgcaaaattcataggagagggattgttttgacaagtgaaaggcatgtataaaatatttgaatgatgtgattaaaaatcaccactatttttctgccactttttgtcttgactttaaacacaatcaaaatcaagagacccactaagaggatacgattggatttgggaaaaataatgcttttttttttttttcttttattaactactatctttcactttactcatttactcttctttgccgttttctttttttcctaatgataatcttggcaaaattagtcagatttttcggtattaataccaattgttgagataaaaaataaaataaaaatataaaagggagagagattgaagtgaaaattttttagtcttgagagatagttgattttgtagctgcacttaaatatttattatagataaaactatcttaaataaatagtgtaaattttgtgttaaatttaattcaaaaaaataaactattattatatttgtcttaaaatttaataattattcttcaatataatataatgttatggagagttttgagtgattttttttcttaaaatattaatgaaatattattaaagacaactatttatattagagaaccaaaatattctaataagggcaaatctcccctcaccggaatcttgcgttctctaaagagagtgctaacttagctaacttatgggttaaaacatttatagctttacaatgtcttatactactacagtcacactttgaccaatgaaaaaaaatatcaagcataacataatcttacttatataggagaggagtctgttaattaaagcaatacaaacacgactacaatcaaactcttactccacttccctgagagcatagtagatggcaatgaaagaatgcatacgtctttacaacatgaggagcaaagaaagagtgaggcgacccaacaaaggatgctaggcacacccttatatgatcacgaattacaacatattggtgaaaactaatgaatgttttccttcttgccacaagtcaaacattgatatccacgtcatcaagatcagtttctagatgaaaactttgttataagcttttaaaggttaggaatagggcctttcatgaaaaagtaatccctattgtgagagggattcatgaatcaataaagaacactttcgagggtcttcatattgtggagaatgatagtgctaacaatggtgatatttccgatttgtgaatgttccaacaagttttattgacgtctactctgatattacttgcaaggacttgtggtgagtaggtgctactactttttgaagattgttggttgcattcttgagggttttactgtcaggcttgattgtagggaccctattgatgctgaaactcttgcactttggcttgctgtctccttgtgcttgaaaagggggttgtctaagataatcctaattttagatttcaagcttttgttcgatggtatttactacaacaaggctccaaattggagattcaaatctaattttctacaattttttttacagccattagttccattttggagtgttgtgttctggacctgcaggacttttaatgttcaagctcattgtcttgcagctttggctactactaatttatgttttttctctttttgttaggaagaggtggaacctcttatcttccataaccttggttgttgaaactttgtttactctctattgtaataaaagtttttactactaaagaaaaaatagaaaaatttggtgtgatcttatgcatagtgatatgtgcaaattctttttctactaaaattctacacccacttagctagcaatgactttttttaacataatggaacttattttaaatcaatttaattggttaaagaaagttaccacctaagtgagggtagaattttggtctaaaaagtgtgtgtatacatctaattaccttaattttttttgggctaactttgtgtaatccgagcccacacgttccataaagtcttaactatgtattgggcctttgaaggatttggataagacgtttcaaagctccaatccaaatgtgaggaaagacactgtgctgaaacccaacttagactaaatttgtggaaaaaaagtgggagacgtctgacttcatcttcatttcacgtccacaaacccaaaaatacaaactttgaaggaattatccaaactttgacactatgccacaactccctccattcctcgcccgctaaaccaaacctttccttcttaattcctcaccaccaaacaaaccactacgaccatggtagtaaatctctcatgttctattccttcttcttcttcttcttcttctttaatcagattaacaaattccaagtcacccatcacagatttctcttttaagtctagaacccacttgtcaaaacctttttcttcttcgtccaacttagattttcatttcaagaagcaacttttctatgaaaagagtagaaacccacatgggaaaagggttaaattcaagacttgtgccatctccggctttgattttggcaactttgagagtgctcagtctgttttggaggctgctgccgtgttaaccgccattatcgtcgttcacgagagtggtcacttcctcgctgcttctcttcagggcatccatgtaagtaaatttgcagttgggtttggtccaattttagctaaattcaattcaaagaatgtggaatactctctcagagcgtttcctttaggtgggtttgtggggttccctgataatgatccagatagtgatattccacccgatgacaaaaatttgcttaagaacagacccgtattagatagagctattgtgatttcagctggtgtagtagccaatgtgatatttgcatatgtgattatctttgttcaagtattgtcagttggtttacctgtgcaagaagcctttcctggggtacttgtgccggaggtccgacccttatcggcggcttcccgggacggtttgcttcctggtgatgtgatcctgcaagttaatggaagcgagttgcccaaagcaggtcccaatgctgttttagagatagtcgatgtaattaaaaagaatcccaaaagaaatttgttatttaagattgtaaggggaaaacaagactttgaaattggggtcaccccagatgagaatcttgatggaactggtaaaattggagttcaattgtcaccgaataccaagttttccaaggtcataccaaagaacatatgggaggcttttaatttttctgggaaagagttttggggactctcttacaatgttttggatagtttgaaacaaacattcttaaacttctcacaaacagctggcaaggtttcagggccagttgccattattgctgttggtgccgaagttgcaaggtcaaatactgatggcctttaccaatttgcagctgtgcttaatcttaatcttgcagtaataaacctacttccattaccagctttggatggaggttccttagccttggttcttatagaggcagctaggggtggacgaaagcttcctatggaaatcgagcagcgtattatgtcatcggggataatggctggtatacttctaggactattcctcatcgtcagggacacacttaacttggatttcatcaaagacatcatgttgtgagattgatgacaggttcattgaagcattgttcgataaaactgtctctgaagctggtcttgtttttgatgtgagaaagaaagcaacagataagattgttggagatgatgattgagttcttccacgatgttagatgagaggtacttgttggattgtcactactatatttgttcttcaagtgtggtctcattcatagtcctgtaaattataattttttttcttcctattaatgaattggaaagagtaacattcacttatgatttctattatcttttttcatcttccaagaggtcatagaactcacaattttttgtgatagatggatccttgaactaccgataagactttatcaaaatacattcttaaaaacgtacttgaagaatatcagctatatttgtagtatcagctatgtttgttgatatgtctatgcattgaaatttggctttcctttgatactttaacttattttgctgtaaaatcctgtggattattatagcgctcttgaactggtaaaggtgtataattagcttgtcaagtgtttagggaggcagatactaggctggagttacagctcggtcacccaaaattattattattattattgatatttgcggagaaatatttaaattattacattgtaacacttgtatttaagattctttagggagtacctaagctaagctattacccaaattattattatttttttcttttggcattaaaagtactcaagttattgtgtttgtagaatttatcaaaagttattttattcgtacttaagttgtcccaagtgttctctaattttcttataatttggattgttttgctgcaaaaaaaaaaaaataaataaaaaaaaaatgaagaattcacttaagtttaactgttactaacataataatttatatattttcgccgacaaaagaataaatcgccactaaaaattaatttaggtattgtttgtttctttttgttgaaaaaatagcttaagtatgtaagtatttttttcttattattatttatttagttattttagaatcatactaaatatagtatttatctaattactaaaatcttacgataggaatatagtatttatccaatacggaaacccatcaatagcttaagtatatatgtaagtgttatgaacattataatttaggcacttttatggtatatgtcttattattaacgtttggattgttaatattgttttagcacataattttttggtattataattagttattagtgtcaaactaattattttgaaaatttatttggtaagaacttattattaatactatttttttattatgtattttttattttttgtgacgcattagtaactagttatattttatcattatcaattttttcagttttagtggtataatgttaatctgctttctgctattattatgaaattattttattttatttgtaaatattttaataatattaattgattacgaacactttaattattaaaaagattttttagggtttcatcttttttttttttttttttatagcccctagtcgcaagttttttgaatttttgactagagccacaccagttctccttgggctttggcgtggctctggtcaggtgtgagtgtatgtggtgtgtgtgcacaagagcctcttggtcctttctcaagttgccatggatctttctctctcttttttttttcaattttttatgggctttcttcgacgggttgtgtgactccatcgaagattcgacgatctatctgaggttttgtgcttccaatcgggggtggtaccgtcaaatttaaggtggtgtggattcttgcaaggtcgacaatggtgtagctctgtttggatctatagtgggctcttgtactgggttttcttgagttggcgctgtagtggaggttcacaaagaagtggtctatcaatatggtagtgttttaagattgaaggggtggccaacatttgagatttttttttttttttgatgcaacagaagctttattgaaa

SEQ ID NO: 43210 - DNA, 1828 bp, Cannabis sativa
gttttttcattccctcataaacacctatgtttgagccactcactcgggccaacacatccaacaaaaaacctggcgcctttcccacaccacatacttatcttggcattaaccaattgattatagatgattttagtgcttctctcacaccagcaacaacccctggtgacaatcactcacccttaaataattccacaatatcttatcatgttaatgatcaagcacgcaaagagaattctgatgtgcacaactcgattgatagcagttctgatgtttgtcccacaccagacaccatttgtacagaacaaatcccaactctttctgctgaaactccacaggttactgaagccatacctgccacttcagctaacacatcacctcctcaatccagagttggtagacatatcacaaaactcaaacttttaacagactatgcctgtcacagaacatctacagtctatcctattgaacaattcatatcctatgccaaactaagccctcaatttagagctgctgttttggcagcttactctcaaattgaacctcattcttattcagaagcttcacaattcacacattggcttaaggccatggatagtgaaactgaagcacttgaaaaaaacaaagcttggactgtcaccaaattgcctcctggtcacaaagccattggatgcaaatgggtctacaaaatcaagtacaatgaataaggtgaagttgttagattcaaagctcatcttgtagctaaaggattcaataaaaaacaaggtatagactatgatcaaacatatgcccccatggctaaattcaatacccttaaaatatttcttgcactagctgcaatgtacaattgggatgttcaccaaattgacatcaacaacgctttcctacatggtgatctccttgaagaggtctacatgaaaatccctttgggttacaaggccccccaaactctgtttgtaaactcaacaagagcatatacgaccttaaacaagcttctagacaatggtactaaaaattaagtaccacactcaaatctgttggatttcaccaatccctttcagataattccctattcatcaaaaaaaaaaacatctacattcttacttgctgtactaatatatgtcgatgacattattgtggctagcaataacaaggaagccatcactcacttcaaacaatttctggacaaaaattttacacttaaagatattggatcacttcgtttcttcctcgcattagaaataggaagaacaaagcaaggtatatcaatttcccaaagacctttcactctacaactccttgctgacacgggttaccttggagctaaaccagcttccgctccaatggaacctaaccttaaactcagcaaggacaaagggaaactccttcccgatcgtacaacctacaggagtctaatcggtaaactcatctacctcaccataatgaggccagatatttcttatgctggaaatcacctaagtcaattcctaacatgtccaagagtaccatctccaagccactcatcgtgtgctacaataccttaaacgaactccaggacaaggtctttttttcccatcaaatgtccaactttctttctttgcagatgcagattgggggacatgccaagatacacgtcgatccatacctggttattgcgtattccttggcaaagctctcgtctcttggaaatcaaaaaaacaacaagttgtttctcgatcttcagcagaagccgaataccgtgccatggctaatgccacatctaaagtaacctggattattgccctcctcaaggattttggcatctcactcaacaggcccgcatctttgtact

SEQ ID NO: 43211 - DNA, 7080 bp, Cannabis sativa
tgtattgaattttctcatctatttgttctaggaatagtggtacctaagaaggaaattgctgaaataactgaaaggttcaacatccaagtcagcaatttgactcaggtgagtctctatttagatcagtgattacaactatgaagtattgcatgtacaacaagcgataagttcaatgaatgcatcttttttttttatgattatgaaatctgcaattatttcgaaagaaaaaaaaatctgcaattaaactctacatgttaaaattcatgcatggaatatatttttgtatgtgtaacatgtgatataatttcagatctacttgatgtaacattataaaagcttgtgtaaaaatgtttgttaaccttgcccttagaactatgtgtatatatagatatatatttatatatgtataaatatacataaatttatattagtttatgtgaatgtgtcggttgaactaattttggtgagatgttttactttgggtttaggccctttagggatatagttcactatcatttcattttaaggctaaattcaacttgtaaagcttgaattttttcgacttcccttagtttttttacgttatcattttctattttcttttatattctgttaaaaaaaaaaatctcatagcatatgattgttaaatcagagactttctttgaaataattaagctatattacttattttccttttttattggtggtgggttgtgagaatagtttctgcctcaagacagagtctgtgaatttgcgaggttatctcctgtaaaccttctaaaagagactcaaaaggctgttggtgatcctcaacttccaatttggcgtgatgcactaatagaaaaaagtcaggaagtgaagactttagagcgggtaagtttccaaagtaacagttttttcaagatgaggtttaaatttctgaaactcccaccttcttagctcattgcaaatcctctttcaggctattgaatcaaatgaaaaaactttggatcagcataaggcatatattgctgagcaacaaagagaggttgaacgagttcgtcaaagagaagaacttctagccaaggtttgtttgtgggtttttctttttgtactcattatttccaggcccagttatgcttgaaattttttgtttgctattatttgtaggctgagaccatgaaaaagaaagtaccgtggctaaagtatgacatgataaaggctgaatatttggaatccaaggaaaacgagaaagaggcaaagaaaaagctggatgaagctgcaaaaatactgaataatcttaaagaacctatagagtatgatgttttggtttaacctgatatttatgtgtcttgcatgaagaagtacttattaagtgataaattcaaatctctatatatcttaacaatcaggctattctgaaagtcaggaagagttgtttcaggtgtttataaggttgagtaataaaccaaagataacacaagttataatgaatgtctgctcatttcatggtaatcataagatgcattcataaagacgcagcagggttaaatatttgtggagttcgtagcataaaaaattatcttatatgtttgttacctttgctatgtcattctattcagttttaattgataatagatgtggtataatatttgtccaatatgttaggtgtcgtgtctgtgcttgtttcttctagtctactatcaaattgcttgtttagagtttttctctgattcttaacacatggttgcaggaaaaaaaagcgagataaagatattcttaaagaaaaagttaaaaagatagctactcgcattgatgctaatgctgaaaagcgtatcagtactctggaggatgcagaatcttgtgtaggttttaatggcatacttttccgtttttctgtaatattttgcaatgacttgtttattctccaatgtaattattgtaatatacctgtaaaggataggctgagttgtcaggcccgtaagttgctccatgaaatctggggttcaatttcttgtatggatttatatagcaatttgctagagtattgttgtggaaggacaactctgtgtgtgtttagtctctattattcttaattctctataatcaccaaagtgtttatagggtgtgaaagtgcaagggagttacaaagaaatggaaaacttgaagagaaatgaagaatctcgtcaacaaaggatcttaaaagtcaaggaggagcttgctgctgctgaattagaattagaaaatatgcctccttacgaacctcctaaggccaaaattgtaagttgttgtatgtattgggtaaaatgatataatactagtttcttattgtagaaatgaactacttatttaatcttcattaaaattcaatccaagtagttcactatgttgtacattctgtttcccaaaaatgattctgttgaagtatcaaatatgtgaaacaactcttgctcaatcgaaacagcataatcatctgtatatattttagtcatatatttcaatcttttttatttttatttagtttctcagttatttggctatgttaatcttgttattcatttatttttctcatcaggaagaaatgcgcggtcaactatcagaactacgagtatccgcaactgaaaaaatgcgtcaaagacaagagaaggaaaaacttttgtttcaaaagaggaaagctcttggagagaaccaggagaggttaaatttagcaagatcatgctctccatattccctatgcaatgtccaggatttcatttgacccaatacttcttcgtactatttagttaatccaaccttactatttgcaggttaaaacagattcagggtagaaatatgaaacttctgcaagcattgaaaagatctggatgtcacagaatagttgaagcttatgattgggtgcagagtcatcgccaagattttaaaaaggaagtttatggtccggtgctgctagaggtacacacatgaaagccttggctgtatagtttactgattattgtttcttcacaataacttcattgaagtcattttgagcacaaactcaggttaatgtaccagagcgacatcatgccaactacttagaaggtcatgctcctaactacgtctggaaggtagtttcatttaaatattattgtttttgtttgtacttcatatttcagttttgtttgacaccgagcgctggtttctgtctacaattccattttacttgtggagttttcttcataatttcctgtaatttatcttgaatgaggcatttgaagtttattcttttttaataattaccttggtgaggcatccatttttagtttacttttgactaagctataatgttatatttgtaatgcacttcatatcatcatattcgagtgacatgtcaggaacaggaatttgtccacttatttcctacttataataacttgttcatgaatctgaatacttcattctgaatttatttttcacaagctttatctttatcttggaatacagattccagttttgacatattgtaagccactttagggttctagttttcctttggatcactttgcatcttgatagacttcatagataatttgttattattatctgggtgatagtgcagttttaatttcctccccaaaataatctcccctgttttgttggcttatattcttttgacatttcttaggagatacacagtaattaaaattgtatctaggattgactttgataagttacctgttcaacagtaatcttgtaacttttgtgctgataatatttctatgctatgtagtctttcataactcaagatcctcatgaccgagatcttttagtcaaaagcttaaaaccatttgacgttccaactttaaactacgtggcaaaccaacgtttttctagtgatccatttcaaattactgaccaggtatatctccgtagtcttgaagctctctatttttaatatcacatctgagtgtttctgaattcatttgtttatatttcatttcttcttcttttggtacatggcagatgagggcacttgggatagattcacgactggaccaagtctttgatgctccttttgctgtcagggaggttttggtttcccaatgccatttggataaatcggtatgattcatatgctttgcccttgattatattatagatactaggactgcataagtattttttagaattttgagtagtctgttgggatggtgatatgaagttggcaattgaaaatggttgtgttttgcttcttggctttacttttctcagtatattgggtcagagaaaactgatcacatggctgatgagatctccaaactgggaattctcgattgctggactccagaaaatcactaccgttggactaaatctagatatgggaatcatgtttctgcaactgtagatatggtgtcacagtcacgactttttgaatgcagtatgtttcaacaatctttttctatactggtgtgatcccagcagttacaacttttgagatactcgggatttttatttttgcttctatgttgcagatatagatgataaggaaatagagaggctcaatgccaagattacggagctagaagaaaatattacttccttagaaagaagtgttcgatcacttcagtctgagggaagtctcattgatgaggaagctgctagacttgaaaaagaacgggtatgcctgaaaaatattcacctatgaccataagcatccaatcatagttttatttgttgacacatgagaaatactgttcatcacattggtgaggaatttaaactctgggtataccttgtaggaagagattataagagttgcacaacttgaatcaaggaagcggcgcgatatgcaaaaccgtattggtaaatagaaattgtttagtcctttgccatattttacacttgaatgattattagaaactgaacatgttctgctgttctagaacaaaagaaacggaaagtagagtcgatagagagggaggatgacttggatacccttatggcgaaactaattgatgactgtgcaaaatataaccatgatcgtttccgactattaatgaaatttaaggtggagttgctttcaggataagtttttctttttttgttttaatgtttttgcgtggtaaattcataagatttatggtaaagttatctatcactttaacaagaaatatttttttgattattttattcaattaaattcgtttttttctttttttcatctcacaggatctacttgttgaatctgttaagctcaaacaaactcatgctgaaaaccatatggccgccattgaatttgatgcaaaggtactttctggttaagtcttgagccgaagtaacatggtgtttttaagatataccacttgattttattgatccccgagtttttgatttaagtcttaaaatttgtttgctggataggatgttcaaatgacctttaatattttagccatactagttactgatccctcatcttcgttagatttatttcatccacaaaccaccatgatctacttaaataaaatctctaggttgcatagtcactctttggttcattctggattttgattcaactaattttatatttttgttggtaaatggtcatattgaaatttatgtttttcaatatttaaaactgcaggccttgtttctttttgctatgttgtttatgcttctgattggattgctctgatgtctacgagtttattatgtttttagataagagaaatggagatcaatatcaagcaaaatgaaaaatctgctcatcaagcagcaatgcatcttgaggagtgtgagtagtcattttgatgtgcttccatttttttcttttggtctaaaatattggtaatctagttgaaaatttgtttgtgcagttgtctacatattattttgtcaaaatttgtactgtatttatttatttatttttaaattattgaaaacaatatgtttttagagataaatattctccatgaaaggctgacattattccatttcgcttcttgtcaaggtaaagaagcagttcgttattgtcaagagaaactttcagctgccaagaggcacgcagagtcggttgcagtgcttacacctgaacttggaaagaaatttcttgaggtttgtttacgttaagacaaaattgtaagtatgaaaatgattatcagtattagttccatgttatgtgtgtaaactcacaagtttctcatgtgcaagtattttggttcattgtgtataaacaaactgttacagtataaaccttaaaaactgttacagtataaagttatctacatgaattacacatacaattaaggtgagtttgcttacatttttaaaattgcccatacttgtactttgcttttggtagttaatacatactaacatttcatgccctgtattatttcctggtgctgcattattttcttttggcccggctcgtggatgtattaaaaacaacttacatttaatacttgcttttagatgccaactacaattgaggaattggaagctgcaattcaagattatatttctcaagccaatggtattttctccttgaaccgcaatgtattggaggaatacgaacaccgtcaacgtcaggtataatcttcttctgttatctccaacttttacttattataaaactgtttataccttaattaattttgattgaataacagattgcagctctttcaacaaaattggaagacgacaaattgaagctacagattcataaagaagaaatagatcaattgaaggcaagtgatgtttaatttttttgtagttatctttctctatacagtacatgtgccctcttggcaatgagtcttaagaaatttcaggggattcaatatggagttcgatgaattttttctccaagatctcgtgattgcatttcgtaatttaaatagattgttccaaatatattaagttggaaattcttcatgtgtgtacactcaataagtggaacatctgagatgtcataatatggattgggaaaaagtgtttttcccgatgcatttcttgttagggcatcttaatataggatgtttcttaatttacttgcaggagagttggcttcctactttgagaaaccttgttgctcagataaatgagacattcggtcgtaacttc

SEQ ID NO: 43212 - DNA, 2501 bp, Cannabis sativa
gggcttgtgtagagactcatgctttgggcagagactcgtgcttgaagcttaagcagagactcgtgcttaaagctagggcagagactcgtgctaataacgtgttataaaataatataaaatagataagaagaagatgaagagagaaagagaaactaaatgagaatttctcagttgtttattccaatagggtgaacccctatttatataaaagtattgactaaaggaatgggaaactaaatcaatatgtaataaagaaaaatacaataaagcattaatggtgataattaatttggtgatttagaaatctataaataatatttcataacataaattaaataattaatattaatttaaaattatataattctcacttaaaataatttatggctacattttttttcttatcggcaggtaacatgaaaataaaaaacgttaattacgttatacaaaaggtgaaagagtttcttccatccaataaattaaaagtagaaataaagccaattgtctaatctataggcattttaggctaacgtataaacttgaacattaaaattgcaactcacataaaaatttgatatcttgaaaaaactaaacaatacaactttaacatcagattagaaaagaaatttagaaattattttacaagtttattgaattgaaagtgccctttgtttgggtctgtgtcagttgtagtatttgttttctttttaactgttttttcaaaatcataactgtcatatcgttcttttcccttccttttcctcaccaactgttctcgcccacccatgccactgctactaactgctctgttcatccctttcttgccacaaattttctaatggatccacttctaaactctatgaattcaacactatctctcactgaggaagagagttcgattgtctccttgccagatatcactaactacccaccattccaacaatctgaccatgtgctttttgttcatgttctcaccacgaaaatagtttataaacctagttttattgatcaaatgtctgggcattagaaatgtaatgaccccatgtgattaatactttggattattaaataattagggtttattcatgagatttaatattatttataatatgcatattgtggaaatttatttaagttaacattaatttatttattatgctatttatgtaaacttctcaatttctatgtttgtgttcggaagctgtggaaagcgacgtttggccttcagagagttatagtatgttatagtattatattattttcgggacatcattcttaggtttgatagtgtcggatattagtcaggttattgtttatgaccaaaatacccttaaaaaccttttcttttaatccttggtgtttattaaaggggtaattaatcttttcctttttatttttatcactttcagctatttaattaagtatattaataataataaaaatatatatacatattaccttttattcatgagataagttagaaaaccctagaaaactatcacccttcctcaacctctctctctcttgctctcgattttcctaggagcagctagggattgtgaattctcagcttatcatcaagaattctagctgaattctaaggttccaacctaaggtatctcttcctagctatcctctttttgtttctctcaagtctaggttgaaatttaatgattgaattggaggattttgtggatgtttatttaaggatttttttaatttatattctgatgtttgattgagatgattattgctggtttgggctaagctaggtgattattttattgtttgagtcaaattggggtttatgaactctaacttggggctctaatggtgtctttgaattttgagtaaattgttgagttcttttggctggtttgggtctatttgagtgtatacaggtatcctggaagtttttagaaagtttggggttgatttaaattaaggggatcgatttttgggttcctagcacagaactggttgaccggttctaggaaaccattagaatcggtcgaccagttggtacccaggaactaagcttctggttgggaaccggtctaacggttggggctttttcccgaaccttagttttccctgtttttgtgttgtttagggtgttggcatcctaattatcgatagggttattcttaattccaattttaaattccagataagtgttttagcatgtctctcatcgagttttgaacgttttggtttagggccctgtaaagcgtcgagttgcatttcaactcaggctgaccggcacacctgagcatagaatgagataagatagcatgataacgtatatatgaatgtatgcttatattaattgtttacactactaacgctaatggtttgtgtgatttaaagggtgttagtatagtgtagatttttaaagtagttacagtgttacgaacacgagtaccaaggggtacatcgtgcatgtggtacaacacttagtgacttttgggggtaccataatggctctaccaacacgagta

SEQ ID NO: 43213 - DNA, 3735 bp, Cannabis sativa
aataacgatatagttttaggattgggcaattgttcggttgtgcactttgcggctaaattctcggtctaatattttatttatttatcaatgatttgttatgttttgtttactgagcttgttttatagcaatatttgactttatttaccaaggtattcctccaccacaagtgaggctcttaattcaaaatggggaggggttagtctaagacaagtggcctctttctctttttcaaaaaaaaaaaatttatctatttatcttttgaaaaagagatagaggtcacttgtcttagactgtaacttcggaacaatacacctaaggataagtagtgtaagatgattaggtctcgaaaagacaatccctcaaaccctttcgacttaagtaaccatgtagccacccagaatatgatgtttgcccatactaattcagccccattttcaattccttcgaagatcctcccatttctctccattttggtcgatattttgcttccaagaagttaagaatgggtgtgcaaaagtcttgtgtgaacatcaaagtagtgggtccttctgaggtaaacttagctttggttggttcttacctatatcgtccctgaaattggtgctctgtagagttggaccggtgtcttgatatttgtcggtcttatttgcattttgcagctgtttacactcatgaatgaattcattttcactttatgctccaatgtaaccatcataccctcccataaaagtgcaatgtgtctactctgactcaataataggttaatattaatggtttgaaatgaaaatttttggttactcgtcagtaattgctctgtattgacagtgaacataattaacccgaagtcgatttgatgattcaatacatgggacacaatgcatattagttgcaagtttgggaggttgaagtaagtttttccacactggaaaaagctacaacttcggttttagtcaaatataatttctggaatcttggagagactatgatgcatactgttttgtgctattcaaaatagttggactacatgactttgcatgtttgtactttgtactgttgcccctgcttcagatcatgttaaggggaatataataatattttattattatgcagctgtttgcaaagatcaaagtatgacattggagaagaagctgttaatcgattttcattgtctgcagaagacaaagcgaccctagaattagctgagtgggtggacaatgcagttagaagagcatctgtatgaattttactttttctttttcttttcttatatatgctttttctttctttctttctttcttttttttttgaaaattgtttatctaggaatcttgtttaccataatactagatctacaaattgatctttcctttgggtactgcttctctttttactattctaattctatttctgcacatatttatcggtaattcactatagctattttaggaagtgggataatagtattgaatttgactattcatttattattgatgaatattgagcaccacattttctatattgtgaattgtgatgttttcaacgttagtacttatgtttgcttacatcaaatattgtttgttacttctttatgtttgtggactaataccttcccaggtagaagaagtggtgtctcgtgctgctgatgggacttctttggagctagatcttgatttttcatctttacgcacccaattaggtcctttggctgctgtaagttcttgtatttattttctttatttcctctgcaagttgcagagtgttttgatattgttagaacttccagtttctacttttttttttttcctgaaagagaacttagttatagtaaattgtatgtttttcctgccagattcttctttgtatcgatattgctgctacttctgcacggtcggcaaagatctctcagcagcttctgaatcaggtagttactatatatttcatagagggggtcataataattatactcgtttaaaattagaaaaacaaatgttttttaacaaaataatttgttttatttgtcttggttttcttttgatataaaatatctacatataggagaatctctcactcagattttttttttcttgtgtcttttgaaattcttattttctatgtatacattatccaaatggatccacataccttgacagaaaactgattagtaatttcctccaagtaatcattgattaatgataaagcttaacaatattctctatactatttcaactatctttgatgcaatgctccttccatgctctttcctattacaagttagaactatcattgacctttctttttgtttctttgcactgcagttattttgataatttttgagttaaaataaaatagttccctggtttacattaactgtatcaggtcttgaagaacaactttaactttctctttgtgtctttgcatttttagtttctaagttctgcaacttttccggttaagagaaatggtttttggttgcttgcttttttaagtgtgtattgattatttatcatttgcactatgcagacttaagtctttttattccgtaatcatgtaggctcaagttatgttatctgagatttatccaggtgtctctcccaaaaaaggttcaacatactgggatcaaattcttgaagtaggtgttatttctgtttcacgaagggtccttaagcgtctaaacgagctcttagataaggtatcaaaatttttatttcctgctgttgaattaaaagctctcataggtcaatgaaaactggcctgactttgatagtgtcatttcactttattattatcttaaaaaatgttcataaaagatcgaggacaaggttggcttgaactccaaggctgggagagagcctacatccaaaatagtaaagccaaagaagatcaagcagatgtctactatttcttgtaattcatagaaagagaggttaatatttaaactgaagatacccaaaggaaaacttgaagccgcctctcagtcacaaatcttttggtttttcaggggtactttgtgagagttgttattcctctctcttcttttggttgtatttctcattttgatgaatatatttgtttcagacaagtgaatatagatttcatagagctctttcctcaaatatgtatatctttctgcaactcatattttaacctccctcttattaattttaagttgatcgtttcatctccttgacacttccatactatccagctccccgattgttttagaaaagcttgttttcttaaatcgccaaacacagccacatttcatctattcaccttttcttggatcccctgtaatttggccaaaaattcccaaccttgaaaatgtttctccttcttatctaaatggcttgttaacattcaaatgtattaagactgaaaatacatcattaattgcttttttctggctatttttttttttgcttgtcgagcaatgaacatttgttctatcactgtcttactgttctacctacattgttttagtagcagataatatttgaacttctattttgatgtttatagtttcagttcttagagttcttgaggtatgttacatttctgctagaaatattacttggttactgaatgtgctccccgacactcttctaggacaaccctccagctattcagggtattttgtctggagagctaatcatttcttcgcaaaaagaatctctccgacagggacaaagggaacgtgctcttgctatgctgcatcagatgattgaagatgctca

SEQ ID NO: 43214 - DNA, 3292 bp, Cannabis sativa
ttttctcattcaaaaaaaaaaaaaaaaaagattttttttttcttctttccgaaaaatgggttcttgtttctttggtttgatacttgttatggcattgttcttggagcctttatcttgtcaacaagaacccaattcagatgggttttttgtctctgagtttttgaagaagatgggctcaaattcttcctcattttctcaaatttacaacttttctgtacctgtttgtaaatggcgaggagtgttctgtgatgctaagaaagaacatgttattgagttagtagtttctggtttgagcctctctggttctatacctgataccactattggaaaactgacaaagcttcagactttggaccttagcaacaacaaaatcactggcttgcctgctgatttatggagtttaaactcactcaaaacccttaatctttcttctaacaagatttctggtccactgcctaatgacattggcaactttggtcttttggaaagctttgatatttcaagtaatgatttttctggtaaaattcctgaaactataggctcacttcttagtctgagtagccttaaactcaacaacaatgggtttgaccagaacatcccatctgggattctcagttgtcaatcactggttcttattgatctctcatcaaatcggctaagtgggtctcttccagatggttttggtgctgcatttcccaagctcgaaagcttgaatcttgcagggaatgagattcatggcagagagactgattttctggagctgaaatccatcacaactcttaatctttccagcaacttatttcaaggtccagccttggggatgtttaaggagctaatggaagtgattgacttgagcaagaaccagttccaaggtcacatttctcaggtacaattcaatactagctataactggtcaagattagtttatctagacttgtctgagaatgagatcagtggagattttttacacaactttggtcaagcacaaaatctcaaacacctcaatttagctcacaacagatttgctaagcagatgttcccaaatattgaactgcttttgggactagaatatctaaatttgtctagtactaatctcattggtcaagttcctagtgaaatctcaaggttgagtcatttgaatacacttgatctttctgagaaccatcttgttggtcatatcccatcattgagtgcaaaaaagctccagatttttgatgtctcaagaaacaacttgactggagacattccagtttatcttttagaaaaactcctttggatggaaaggttcaacttttcctacaataacttgaccctttgtgcttctcaaattccccttgaaactctcaaaacagccttcattggatcattaaacagttgccccattgctgcaaacccggccctcttcaagaaaagatcgtcctcgaaccatggtggtctaaagcttgccctggctttggctctctccatggtatgcttgcttgcagggttgctttttctagcagttggttgcagaaggaaaaatagattgtgggctgttaagcaaccttcttataaagaagaacagactatttcgggtcccttttcattccagaccgattccacgacatgggtggctgatgttaagcaagcaacatctgttccagtagtaatttttgagaaaccattgttgaatatcacatttgcagacctcttgtcagcaacctcaaacttcgaccgaggcacccttttggctgaaggtaaatttgggcctgtatacagaggattcctacctggtggaatacatgtcgcggtaaaagttcttgtccacggttctacattgacagatcaagaggctgcaagggagctcgagtatcttggccgaatcaaacacctaaatcttgttcctcttactggatattgcttagctggagatcagagacttgcaatatatgaatacatggagaatgggaacttgcagaatttgctacatgatttgccacttggggtccaaacaacagaagactggagcacagatacatgggaagaagatgagaatgctgacatccaaaatgttggctctgaaggattgctaacaacatggagatttcgtcataaaatcgcgctaggaacagcacgagcattggcatttcttcaccatggctgttttccttcaatcattcatagagatgttaaagccagcagtgtttatctagacgacaacttggagcctagattatctgatttcgggttggctaagatttttgggaacggtttggatgaggagctcgcttgtggatcaccagggtatgtgcctcccgagttttctaagccagacatcgattcaccaacatcaaaatccgatgtctattgctttggtgttgtgcttttcgagttgctaaccgggaaaaagccaattgaagatgactatccagatgaaaaggaaggaaatttggttggttgggttagggggttggtcagaaagaacaatgctgcaagagccattgatccgaaaattcgtaatacaggaccagaagagcaaatggtggaagcactcaaaattggttatctgtgcacagctgatcttccttcaaagagaccaagtatgcaacagattgttggacttcttaaagatattgaatcaagttctaataacaatcaatgagttgaagtagggaaaatcaatcaaatacataatggagattcttgtttcttatttttcttttcttttttctattgtttctttctcttttgttaatgtcaaatctttccctctctgatatgccacaagggaaaatgtacagcagtcctttaacttctgttttggacatggtgcctttctttatggccaacttctttttggctctaatttatatacacagaattttgttctttgaaaaatcattcttgttattgttatatgcattgtccttgttttcatttagttcaatgatttatacatgtcaaagcttaaaaaaagtttaaatatgtatcatttcaccttgttttgctagctctgatgatgacttttaataatgggaagatatttgtttaatgtgatgggatgctgtttgaagacgttataattttattgtttaaattttcgaggacaattttgttttatgtagctctcgattagaattttgcagctcatgatttggtaaacacatgcccttcggttagacgatgagctatcctggttcgagaaggttcaaaaatattaatcatgtgtgattttattcaccacgtaaaaaaacaggatcgttattattagtacaattaactatgagacatcacctcaacaatgctagtgatt

SEQ ID NO: 43215 - DNA, 1833 bp, Cannabis sativa
ataatagataagccgccgaactgtacagaatgctgtctagagatattttctataacttagtttgcaatgtcatgtctagtaaattagttctgattatatgcacatgaaaaaccaaatgaatttcaaatgtacatctttatctagatttactatatcgagtaaaaatcgcacctttgtttctctacgacttattgctctgcggtttctcctgctctcggttatttactttcactacattgagctttgcataatcttgactgaagagcttcgacacggtcctctcttgtctgttaatgtctgaaattcatggtcccgatcttgagaaaagactacaaactaaaggtggacaagtctggcatttgactttgaaattcctttgatcatattgttaatttctccgaatcatctagtcacgagccagcctggttttactagtgtatctcgcttaaaatcgcgacctgtaactgaagttgattctccctgtcgacgaaaacactgcacagtaaaggatattcactgctcaaaacatgactcctaaaagctaaaacaaaaatattggaaagtaaaatgaaaagaaaaccgatttccaataatgatctattaaactctgccaaccttgtaacagacaatggtgtcatctgggtacatagcaaagagttttgttccaaggcgagcatgacaagaatcacaaaggctctcgtcattgatctgcacgtgccttgatctttcttctaatctcgctaatcttgcatcagtgtgcaaagcacgagataaattatgcacaatctgaagcaaaaagatcaccgcacggttcaattttgtggaaaaataaacgctaataaaagactcattttttaaaaaataaattactatagagaccttaaggaaagcctaacaataaaatctcaagcttttaaaaaaatatacctgtccttggcgatggtgatggagccgagctctcaacattcttaatattgtttcagaagcaagttgaagaggcatatcagaagacaatctctgcaccgtacaaaacagatttttactgagttttgatgatttgcactacgaccgtcattgataaggaaaacgaaaacagatacctctaagacttgtaatggatccagagactctccgtgattgtggagaaggcgaacagcagccttaaacataggctccttaccatcttgtggatccaaatacatatcaagcaacctgaggtcattagaaagatcgtgaggcgaaaacaaatcacaaatatcctttgaatgtatatgtatttgtacgtgtgtggaaaggagagagaacactaactgcatgtaggcatcgggtctcccaatatcagcacaatactgttcggcagcttcactgtcttccagcttcctgataggcaatatataatggcatatcaatttggaaacatccagaaaaaaaaatgtaccatacttgtaattgactacatgatgatgatgaaatccttaaatttcggttaattttatttacatatcgtctttgaatataaaatcacgaaaggtgatttcattcactcttgaaatataagggtcaagcaattatcttaagataacacaaactcaaactacaaatctgaagaaaaatgaaaactggtttgtcgtttaaaagtaaaaatttaacacaattaagctagtagaaagcaacgacaaacttacaaggccaagatctgaagcaccaatgtctcttgccctagctttttgtaaagaatcgcctgtttggtgaaatacgaatttataattagaattttaggacaagtaaaaccaggtgtgacactaaccaaagtcgataggaggaatcaaagac

SEQ ID NO: 43216 - DNA, 4447 bp, Cannabis sativa
agatgcagaaaaggtaaaactgcaattccattataaggaggagttctggagtgaagaccagaagaacccagaagttggccaaggaaaaagatgaaggtaattctagtaatgctgttaatcttgaccaaattctggcgcaatgtgttgaggtcccgatcaattatgtgcaaaattttggagatggcgaggaggcagccaatgtcatgcccccaccttcgccatgaggtgcctagcctagaattgccgcggcctccgacggtcggcggcggagagagccttaaaaaagctctctgggggtgaggggatcgatgtaattttcttaatggaaacaaaggtggatgaagaggctatgattgagatcacaaggcgtctgggatatcaagagtgttgttgtattccttctattggaattgggggaggattctgtgttgcgtggagaagaaatttcaagatcaaagttcgaaataagtttaattttggctttgaatgtgtgattgaggaaggacacagaccatcttggactttgttcttaacttatgggaccccttatgggcgagaaaagatagccttttggcattggttgacagatgtagtacgacaatgtaacactaaatggatgctgtgtggtgacttaaatgctattgcaagtgaagcggagaaaaaggggggtaaagattaccataacagggagggaaggcatcttcaaaacttcctgctagacacgggcggagtcgatctgggatatgtaggaccaaagtatacttggatgcgaaaaaaaggggcgtcaaactctgttcgaaaatggcttgatagggcggtagccagtgctgattggtgtgtgcaatttcctgaagcaaatgtgttacatcacccgattttggcgtcggatcatgccccaattgtagtggacactcaaccggtctcttgcaagcttcattatcctttccggttcttggaggtgtggacaacggaccctcgatgtgaagaggttatcaaggattcatggattaaacctttctcgggacaagcaggtatcagagtttgcagaaagcttcgggacacaaaattttctctcaagaagtggaataagaatgtctttgggttctgtgatcaacaactcagaagactatatgctcgattgggaattcttcaatccctggaaagtgaggaggcaactgcagaagaggcagaggttcaattggagattattgatctagaacataaacttgaaaggatttggaagcaaaaatctcgcgaactttgggcagcgattggtcattgcaactccaagttttttcacacctcaaccatgatccgaagacgaaggaataatatctgtgcccttttaaatgatgatagtcaatggctgctggacagggaaggaatgggaaactttttcatccagaaattcactgttcttttcacaagccaacaaccccgaattgaggaagaggagttcgagagtttgtttgtaagtcaggtaactgaagaggacaatactgaattatgccgtataccttctaaagatgaaatcaaggcggttgtttggaagcttaatcctttgaaggccccggggccggatgggttttcgggagtcttttatcggaagtattgggggacagttggagaggagatctgtggaatggtgcaggagttttttcagactggtaaaatggtggaaaaactaaatcatactttcttgtgcctcatcccaaagagtgaaaatccttcttccttcgatcaattttggccgatcagcctgtgtaattttgggtataagattatagctcgcattctcacggacagattaaagccgatgttggataaattggtaagtcctttccaatcggcttttcttcctgggaggtggattgctgaatgttctgtgcttgcttccgaagcactccatgcgcttaacaagatcaaaggccgcaggggattcatggcgataaagacggatatgcataaggcctatgatagacttgaatgggaattcttgatgagagtgctcaaggctaacggattcaatgacaaattttgcaaaatgatcttccagtgtgtgtcgacggtttctttcttaattcttctgaacggagcgcccctgaaaccgtttagcccggggagaggtttaaggcagggggatcccctttcgccttacctcttcattctgtgcagtgaagtgctttcgaaactgatgattcgatctgaagccagaagacaaatttcgagaatcaaaattggtaaagactctcaaccaatttctcatttgttttacgctgatgatgccatatttttttgtcgtgcaaacactgaggagtctgaacatttgaaaacctgctttgaaacatacgagaaatggtctggacaacagataaacagacggaaaagtgggattgtgttttctcccaaagtcaaggaggatgagaaagaactggtgcatggaattctaaacatttagcagcttgataggaaagaaaaatacttggggaacccttttttttactcggcaaagaaaagggaggactttaatttcttgaaagaaaaggtcctggcatgtttagaaggttggaaagcaaagtaattatcaatagcagggagacatactcttatcagttcggttttacaaagtatcccttgctacactatgtctaccatgaaagtaccggtttctatttgctctgagttggatagcatattggctagattctggtggaagggatcttctcagcagggggaacgttatcatgcatggaagagttgggcggactgctgtcaacccaaacgaaatgggggactaggctttcggaagttcaaagatgtaaacatggcactcttggcaaaactggcctggtacttactggaaggggagaatagcagtaagccttgggtgaatattttgacaacaaagtattgtaaggttcaagatttctggagtgtagaagccaaacaagatgactcgaaagtttggcgaggaattccgatgaatcgggacttgtgtgtaaagaatactgggtttttagtgggagatggcaagattgacatttggacaaagccgtgggtgccaaggtatagcccggaggaggttcgacaggcattttctttcaatgttacacacgctttcacctcagttgcagacctattcaaccctggcacgcagagttggaatgtgcaactaataaggtagtgcttttcctcggaagtagcagaagccattctgaaaattcgacccctggttggaagcagggacacaatgttttggcaaggaagtaccaacggaaggttctcggtgaaaagcgcgtactagtgtgctcaaaatcacagatttcaaactgaaaagaaagtttggaaggacctttggaagcttaaaattcatgctaggcagaaaatgcttctttggagaattttaagtggctgcctcccactaaagaataggctgggttatgtccgggagagtgataaggcttgtgatttttgtgggatacaaactgaggacgatgtgcatctcttcagggattgccactttgcccgttgcttatggtttgtcagtccgtcgggggtcctcaatggcaatctgagtacgctgaattttgaagaatggttcatgtggatgctggagtctaagaatgaagctctaattttatttggtgcttgtgttatagaacatatctggcaatgcaggaacaaccttattttcaagggatgcaattcgaatctggaccagtcaatcagaatgctaaatcaaagggtcaaggagttcaactcggtgttactacagcattcttactctgctgtgagcaacatttccaccacaaattctcaagtttgttgggatgtgcagctgcgtgttgacgcctcagtgcaggaaggtagagcagggttttgtactgttcaaatccagaatgtgcaggaagagggattcgtgatcctgcagcatattgcagttgacagtgtgctggaagcagaattcctagcaattgtggaggctctgaagtgggcagtcgaacagaaagcaaacactgtgcaggtggaatcggattctctaatagcagtcaaagctctagagacaaaagcattgccgtttgcctggggttcgtacccagcttttgttgaatgttgtaacttagtcaagttatttgatgtttgtgttgtttcgtttattcctcgggatgacaattctgtagcggattctcttgctcgctattccagagtgtctagtgtaaactcgagatgttggttaagggagatagccccctttgtggctattacactttgagtttttctttgttacgaataaaagcctttacttatcaaaaaaaaaaaaataattgtccgttcataatcaaatatcaataatgtttgcttgttttcagactaagtttagctaatttattatccattcttttatgaatcccaagtcattagaggtcctacatttgcataaaaaaaa

SEQ ID NO: 43217 - DNA, 4489 bp, Cannabis sativa
acacgtgactatattcttttaacatgccccctcaagatggagctcgagagaagagtccaatcttggatttgagtaaaagaaaacgagcacgaggaagtggcttggtgagagcatcggcaagttgatcttgcgatgagacatgagccacacgtaagatgccatgttgaacttgatcgcgaatgaaatgggagtcaatagcaacatgtttcattctggaatggaacacgggattagaacaaagctgagtggcaccaacgttgtcacagtaaataacaggagtggaaaatagttgtacaccaagatcactaagaagataagagatccaattgagttcggtggcagcattcgccactgatctatactcagcttctgtggatgatcgagcaacagtcttttgtttattagaactccatgagatgggattacgaccaagatagatgatataagcactagtggaagaaaaatcatctttatttcctgcccaatcagcatcagaaaaagcatgaagacttgtgggagattgatcatatagttggagaccgtcagtgatagttccacaaagataccgcaataaacgcttagcaaagttccaatgatcagtagttgggctatgcatatattgagataatttattgacagcatatgctagatcaggccttgtgagcagaaggtattgaaggctcccaacaatcgtccgaaattctgtaggatctgtcaatggagtgccagagtgtaatgtgagcgatggacttgtgggaagaggagtgagcaccggcttggcttctgtcatatgagttcgttgcaatatatccataatgtaacgcctttgcgatagcaaaataccatgtttatttggaataacttcaactcctaagaagtaggacaactgaccaagatctttgactgaaaaacgaagagccaaggtactaacaaaagagtcaattaattgaggactatcaccagtaatgattaaatcatcaacatagacaagtagatataaaacatgaccagaagtagtaagaacaaacaatgatgtgtcggcatgtgaatttttgaatccggattccaacagaaaagtacgaagttcatggtaccaagcacgaggagcttgcttaagaccataaattgctttgcgtagcttgcagacataggatggatgatcttgatcaacaaaaccaggtggttgttgcatgaacacatcttccgtgagatgaccctgaagaaatgcgttattaacatccagttggcgtaaactccaattttgtgagacagcaagactaagaacaacacgtattgttgtgggtttgacaactggactgaaagtttcaacataatcaattccagggcgttgatgaaaaccttttgccaccaagcgtgccttgtacctgtcaatagagccatcagaattacgtttaattcgaaaaacccatttacacccaactacattttgattagattcaggaggaacaagaacccatgtgccattgtgtactaatgcatcacattcagaagacatagcctgtcgccatttaggattagcaagtgctttagtcattgatgttggttcgagatcatcggttgtggtaagttgagtgtgcaagttcattttcttgatgggtttgtgaacattattttttgatcgggtggtcatggagtgaaagggaataggattggggtgagatggtggtggtggtgagggtgagttggtgataggcaggtttggtggtggtggtggtgagttggtgattggcgggttaggtggtggtgatggtgatggttcaactgtcggagaatgtgttggagttgcacatgaggtttgctgtgagatttcaacttgagatggcattgtgagtggcggttgaggagttggtgacataacctgaataggtgggggtatccatgtgtcaatggagagagggggagaacaagtggtttgactagacaactttgcaaatggaaattgagactctacaaattttacatgcctagaaacatagattcttgagtttgttggatctaagcaatagtaagcactttgagtaagtgagtagcctagaaaaacacaaggtttggatcttgattctagtttatgagatgtgtaggggcgaagccaaggatagcatagacaaccaaaagtttttaactttaagtaatttggtgttgtatgaaagatcttttgaaatggggagataagattcaaggtgggtgttggcattcgatttatgaggtatacagcagcggcaaatgcataaggccaataagagagtggcaaggaagcatgggtgagtaatgcaagtccagtttcaacaatgtgaagatgtcttctttcagagtatccattgtgttctggagtgtggggaggagtggtgaagtgtgaaatgccagaggtggacagaaaagtagctaaaccaaggtactcaccaccattgtctgaatatagaattttaatggctaattgaaaatatttttctgtaattgctttgaatcttataaaaacgtctttcacttcagatttttgtttgatgggataaaatcatatgtatttagtgaagtggtcaacaaaaatcacatagtatttaaagccattagttgacacgattggagaagcccagacatcagaaaatattatttcaagaggttgagtagagacaatggtggaggtggaaaaagacattttgtgacttttattacatagacaagcattgcatgagaaatcattggccaaagaagaggatatttccaaattattactagaaacaatatgttttagaatgggaaatgcagggtgtcctagtctatgatgccactgagatgagcttgtttttattgtagaaaaggcaaatagaggagagggggttggccactcataaacaccatctttagtttgtcctctcagcagtgttacccctgtgcgaagccccttcacaagaaaagaatcaggtaagaactctattgaaacattattagaatgacaaaattgagagatagagattagattctttttcatagagggcacacataagacattgtttaatgtaaaattattctgaggagttatgagagaagtagaaccgatgtgtgtgatggggagatttgtcccatctccgatcataatatcatcattcccgatgtaaggagtgtgcaacgagagattattcaagtcagaggtaacatgatgtgatgcaccactatccataagccaaggagtggatgaagggtaggcagaggcaagatgagcttgtggttgccatggagcatgtgatgtagaagtgtttggtgttggcggcatttggagtggaacaagacgaaatgaagggcatttctttgctgtgtgtccctgaatgttacaaatttggcagcgaccaagatacggtctcggtggaggtcgagggctttgctggaataatgaactattataggttggagttggctgacgatggttaggtggataggacgggcgccatgtgtttgattgagtaggattggggcgggaattttttgtgggtttcatggtaggattggctgtggcgggaaattgaggtggctctgggtcatgtgttgatgggagagaagcttcaaagtttaaaagtttttcatgaagttcatcaaaggtaattgaggtatctctggcatggacagcagtcactaactctttgtaatcattcccaagcttgtcaagaatcttatcagtgagatcttcttcatcaacaggagctcccaaaagggcaagttcatccgccttagtcttgacttgttgcataaattcactgatggtaagagagcctttagcaacatttttgagttgatttttgacttgtttgatgcgaccacgagtgggtttgccatatgtgttggctagtattgtccaagcttgtctagatgtgttggcttgagcaatgaaaggaatgattgttggtgagatggatcctataatggcattaaggattaattgatcttgacgaatccaaaaagaataatcaggatttggagtgggagtatctgattgtgtgatagttgctggtgggcaaggcttggaaccatcaatatatcctagaagatcatatccaatgaaaagactttgaaactgtagtttccaagagagataatttgtggaatttagtttgagtggagtttgggcagcaacattgatgctgatgagtaatttgttgggttcatttgtattgagaatggttggactggtattattggtggtggccataagagaaagaaaaaaaaaaaaaaaaaaaaaaagagatcgattaaggctgtgataccataatagatttatggagaaaaactatctctgcttcattaattagatatcatatatatacaacattgtaaataaaagggtggctgttatacactaccgtaaaagcgaacctaactcctaaactttaggatatctaactttgaatgactaaatcaaattttgaatatgagtatttgactaaatcaaaaacatacacgtgactatattcttttaaca

SEQ ID NO: 43218 - DNA, 2767 bp, Cannabis sativa
  modified_base (44)..(48): a, c, t, g, unknown or other
aatgaaatgaaaattgtttcctttccattccattccatttcatnnnnnccaaccaaacgccacctaaatgtctaaaagcaaatcacgtaacacatctgatcaccacataaagtaattacctggcggatcagctgtcgcattgccttccgaaacctatcaaccttggtggacttggtaaagttacgtaaccgcacagctggaataaaagacagctcaaagaaagaaacagaatagctccattgagctaggtgttcggaaagctcatcgataacagaaaagacacatgcctcctgaaacgctcgggtcttcacaatgggcttgctaacctggcacaaaagttatgcaatcatgtgaaataaaaaacacaattaagtggtgcaattgcatgaaggatgcccatgctcatttataccttgagtattgtacgtaagtcaacggctttgccaatgcctccagttgggggcctattcagttctttcatttctagcatgtccagtaaaagcatggatacaggtataaaagtatcagttgcagaagctatttgattgagcattctcacacatctcaatctaagagggaaatatctagcagttggaactagacgtgctaccccggcaatgatttgcgatagtgggtatgcgagaggcttcaagtcagattctttgccataggtgcaaatacatccagtccagagctcaaggcaactcatgaacttccactcataaaccttacggaatgcttcctgaatgaataaccaacaacatagcacaagtaaaacaaaagaatttaataataaaaattgtaaaagcatctagctaactttccaccaattgtctggtggaataaaaacataaaagcagcctgcagcatccgtttcatttattcatggcaagaaaactttctattgattaattaaccagtttaaaaaaaatgaattgagaaacataattaaattcaatgatggtagccgacaccttacctggcatatgatatgcataaatgattcaaaaaagaactaacaagtcaaaaggctgaatgttatctaaagatccagaaattgccattaccttggttcttgtattcaatgcctctcgcaataccattgctagttgccgaatgaaaatgaaggcatgttgatatgctgttgggagatctaccccaaaaagttcaataatacagttctgaagaaactggatatgttgcaatttggcagcatttacaaactggcaattcaaaacgtatgctttatatatccctttaaagcattcatctaagcaatcagagccaagtcgaatacatagatctcttaaaaatagaaaggagacaacaggaagggcacctccaccagtaccccaaaaatgaagtgcaatctgaaataaaacgtcaaagaaatgtttattccattactaaggaagtgacaataaaacaagtatacataagaatatacaagtccctcacaccaatcattagaaaagtcagcaacatatcatatatgcatgttgcttatcaatttcaaaacgcacaaaatgccaacgaactatgtcataccttaatgtacttccttaagagacttgggaaagcagccagaaatacagaagaatatttgagacgccgtagagtgaatgctatcatttgtgtgtctgtcatttggttcagaacatgtagggaatttccaagatatgacttcacaatatggttgtagttcgtccattgtttagtgctccttaattctagtatgatctcttttttcccaccagatgaaggaagctgcaacatttttcgaagtattccatccatttcacttagtacgaacaacattactttattaaaaacgctgctagacatgatactgaatttagttgatggatcatctccaccgtcatcaccataatggcatgctgtgtgaaaagctttcataagagtacgaatagcagagatctttccatccttttgaactgagttacaccattcatcaaccatggtagctgttataacacgtttggatggcttttcttctttctctgcaacttcaaggtcactagtttcatcatcatcatcatcttttagctcttcatcaacatcatctacttcggtttcttcctcctccaaatcactatcaatatcctcctgcaataaaatggcaacagatttaatcatttcttaaaacaacccatcagaggaagtttcaagttgagtgcaataaacacacatttttgcatttttgcttactgacctcaatatcttcatcttcaaactgtagaagttctttgtcgtgctctttcaagaattcataaaaatctgggtcctgcacaatgaagttaattagtaataacacaccaatcaccacaactcaaccaactgaagaagaagaagatttttctaaccttttgcctgagcctttccagctgctccttatgctctgttgcttgaccccgggacttcgatgttttcccatctttatcatctgataacataaattaagcaagaatacccaaccttaggttcacaatcaaattaaaataacatgaaaatcatattacaataacaaaacacattctgacaccaatccagaaaacgcagaaactgcttacatatataaaaagaaaaaaatcacaaatttactattcaaaaatcaaaacctgagaactctgtatccatatcgacagtggattttccctgcaaatggacagcctccttagacctaagatgacgagcaaaccgtaactggaatactgaacccgccaagcttaatctaggccaaatttgt

SEQ ID NO: 43219 - DNA, 2870 bp, Cannabis sativa
gttcatcttggttacaatagattgaaaatagcttggtaaaagaggcttggtaagaatgtcagcaatgttgtttttggtggtgacatgaatgaactttagtgtgtcttcttggatcttttctctgacaacgtggcagtcaatctcgatgtccttttcttggatctcatatatttatttttgccattggtgtcgacgaacagagaagagtcttgggtgcaggtcaacaactgagaataaggagagaaagaaaaagaggatgatagataaaacaagaaattttattattattagagtttttcaaaatccacctgttattttggcctaattttgtagatcgtatggataagaaaaagtgtttgattttcttttatatcattcataacttaggataaggatttgattctagatgtggtagattttttatagtttagaattagggtttagatgctagttaagaaggaagaatggcaaaaaagaaaaaggttaatttatctatagttttataattgttttcttaatttttattaaattttaaactattctttatttaattttaattttttttaaaatatttaaatataattatttcaaattataagattatatgtgtaataattttaaattataagatcatgaaatgggtaataattttaaattataaaaaattttactacaaatattttaataaatttagtgaaaaaaattgctaaaagaactttatttagtaagattgtaaaaataattagtaactataataaattttattttataattaaattaatcttaattagaattttataaaaaaacaaaaggttattatatatttttatttaatttttaaattaattaaaaccattcaataatgatcaactaaaatttacgtaaccaccatatcattaaaattatttatatacatattataaactatcaaaaaaaaaaaattaattataccaatacttaattttgtaaaagaaataaagtgagtattaactaattttatgatttatccgtactttagataccattaaaatagatttctatgttaaataatatcaaactcagaattcaaccagaaataaatttgttttcagaattcaacttaagaaatttgtttatattttgtttttagtatagtacaatatattatcataataactaaaaagagagaaagttgctattcacagatataatttttttcaacaaaatttttctttcaaaaacacttgaattcctactgtcatacactgatttcacaaagaaaaaaaaaataaattaattaaaagatgaaaggaaaaaaaaaaaatcaaaggagcttagacagcacttatgaaaagctctaaacaatacaatacatacatacatacatacatgtatataaataaatacttatagatgtctattttcgtctatggatgactctgaagaagaatcatctagtgttgaatttgaaatggtctccaattggctggaggcctcactatctgaaatcccagatggcctttcttcaacaggttgtttcaaaaaccagtacataatgcttgcagttaatgtaaggatcattttttggttcacctaacaaacaacaaatgcataagatatataacacttgaaatgattaatgaaagtgtcttgttgttcttttatgtgatgtttttttgtttataggaaatttgaaaagaaagtacctcagttatgtcttcgggcagcaaaaatattgaacatccgagctttcgggcaatgctgattatgtatgaggcattcatctttttctcttcatctgaattgtgccaagtttaagagatgagtgtaaattaatcaaagaaatcactttcaagacatacatcaatggtttgttagcacaagagaaataagacataccggttacccctttggtaacaagactccaattcacaactctaggctgcactgcacttagtagttctaggaaaaaaattccatctgacaaacttttatcctgtaaaatccaaaacagaattatgatttttgcggttatataagaagaaatggtggctggaggcaatggaaagctcgcctttttgatacttgaaactgatgaaattgtagtaccttaaagctatccatgcggctttggcttcccgagttgctgactttggtgtttgcccattctagaatatcgacgtctgtaatttcctttccatgagaatggaacctcaagtttcttagcaattggaggatgttgcaacgcaacaattgccacaagtaagctgaagaaaccaaccgaaaactatatcagaacacataccacaactgcattcttcattagtgttaacttcttaagagtattgtcattatagaaaggtgaaaatagctagagaaagtttatggatggtagcattggattggacataccgagtattagctttttgttaccctgcacaatatcatttcctgcaatatttactagggaaaatttcaactgtttccctatttttacaacttggttacagttttcaacttttctgaatggcattttgattggaggcttgtttgcaatcttccaattgacaatccctggggaaatcttgtctagtgtctccaatagcacccatctacatggaaccaactttccacttcagttccaaaagaaaactaaggaataaacagttctattttacatataactaataacattaaaagagctaaagacaaagacgtgtgtgttctgttccacattgctcatgagtgagtgatttataggatttatagtacacttagcagctaccaaacctttaacccctgatagcgttttggtaattggataaatattgtgttttgtgtaattaagtttatgggaaaaaaaaataaagagttataataaagacagatac

SEQ ID NO: 43220 - DNA, 2044 bp, Cannabis sativa
  modified_base (54)..(71): a, c, t, g, unknown or other
aattttaaaagagaaaaaaaaaaatttgggcccctgggctgggtgggccctagnnnnnnnnnnnnnnnnnntatgcccagggccgggcctgactgtatgattggaatgtatgaaatatgtcaatgcgagttgtattttgctgaagagtctttcataagagttgtgtttgaggtataattgatttattaactattttttctccttatcattctaaacctgtaattaagagaacctaatattcattgcttcttttggtttactcttctcttttttcataaaaattcttgccacgaatttaatgagttcgggtacaataattgtttaaacaatactattattaaggaggtattaagatgatttagaagtgatttacttactagccattggacaccttatgcaattactttaagaccattctctgaagcaggcatcaatggtggtaaggtatcctgtatcctctttacttttagagttctctgattttttcttttgtatgaagattctctaatttcataaatgttttaattatgtgccatcatagtaacatatatactttagggaaactacaataggtctagctaatttaatttggtattttgatcacttagtaaatatcaatggcattctctgttgcctagttattaaacatggagcccatatcatggagcagtaactctgctcctttctcggccactattttctctcaaactccttaccgcaacatacttcttccattctctgttgcccataattcccgtcgccaaacaacaattcctatgtcgtttgcgccaatgagggtgatgccaaaattagagtccccaatgactacgatttggatgacgaggagcttgaaggtgttagacaacaaggactcaaagtatcagctagcatcgtcaatggcgcccacgaggacccttttttctttcatagtatcttatagattttactttggaaaaatgattgagatacacttaaattacacacactttatacacacaataatgtgtaattaatctcaactatacaattaaaaagtgatatggtctcccttaaaaatataaatagctaatatttattacatgtctaataaatatgtataaatagtgtgtatctagtattactttgtatgattatgtgataggattttgttaacaaaataaaattaaataggaaaaagaagttttttctcaataagagagctgaggttttcaattaataaacacgtgtcgtattgtgatttttgaaacacagagaagacgggaatttaggggacacaagaattttattcctgaagttttttttttttttttaccaaagaaatattacccttagaaatctctctggaaatggtcgtaaggaccctgtaactgttttgtctattggactctacctagatgatggggattggcatgctaattctgttaggattgatggcaggaatggataactctaatggtgttgacgatttagtgaacttgacgaacagacttgtggtggagcaagaagatgattgggaggtcaatgaagaggccgcggctgattttggtaaaagatcattaatgggtaggattgtggctaaacgagggatcactggaaatctattccagaccatgttttctcgaatatggaggaatgtgttaaactggaaggtgaaggtgcttgaagggtctacatatgctaatttgatagcgctttcgtttcactcacagcaagatgctaaatgggtgctggataaacaaccttggttattcaatggagggttccttattctggaggaatggccagggacggggaattggcaagatgcaaagctcgaccaggtcttttcttgggttaagatacgaggatttccattgaacatattcaccctcaataatgtgaaaaggattagtgcgatggcgggagaagtttcggatataaaatggaatagtactcaacagatttttttgaataattttgttcgggttcgcattggatttcctctgtatcgaagtattttcgtggggagatttgttccgtcaaatggtaataaagtttgggtcca

SEQ ID NO: 43221 - DNA, 6660 bp, Cannabis sativa
  modified_base (4011)..(4012): a, c, t, g, unknown or other
atgtatatttttttgctgcaacaaagacttttggagctgaaccaaaatttaataaatattaaaaggaacaaatacacaaaatggtcaaagataaagcatttagtcaagacttgtataagttagtagatttggcttcatatctcaaaagaattctttgctttcacattcatcaataatgatttctctaagctcccttcactcagttcaattaaggtttatgtgttgtttcattatttctacagctatttgtttaggtgctgagacttccaagattttgtgcacagagaaggaaagacaatctcttctcaagtttaaacaaggcctacttgatgagtctaatgttctttcctcttgggaaagccaaaaagattgttgtaaatggaaaggaatcaaatgcaacaatcaaactggtcatgtgataatggttgatctgagtcataacatttctgatgtcttctctgttgagcaacccctagcaggtgagatcagttcttcactacttgaactgacagaactgaattatttggacctcagtttcaacacctttgatggactcaaaattccaagctttatgggatcttttcaacaattgaaacaccttaaacttgcaagtgttggttttgttggtcccattcctcaccagcttaggaatctcacaggtttgcatactcttgacctttcaatgaattaccttctaacagtcaatgatcttgattggttgactcatttttcttctttgagatatcttaacctcactcgtttaaacctttctgaaattgtcaattggccactatctatggccaagcttccttctcttatagagcttcaattatcttcaactactcttcctgatcctattctcagttcacttccactaaataatttttcaaactcactcgaaattctcaatctttctgataaccatttcagtccttcaatattttactggatttccaatatcagcagtaaacttattcatcttggactgatggcatgccagatacaaggtccaatcccagatgttttcacaaatatggcttctctagtgtctttggacctctcacataatcaactcaaaggcgggttaccaaaatcttttaaaaacatgtgtagtttggaatcattgaatcttgagtcaaataaattttctgatagactttatgattccattaaaaacttgtcatgtgctgaggagaccatgaagtacctgcaccttagtggcaatcccttttggggtccatttcctgatctcacaaatttttcatctttgatagaattgttcatagatggtaccaatatgagtggccctcttcccaaaaaccttagccagttttcaaagctaaatattttgagcttagcttataatcagttgaatgggtcattgccagattttacaggactttcttctttaagattgctatttcttgcaaataatcagttgagtggatatgtacctgagagtattgggaagctttatagccttgaagtgttgtttctttcttcaaattccttgaatggagtactaactgaagctcatttcttgaacctctctcatttgaacaatttggatatttctcataatcctatgtctttgaactttagttcagattggattccacctttccaacttgaatttttaaacatggagtcttgcaatgtgggccctgaatttccaaaatggcttcaaacacagaagaaacttcgttcactttatatgccaaatgccacaatttcagattccatacctatttggttttggaatctttcaactaccttaactgagttgaacttctcttacaaccaaattcatgggcaattaccaaatctatccccaaagcaaaagaactatctttcattggatttgagctacaacaatttgagtggtccaattccattactttctagtgcaaccaacttgattctctccaacaacatcttctcaggacctctttcttccttatgtgaagccccagctctacaactgtttcgtctcgacctttcaaataatcgactatcaggggagcttcccagttgttggatacattatgaaacactgctgttcttgaatctagcaaagaataatttctcaggaaacataccaatctctttaagtcatctaaaaaacttagtgttgctacgtttacacgataacaacttatcaggagaagtgccatctttggaagactgtaaagagttgagagttgttgaccttggaaggaataagttaactggtatgttaccaacatttcaaggacaaagcttaccaaatctactggttctaagattaaggcacaatgagattcatggaagcttgcccttgagtctatgtagtctaccagctcttcatgttttggacctctctgagaataacatatctgggtccttgccagagtgccttaacaatataacagccatgtcttatgatgtgaatgataacatcatcattggccttgtacaagtggtctggaaaggcatagagattgagtttggacagaatctcaaacaccttagaagcattgatatctcaagcaacaacctgggtggtaaaattcctgaaacatttactagtctcttgaaaatgatttctttgaacctatcaagaaatcacttgacaggaaccattccagaaaagtttgacaaattgagctctaatttagagtctgtagacttgtcaagaaactggctaactggttctattccaacaagcttttcaaatttgaattttcttagctacttggacttgtcctacaacaacctgagtggtagaattccaaaaggcacccaacttcagagctttgatgcttcttcatatgtgggaaatctccaactttgtggccaacctctcacagaacattgcccaggagatgaaatgaaccaagatcctggtgcccattatgggaatggagatgacaaagataaaggtgaggataatgagattttaagctttgggttttttgttagtatagggataggttatttcataggattttggggagtgtgtggcacttttctactcaagagttcttggagaaatgcttattttcgtttctttgatgatacaaaagatttggtatacaaaagaatcatagtagtgttcaagacaagattacatagagcttagacactaataaatggtgaagttgtgtattatacaaacattgcttttactatactagtttttagagtttttgtgatccgtttccaaaatcatattggcgcatatatttttgttggcatatatttatttccaaataattataactagaaattccatttattatttttcaaaaaaatataaaagatatttctttcctctcccatacccatataaacattagagatgtaaaaattgtactatatttagtaggggcacacattaggtgggtttttcgaattttcaagttttcgggtttggattttggaatcttgagactgaatctgcccatatagaaaccaagttttttgagtttcggatccggtttggtcgagttctgggtgggttggggtcaagtttcgggttaggctggactttctttctttttatttatttatttatttttatcgaaaaatatcactttctttttaacagtattgcagaaaagtacataaaatttcagcgacttttttcattctaatatttctatgttttgttatcttacaatgtaatctttgtagtttttaattttctcattataaaaaaaattactccaattcctaatccttaactacttttaaacttaataattatataagaaaagttcataatccaaaatctaaactccaaaattcaaaatccataaaacaaagtccatacatattacataattcaaagtccaaacaaaacaaaatccataccatagtctaggggtgcacatcgggtgaattttctgagtttttaaattttagaatcttgggaccgaactcgcctgtatggagaccaaatttaagtttcaggtctgcgtgggtcgggtccgggttgggctgggctttcttttttctttctttcttttnntttttttttgaaaaatataatttttttttaaaatatttttgcataaaagtacataaaatttcaacaactatttttactctaaaatttctatttttttttatcatcttacattatattctttgtatttttaatttccatacacatgttatatatataaaattactcctattcctaatccttaaatacttataaagttattaaattttttaagaaaagttcatagtacaaactccaaatctaaaaaatatgttagggtaatatatataaatatatatatatatatataaaatggtaatcgagttttgggtttcgagttttcaaaattcttaaacccgaacctagcccagtgccgatctgggtaacaccggaacccgaccccctattcttgaaactcgtttttttgggttttgagtcgggtaggttggtttttaggtgtaaatgtgacacccaaatgtttgacacaaaaaataattttctgatagatttatattaaaatttaacattgtgttccaatatataattacaaaacttgatgtaaaaattaatatctaattaatatttttatcaatttcattattattttaatatgtaagacaataaaaaagaatataaatactttataatttaatgtatattttaaatatactaataaaataatacaaatgacataaatataaataaaaaatattgaattttttatgatataaattttacattatagtaaatattgtgccaaattagacacaagatttgttaaagcatctccaataaaatgctataaaaattgatgtatatgtattttttagcatatgtatttcgtgagactttaagctagatcaaagagcgttaatgacaacatgtgattatagaaaccaattgtttgactgttgtgcagactttatgaagtttcgttcaaataatttcgacgtttggacaagtgaataacaattgtaaaagtttactttgtgttttgcaaaatatttttatcgtctttgttaaacgattagctaatatggtagctcataacttgctagagcttctataatatatcttggtagttgtttcagtttggaggatgttccaactgacttgctaccttgtttggtagtagaatttagtggttaatttcaatgcaagaatttccattaaaaaaaaaatctccaatggtggtgtataatgtagtctaaatttggtacatgctaaaaattatgtcaaatttggcacaaaatatagcatgaaccaaattttacaccataataaaatgttatttttttatttactcttttgtcactcaatagtatttttaatgacttttacattttatttatatattttgttagatttttatacactttcaattaaatttaatgcatttgttagctttttttttttgcacatatttatcaacaataaaattaatttacctctaatgcatgggagtaaaattgtaatatttggcctaaatagaatattaactattttttttagccaaatttagcccaaaacttacacaatgcacatttttttgttataaataagctatattataactttgagtattgttattgaatattaatggtgcctaaaatcttttagagacaagcattttgtaattagttagtaatattccataaaagttattatattaaattatacgagactaaatacttaattgtacaaataataatataacaatgagcagagtataactaagcacaaagagtactttttagcatttttctttatctttccaccacaaattaccttactttatatttgaaagttctattttagtgcgaaagaaaatgtaaagaaatagaaggaaaaataaaaaaaattgtaaatcatatatgggaagaacaatacactcaattcaacataaattttcgtgaaaaattatttttttaaaatcattttctttatttttttcattatttccaaaatccaacttccacatagtataaaagtaagttacattagtaatttttttttttaaaagaagcccttttcaagtcgagtattgttatcgaactagtggtatctaatatttttttataagtaacactttataattaattagcgatattttttaaaaattatttttttaagttatatacaactcaatatttttttgtagtaaatatgtgactcaatacttaattataccaataataatatgatacaaagttctagagtagtatcttttaataagaacattattattgaatactagtagtagctagtacttctagatatattatttttataatattctctaaaaattattatattaaactatacaagtttcaatatttaattgaatcaatagtgatattatattaacggataagatattacctgccttttagcattactctttctcttttagtaattctctttcaagtgtactgctgcagctgctgttggagcttgacgtggacaaataaaatagtcagtccgaaaagaatagacaaaaactcaaaggtgatcctcacgcgccatatacagtgtatcagttaaaacttagtgagagagagagagggtttagtgcatttcttgtaacaaaggccgccattgtcgataatcgagcatggactccattattgcccattactccttaaccccctcaccctactcacctccctcac

SEQ ID NO: 43222 - DNA, 3378 bp, Cannabis sativa
aggggtatactagagaaatttcctactccatgtactatacaccataatattgaagatctcgtgagaagtaattgtgcattgtactattgctgctgtttcattctatgtctttcttgacctttttcagtttggtttggatgttggtgttttttaatgttcacgtgaaaaatgtaaataatagcactaatgaatatgttatttacattcaatatgttgaagcttattgcatcatcaccaaatgctaagcctctgctcattcattatgatccaatggagccaaattgtgcttggcaatggctagaacgatggtctttttccaacttttgggaaccacttccacagctacatcatgctcttgagataaggtctaagataaagcaaggtaaaattcaaaccaaggaaaccgaattaggcagagcaaaacaagcagaggggaaggtctcacctgttaaaaataggaaacttccattgcatcctagccttgcatatgaaaaacagatcaacaagccaagaaaattggaatctagtaaagaagaatcaaagcctctaaatgatttggagagggttaagcaaaatttgcgacgaatttcgggttcaacagcagaatctgtagctgagaagctcaagcctaatccaacaacattgccaaccattcctagttctgagatttctgagaagagtgttgtgaatttgattgagaaaacaagtgagtcatctgaggtggaagttcctccaaaacaagtagttgagaagaatgagaaacttgatgagctgcatgatgatggtgttgagccaattcctattagagatgttgaaatggttgaagatgcatcaatagagaatgaacataaaaataactttgagattgagaaaactagcaaggactcccaaaaaaactacaagaaaaaggttcctactaaggtggaataccaagagaatgtcccacaaagaagccccactttgccaaactacatgactgcaactgaatcagccaaggcaaaacttagaggacttggatacccccggctcgatgaagatgaggtcgaaaatcaaggctttgtgaggcggcattccttgcctttgtatactagtggtaactcgagcttgatcatgtcttcgcgaacagagaaaaaagttcaatcaagttccagaggagaaaacagatctgtattgtcctctacagatggccatggtaacaccccttatattttctccaattaatatactcaaattggtcttattgcttaacttgctaacttgtcacatggttcacacttcttcttgaccaatttttatctgttttcccaatttcagggaagggtgtacggcctggttggaggaggtgagtgagctgaaatccggtatgagacactagaaaataaatgtgtggaagaagaacaagtgtatgatgaactttgggggcgtgagttttaagtatatgtgcttgatttttctctagtttttagtccacttgatttgattgtgtgcttgagtgtaataattgttaattgttttagttttcttgaaatactaatcagtttgtctttaataaccaacatgaacaattataaaacaaaaataaattctttcaaaaaaaaaaaaaaaaaataaaacaaaaataaatgaaggaaaactcaaaatcaataaatagagataatgtaagaaagttcaactatttcttaaccgaaatatactttactaaacacagaaagtatagagtgactttcctgctgtatagttcctagcaaatccaacaaataccttgtaaccatttccaaggtggatgcatccgtttctgaccgaaacgccgccgtatatggtggctcctgtatcgtgtgaccacaaaatttttccagtcttggcattcattgcgtataagggtccttgtgaagaagtagaccctccaaaaacaacaccattagctactgtgaccggaccagaggctgtagcatttgaaggatcagctgtggaccatagtacattgccgctgtgtgcctccattgccacccatcctccggtgatgctgatgttttcggatggtttgatagtgaagttcttcttttgactgttggcaatgttagtgtagacactcctttcatcagtggccgaaccccacatacctcctccacccagtcctcccggtcctgcttcctgtaaataacatattaatgtgacattttctatgagagattgtgatcacatcatcaatattgtggacatgtaacataatgatcattcattctatgatggaaaggaccaaaataaactcaaaaccataatcaaaataacaatgtcaataaagtaaaatataaataacaaaacaatgattgctaaaacaattcactaactattatttttaatattcccacttagttattgagattattaccacttagttattgagattattaaatttaagaatttagtaaggagtaaaattaaataagtctgtcattgtataaaaatcttacccacataaattaacccgttaaataactcagtaataattttataaaccattttagcttctaaaaactatattttcatctcaaaatcaatttgcaaaaagtgagtagccatacacttataagtgatattaagtttacacacatttctaatcatcaatgggaataactataaatctatcataaactttttcaaccatccaagaatatctcctactatatatatttacttctgcttcaatcattcacgtactcaaatactacagaattaaaactctaatcttggtcagttaagtttcatttcatagtatatatatatatatagaaggtgatacaaacaaacttacccttgaccacactatgctgccattatcgcaatcaagaccccaaccaaacttttctgaacagcaaccacaatgtctgtcataattaaaagattaagtatagaacaaattattggttaaaaccagagagaggcttacatcactgttattagctgaaatggttataagagaaagctagaaacagagaataaggagttagagatggctgtgtaatctacatgaagacatggataatagattatttggtgaaaccataaactctgaaattcatataatataatagattaaacttatattataatttattgttatattaattaattattattattttttggattactttcaagaatttgaaaaatattaaattcatgttaacgacaatatacatttattattttttgattaattttaatcacaacacaatattaattcaattaccaaattcttattataaattaatccaatcacacaaaaatatctctgaattattgaaataaaggtatcgtttcaacttgaactttatctttcttccaataacagagacttgaacaagaacttgacctttg

SEQ ID NO: 43223 - DNA, 4502 bp, Cannabis sativa
atgagaataaaggattcaagtaaatactcaaaccgacccttgtaaaaattggacataaatatccagaacataacaataagatcatgatctgttatgcttcaaagtaggtgcttcttcaacaaccatcgagctccatttttcttctctaataattagaagtgaatctgacttgactttgattcctcatgattctacaaactacttatctctctctaccttcaaatttaagattgcccaactacaatttgtgtattcccctactatgaaaaggatgtctaattagtgaataaaaaaaacaggtatttttttttttcaaaatataataataataaaaccagttcattttcttttcaatggaaaagaactcagcatctgaagtttataaatattgtttaaagggaaaagaggacacagccaaaaggttgatccttttcttttgaactgtggtagagaataatattagccagaaatgcatgatgggaatcatatcttgttgaggaaaaaaacactgtttatttcaaagataaatgatttagtagtgaataaacagtaattgctgatgtgttcaaagcaactatatactctgtactacaataataatacatataatatgataatgaatacaaattgaattggcgcatgtaacttcaaaaggaaacttccctcattaagatgcacttttccatatttccctctaaagtgtggtccttgattcttttataaagaacacactttgagcagtggaaattggttctagttatcaccttctgaatagttacaaaaagaactaaaaagcttgttatcagaaaacttgaaactattattgtttctctctttctgctaactccactttttttggttgttgaaaactgtccttttgcagttaacatagcaagatgaaaacgacagttccaatggaataataaacataaatggattctaataagaaacgtaggatctagttatatgatacatgaatgaaagaaatcatgtaaaacaaataaaggctgaagagaaacaatttgttttggctatcacgaacaagaagaaaaacatcatctcatttaagatattcttgaagaaaagcaaaaaagagttgcctctatacattcattaagaaacaatgacagcataactctgagtaagatttaattagattaatgaaataaataaatagagaaagaaattcatgcttgtggtcttcttcaacttaccatgccacgaatccaacatcttcatttgtgtcttcctctgtagctggtaaattaagatcgaacagaactgtaacctcggtcacaggctcaggctcgggctctggctccgggtcaagaggttcttgcctgatcaccatagcattggtctcgcggcctccaacaaaatgggacctcttgtggccacccaaagcttggccggacttaaaaattctgaagcatatggggcactcatgtcctttgctcttctttgaaattggttttctttcagggaaatattctttaatttgagtttttctggtaccattctcaatgagcttcttcttagtattagctatttgaattgggctgatggccatcgctatgctgttttctccactctcacaaattgattcagagcagccgttgatcttactatgattggctctgtgtcccccaagagctcgatgagaatggaaggtcttcttacaagtcaaacactcgtatttgttcttttgaccattacttgtacagatttgaccattggaggaggaccagttagcttcattcttgcaagctttcattaatgattcaggtgtgtagagaccatttctggttctctttctcaactcatatttcaaagaacctctttccacttgatctttagcgtcttcatcgagcaagttctttccaaacccagatcgtgattccagcttcttaaaatcaccatttctcagaaacccatcaactgaaacatccgattcgattttcttaggtccatttctgaaatacccagaatcagaattttcagaagcactgacatacttggaagatttcaactccccatcacttgctctcttcgttcccacaaactcatccaaattggagattgaagaactcagaaccttcttaccactgatcatcatcatatcaattgaagaggatttagcctctaaaaccactgaattgttatctgaagattctccaaccgagttcaaacctcctttatggccagaatctctagacagcaacatcaagcttatagccacctcttgctgttcttgctcgattcctgaaacagaagaacaagcattccctagataagaataaacatcaagagtcttgtacctaattctctttgacaccctgttctgcatcgggccagaggtctcggtatccgagtgactatccattatcagtttgggcttctcgttagtgcccaaatactgttcaaacttttggttaatcaccaacttctctttatcagagtgagaagccatatgaccacatagagctttcatcgattgaaaccctttaccacattctttgcatacatttaattccttcaagaaaacaccaccaccaccaccacttgagtcagcaaaacgccgacttttcttggggttctccctgagaacataaccaggctgcttcccagcttcagactctgaatctttctggttcattctcacactaatgaaaaagaaaaacaaagatgaaatctttagtgtataatattaacttcaactctttgcttcttttttgttctagacggtgaattgtcaccacataaaacattgaaatagtttcactttcatcgtggactactctctgcttagaattttctttttttcttttgttgttgctttgatgattgatgtaatgttagcactcacaaccagagatacccagtacagaaaaataaacaaaaacaaaaacgattccttacctgaagtctggtagagtgctacattccatgatctttttaccagctgtaaatacctaaatggtgtgaataagcagaggaaactcaaagacagccagatcgataaactggtgaatggatcatgaagttccttgctttctggcaaaatgagatgatcaaatgaggatccaagtgttcagatgtgacagtttttgttaagtacgagatccgacccacacaaaagggaccctcaaaattccattcccaagtactcttagcccccacaaaatggatgtacttgaagataaagaaataaaagaaaaatatatgggttcatacaaaaatgaaaaatcaaagttttgaagaatgagtcgctaatgatggcgatgaacgagcctgtgaagaacaatcgaagctgaaaccgtgactcattcttctcttttatctttgccccccttccttgtttttttctctctctctactctatttctctctcttgtttgtgttgtagttggaggagaattccatgcagggaagcaaaaggttaaaaaaaagagaagaaaagataggcagcacgtgtattcaagggagcaaccttcgctgttcaattggacggtcaggattaaagggtatgttttgagatcccaaggtgcaaggaaatagtactagatatgagacagtacttccttcaaagaaaataaataaaatatgagccagtactcgaagtgaaacattcatattctagattagagctttgtcttttgcttgcataaactcaataaaggtcaaaatgccaaaaccgttatcaacccatttatcatatgtatacattttgtatttaaaattagtccaaaataataatttaattataaatttatattacacattatataccctactacggtattacctaacaagtttgaatgtagaaactgattttaatttacatattagtggcgctttttgacatattagttttcaataattttggtattcattatattaagctatgtagtcccgtatagtataggtaccactaacataagaaatttttgtggtgagaatttaattttggctgtcaatgtgctaagtgattcacatacaaattcgcttagaaaaataacagtgatgatgcttgctttgatttagtcaagcctcaccacaattgtagtgatctgcttgttaaatacgcattcgctgacttgtccactctaatatataccaatctagtttcttacttcgaattggtgggttactaactataatttcctctttggcttctagcacaaagcatcttcttttgtgggttacataaatttcttctatttcagcctaatatataccaatctcgtttcctactttgaattggtcgaggcaaactgtaacatgaaaaccttgaaaaaaaaaaaaaactgtaacatgaaaggtgacacttaggaagtttagccgcttgcttcttattattgtctagtatacgggcaaagcctcataagggttttttctcacatgattttttttaagcatctttaatatgcattctaggattcgatcctataaacccactcatgcattcccaatatcatctatagccactagcctcgactagt

SEQ ID NO: 43224 - DNA, 4485 bp, Cannabis sativa
aaattctcaccactaagcttgattttatcacccaccgatttatttatccccgagttccagttatccttgacgatttgaagatacggtggctcacgaagccaagtattttcaaataaaaaatgatgaactggttgaacaaagctacgtaccacaagttcaagtaacaaagggcaatgattcgaaattgaagcttaaacaattgagttgaattaaacatttcagactaatcaatattcaccaaggaacgatcaagacgaacttctatctaattttcagtaccttgacctccttcccaagtaaagggatagccaaataactccatatcatgaaggtgacaatccaccacagctcgttgaaaaccttccaaaatccattgaggatatggattacttccttttttattcaagtgagagagagtgtcattaagattaccaattacacaccatggaagaacattcttagaggaaagggaacgtaatatatctgaggtcttaaaatgttaacatcggttgggttctcctatacaacacgttaactggaaaaaatttacacgatccactccaatttttatatcaacattaatgcacacaaaataccccaacaaatgaacattttctttatgttgtcataacaaagcaacaccaccactatgacccttagcatccacaaaaaagcaccataaaaactaatagtaacctgtaactgttccacaacatcttgtcgacacagagtttcacaaacaaaaataaagttgggcttcttatggaccacaaggtttgttaggaatctaaaaacccttgggtttccaagtccacgataattctaacttaaaatactcatgataagcgatggacttggagaccagcacccactaaaagctcattttttgagcccacattagagttattattatccaccctatccacatcagtgcaacccaccatctcttgttaaatattagttgacccagttggcccatcaaatgaaagcctttacgtttaagctccaagattgtaagatcttcttcattaatttaatttccatcctcaacaattaaatctagctcattcccttccacataactagctggcgcgtcattcaaagacattgacactttttaggaaaaacatatctaccaatagtagaactatctacctgatttgtgggattgagatcaaacacctttgatcttgcgtgaatctctccaccactaattacgactagagaattcaaaattgatgggttttccatttttcaaacgttctcgctggaaaagccatgaacaccacattcaactttaatacacctatcaaacttggtatcttgtagtttagtatgtaatcatttctccgtaataagcttcatttggcttcttaatggctttcataaaaggaccgtaaaccttgacaattttctctactggagtatcaaacaatgtcacacaaaaatgtttcgaatgacctaaaagaccatagataaagtagaatgtgagaaaattttcatacttgaacgtaatctaaataaactcggtatttcatttccacagtttcatcttcttttttttatcaagaaggaacatcttcattaatcacaaacaattacaaacaaagccaagctgaaaacaaactcagctgctaaagaaacacacttatttacaaaataaatgctctatatacttcctctcatacctattcaagctccctctttttgctattgttaatctataaaatatgacttttgttatatcttgtacaattcttgtagctgtgctcgagtaatcattgaaaatacaatcattcctattaatccacaatctataaatcataacaaccatgatagaggtaaatattctgcataatctatttttactaatgtgcaccagccaatttttccaagcttgaaactctttcggccaaggccttgctcccagccaaatactcacctgatcaatcaccctttcagaaaggctacagtcaaagaaaaggtgttgatttgattcagcagcttcagcacaaaccggacactcattgctgtccaaaaagacccgaaaactgaggaaatttatctcttgttaacagctgagcattgacagcttgccacaagatgaaccgatgctttggaacattaatcgagctcgaaatactcttgctgtaaatgaaaggaacctgagatagtttactgttatataacagatgcggtttaaacttacctgaggcccttgcactttgtacctccaagctatcaaatttatctctcacatgacaaagcttcagccaataccaaatcgagtcaagctttagaacataggtccatattgaattattcttcagatatatgttgttgatccatttcacccaaagagaatcactttttttttaaatagcccaaagatattttgcaaggacgacttgattccatttgactccatctttgaaccacaacccaccatagttctttggaagacaaactttttcccaactagccacatgaagcttactcctatttccattccaacccaaaaggaagcctcgacaaagtttttcaatcttcttcgttatactttgagggagaatgaatatgctcatccagtggttatggagtccaagtaacactgaatggataagttgcaatcttcttgtaaaggaaagatgtctgctagcccaattatggagtcttggcttaattttctttaagatcacatcacagtcttccactctccatttggttggtctcaaggggactcccaaatatttcaggcggaacttgccttcagtgaggtttatttctctcaggatggcatgtttagccttgttatcaacccctcccaaataaatttgagatttgttggtgttgatagccagacccgatgtagcatagaactcattcatgacatccttgagaatttgaatggactgaatattgaccttactaaataaaattagatcatcagcaaaacagagattgactattttgagacttttgcataaggggtgatacctgaagctggactgattggctgccatggatagtctccttgttgaatactccataatcaagacaaagaggaggggagagaggggatacccttcccttagacccttttttccatggaagttgtcttgcactctaccattcatcagaatagagtatgaagttccgctcaaacatgttataccccaatttataaatctggccagcatcctaaaggcattgagcaaagcctctaaaatatctcaattcaccgtatcataagctttactaatgtcaactttgataatgcacctttgggacatattcttcctgttgtagttcttcaaaagatctagaagaatcataatgttgtgagcaattgatcacccttggataaacgctccttgattttcgttcactatggacacgcaaatttgcatataatcacaccacaaaccataaagttcttaggatcagtttaacaaattttaccaatgtagttccccacatttttcagtattcgttcagtcatgtaacccatctgtagattgtgaacttggacccacaagttaagagagtttaaagggattgttctcgagttgtcgcccgctttgagttttgtaataatcagcgctttacgattgaagatccttgggttaccttctgatacccggtgaaatatcgattttatgatagaaatatcgaacaccactatcaagttccttaatataaactcccatacctggtttccataggtctgccaaagtctgttgcatagacggaaactcaacagctccacttatagacaaaacaataaatatgaattatttttattttgacgaactagagaaaattactttatagtactgatcaattcagttcaaatctagaaagaattaactctctattttttaggttgtgtaattattatggtagtaattatactgtattttaaaatataaatgtgtatttggatatgagctgataattacttataaattcctaatcacttatttagaaaaatagttagtaattacacagaaaaataataaattttagtacatcatatttaaaataaaaaaaaataataatttggtttggtagaatgtaatgataatagtaaaagactatagtaatgtaatggaataagaatgataatgggaattgattaagatgtttggtttgttattggaatgaatattagaataaaagataaattgataaaattaacccatactttaatttttatatttatataaaaaaggatattagagtcattttggttttactttattaagtcttttgtgatgtaatccacattacataagtttttctaatgtaatgaggatttcattgtataatgattacaatgtaattccattacattatttttaaaagctgaaaaatcgattttttgctcatgtcaataattattacagaaaaacagtaaaaatttaactgtaatagtctacagcagcagaatgtaattctgttactgcagaacacagttttgca

SEQ ID NO: 43225 - DNA, 4414 bp, Cannabis sativa
atagagtgtaattttctctttttacagcatcaaattgtactgtaattaagattaattacattatagatataaaaatgtatggtcacaatcattattcattttctatttgatcacgtttttttttttgaagaaaagcgtacatatattagaatcaaaagtagttaaacttcacggtcattaccaaaaaaaatatttcgggattgagaaaatcgagatacaaccgaacttgtggtgggtaaacgctcacttagccactctatttgatatcgttaataatatattagcaagtgattaattatgctataaatataatgatatagactatatattttttttagataaattatctcttccaggaaaagaatatatatttagtaaatagtcatcttcattcagaaatgctttggcagctgtgtacgagttacatttagatatggagagtactagagagaaaacccatgttttacacgccagttttcattaaataaatttactttctctaatttgatagccattttcattaatattttcaaatattaatacttggtacaaattgaggtgctgaatcaaaatagataaatttatttggcaactccaatttgttaaaacttaaataattttttatcacgaaaagtttaatgaaaaatataaatgataataaatctaggattatcatcatatgagtaatgatctgtacagacaaattgtgtaccaaatttttacacttatggtatactttatttcctaactcaactaaatttcattgtgagaacatgtttttgtgtctaaaatttggtaaacataaagtgcacatatcattactcagtcatgatattagaaatttaaacgctaaatcgagtactttcaaaaaccaaatgtaataagtgacaaaagataaaagatggatacagatgaaaacaattgttgttttttaatggtaaaataaagaaagaaaaaataataaatcatgatttgacaatttgggatccaatttttttttaacaggagtaataaagtgggagtagatcaaggcatgaagctgtaaaaataatagaaaaagaaaagaaaaaacaaatagaaacgacttaaatattctcaggcaaagtagaacgaggaatggataaaattgattgtcggttatataaaacatttcgcgggaaacttttattgaccaataaactccaatttttcatcgtttcttttagcattcctttaataaattgaaagtgggatttgaaagtatctctgtttgggggctactaacttgcttcgactattttctcttaagctgatgacataaataactacaaaacatgcatgattacaaagctctttctcccttctctttgcaccaaaattgacaaaagtgtaacattctttcgtttcatcattttgattaataaagaaactcacttattaatttgagctgcgtttccttatcacagggaaaggaaccaaatgatgaactcacaattcattatgtttttgaagccagaagctaaaggacgcccaagttggctggcccacctacaaatgctatagtgaactgacacccccattatcttcctatccatatatataaaagcttatgccaaaattcacaaaaatcgtcctatccatgtaaaaagcttaagcaaaaatcagagatctattttactgtacatggaacttcaaatcaattatcagaaccaaaaagaaacccatcatatgaatcaagacaaatccactcaaagactcgaaacaaataaagatttactgtgcttaccatctaatttacttttcattccatctacaggtatatgattcagtatttgagtgtatgcagtacattatatgacacttgaaattgatgtccttcctaccaataccacttggataacaaataagccacatgaattggttcaaccatgcatggaaacaaatattgacaagctaaattaggttgcaaattgacaactaagaacaaaatatgatccaattttcaaagctatttgtgagattaaaatgaccccacaacacactaacttgatcaaatcaagaccaaccaaattgcctaatttttgtggcagagcaagtgttggagtctctggcaaaacccaaaaaattcctgtgtagtcaatttacactagaatgtataccagctttcaacatttcccaagaatcaagatgatcgaaaaagcccttataagcgctctctctcgcctttgataggtaggcgcaagtgggatttgagctgtagtttgttaatcataatagattggctccttttctctggccagtggaggccacaaaggaaattagttgctgtgtgtgaaaaaataaaaaaatgtggggtcttcttaacattatttttaatgacaacaacacgtgtgagttgggttcccaagttttcaacaatcaactgagccccactgataggaataggcatgtggggaatcatagacctcagagaaaaatacagaacttgagagaggctacgtgttcaggaaagtaaatcagacaaaagtcgtcatcaagatgtgaagatggccgacatgatagaatgaaatccatatggaccgttgatcagtgatctgtgatcatcttcagatttatttatttctaaaaattgatgtcttcctgggtgcttgtatattcagataagagtttctcagttcgtggtatattcagataattttgagctattttgcaaattcattactaacgtaaccagatgatagtgatgctccttaatatcacattcaaaaaatacaagcctaagcatcccaatcaaagacatcacatttatactagataaacccactttaaccttgatctcgaagcaccaactaatttccaatcttagcctctaacgtcgttcgtatacattatgagttcaactaacttaattaagcccaatttcgacttgtcaattctatcatcttctaattctcatatttgaccactaatgaccttttcagttttcatagaccataaatgcttctttatttgggtggataaaactttcggaagagacctaaaagaaaagaaagttttcctaaagaagtaagacataatgatgcaagttttccatagaattgtccatctttaaaacctcttgagttgtaaaaatgacagcctcctaataaaccaagaccaatgtgatacattacatttacggcaacctatcaacacgagctataagaaagctaaattcaacagttctccaactcaaaattttatttttcatggatcaacaaaacttgatcatctcaaagattattattttaatatattaaaagatggtgttagaaaagcaagcctgaccaagacaaacgcaaacagttatgaatattgtcttacacttgggaaagtctatatttacgcctggctaaaaaaattaaacaggaagcaagccttccaaatctgaagctacccatccatcattttcaactttttcttacctgaagccagctaaagcagggcccacaaaccaatcacatatacaaaagaaaaaaaaaaacggcaggcgctttggatcttaatctccatgtgtgattttctattttttattttattttcaaatcatatgtgctaaaatatgaaaattaaacgaaatagtattaactacccatgcatgaatccaaaccttaaaagagtaaaggaaaaaaaaaacacctaattagctaaatttgaaatctaatcatactgagaaatggagtcgatatgataacatgggattttctcccatttccaaaagagcagaatggatggtccagcctaagtaagatgattcaaaagtgattggaaaaaagaggcacttagaattgattgcacgagttcccaggctttagaggaaagagaagggtctttttgttttttaggtgcctcctcctagagcttgtcaatgagtgtgcatagaatctaaaacaaaggccaaaaaagaaaaagaaagaaaaacttgtggaaagtagtaaaatggagaaaaagttcgattaggtgggtgtgctttgtagagtatagaccccttaatggtaggcagctttctcttttagctttccttttctaatttatgagtgctgtccaaaggctgtgtagaaaagtatgagtaaatagaatcttagtcaagagtgtttctcttcgattgaacagaaccaaaataattttcttcctttcccacccactttccctattttaaaaagaaaaacgaaaatcaaaagaaagtgaaaatttgtggacaaagtttaattaaagcaagttctttatattgttaacttactactagctggttttaaaagcaaagcaagggagtaacttcactcacgaaacaacttattaggaaggataaaaaaccaatgaacaagtaaatcatcatatttattcagtattagaagttcatgtaggatttttttactcttttaccctacaccaacaa

SEQ ID NO: 43226 - DNA, 2484 bp, Cannabis sativa
tttataaataaaatcaattttaggtataatattgaaaagacccctaatttctttacattagatttttaatgattaaataactaatcaattaattttcttatttttttaataatttttaaaaataactgttatctttacagtaagagatcaattttttttttacctataatccattttaacttaaagccggtcgatcttgtgcttagtgattattattatgagttatcactattgataaaattaaatatgaaatctcataaaattaatttaatataatactaacaatcccctttacaagtctccccaaactaatttatatccctttgacttattttctttggcattataatatatgtaattctattttttattaattctttagtacttaatttgtacaatcaactctagccgagtaaagcttccctcgctttaataaaacttcattattagttgttagtttgttaaatctgttcattaaagcatctcatgctaatgtaacagttaaaaaataactgatcacatgatacttgtaattgtattattaatggttattactaccatgaggtgtcacatatatatatttaataattattatagaattaatatttataaccattcctaaaatattacctcctagtggtgttaagtaacactaattttaatataaattaaacctaattgatggatcaatgcttttttttagataagcattcatagattcaaataaaaagttaaacctcttcttcgttacagaatatataatagttaaccacattataagtaacaaaattataaatttacttaaaactattaaaaatgatccaagttaatattaccatcagttaatcttaagagagtgagaccttttgcaaaaaggacccaaacccattaattaagtaaacatgctattaccatatattggttgaatttcacattctcattcccattaagtttaactctcgatcgattgtaccaaatactatattattataaaagcatagttagttttagtaataattttcaaacacaatataaatatttttttgtgactaaatgtaatttttagtcacaagaaaaaattatttgtgaagaaaatataatgataaataaactgaaactaaatattgctccagaaattgattacaagatctgaggcaaaggttatactaaaaattattatttttgttatattttaaatcacaaaaatattccttattttgtgctgaaaataattaaaatgttacttatttttttttttataaatccagtgggtttatatatatatattccacaaacaaaaacaatatatcattaattaggatttaggagaccatttgtatgtaggtctgccccaatttacaaaacaaattaagtttagccattttcttaagcataatgctctttgcttaatctttttcactataaaatctgttgtgtatatccgcatattccatacccctttattcttagaccaccaaatattataaatggttgctgcaagagttgccacaaaaacttacttctgttaaacactacaaaaaatagcggatatcatccagacctgagattttgaggccaagaacttagatcgatcgagtttaactgtaagagaagagttgagggggttttggaacgaattatatgactttcgtcaatgacttcctgataccatgtatgaccttatctatacaaactatatctacatcaattaaaaacaatgaatctcaaaagtttgtaacagttactagacttgagagaggaggcctctatttatagagatgagtttacaaaagagctaaaacaagaacaatagttaactaatcatgagttaactgtttaacaggaaagtaagtaaagaaacactaactaacaactattcttattaacatctactaactgtatcaagtttggacaatgatttttatttacccaaaataaaaaaagtgaagaagaaagaagataagtatatatattgttcaagaataataagaaaggccagtacttccactttattatttttatagcaaatccatcaagttgtggccacaaagatatttgggccaattaactaaagcaaacatattaattatagatcacaataagaaggttcatgtgatcatcaattacaaaccttagagatatataattaatctcgaatgcattaaacgcaaaatcaaactacatatgaatgaagggtacatcatatgtatgtggaagtggaaattaagtagcaactgcatcctccaaactgatagtagctagaccttttctggtcctgatttcttctgaaattattacaaaaaatacaaataaaaataagagataattacataaaatattatttttgttttgtaaaatttttaagattaattttttttatatatatatatatatttttacgatgttctatacaaacaatacaaaaataataaaaaaactacataaaagtaacaaaaaaataacatttaaacaacatcaaaataa

SEQ ID NO: 43227 - DNA, 2245 bp, Cannabis sativa
aagacacaaaattatgattttcattatagtattagatagtattattctctcctctaattggctcaaaagattagagagaatgaaacaaaattcttgcacccgaacctgattcaacgtttccaactcggtaacactcttcaacaaacaagaaaatgacctttgggatatcatggccaatctgcagacactttttcactgattgtagaaccgaattgtggaccgcccttacgatagcaggcaagaaattcaatagggtatcccttcaacttatgtggcatgagtccaaggtcattgaaagtcaaagctgcagaacaacaatatcataattggaatttgggaaaatcagctgagattaaagagcaaaaaaaaaactaaatattattgctattaccgttttcagacactagtgtatctgaggtttgagcaatgatctgatctaggttgaagatctccggattgggtaacgggaagggaaccttgttaaccaatatatctcgtggcattgccatggcctgtgattataaaacaaagaaaatagtcatataatgagaaaaatctatattgtattttcttgtggtggtaaaatatgaagttatgtttgatatttatcaacaggttatgtgtttgtttacctttgcaataggaacaggaagtgttacgtagcgaggatattcacgaatcgtctcaaacataagctctgcctgcatttcattaactgagtaaaaaagaaaaaaccaataatggaatgcaacatatggaagagaagaagatgagtaattaccaattcgcgcactgtaaagatctctgggccaccaagttcgtaaacttttcccatactggcaccatcgtctttcaaggcagcaataattgcagcagcaacgtcaacgacatatacaggttgaattctgaaaataattcattgaaaaatacacacataagtatccaagtcataatggatatgtactttaaaagtagtaagtatatccatattgttacattaaacacgtacctggtagatccacctccaatgaggggaagaaagctatacttcttagcaaattctgcccaccggtttaaaagtctatcctctgtgccaaccaatgcagcagatttcagaattgtagcctgttacaaaaattaggaaagatattattgaccaaaaatcacaaatttgaatacatacgtatcgatcaagaaaaaacaagtttatcatgaatctccacctcaggcatttctctcattacagcctcttctgcagcagcctttgctcttagcagtcttgacggtgatgaagcagatgaccccaaacaagaaacttggagaaatcttacaatcccaccatgctctttagcaatctgtagacattatatttatcacattaccactaaaggagaaggagatttatattcatttttactaggattttcttcctcttctaattcatcttacacgtgaatttggctcaattaaaaacagaaaagcgagagtgagagagagagttctaaatcttcttatgggacaatcacataaacatcacagaaaaatgacacataaaccatgtaaattcataaggcacagttatagataatattgaagggattattttccattcctaaaaaaatactatggagtaatgtgctacaagcttacaacatcctctttcacacaagaaaatgcagataaaaaaatacgtcacttaaatcctatatccatgttctagtcaatgttagttttagaaagatggaagtttcttaaataaagcttataaacctaccgttgcaagttgctcagccatgtgatggtttacttcttcaaagctataattccttgtctcataatcctttcctgccaataaatacgaactaccgttaatttcctttgtgcaaaccaagcaataaacctcaaaagcaaaaaagatgcataccaataaggttaacaaccacattagcttttgccattacagctttaactgaactttcatctcttggattgtatttcattggcactatctgtgatagaaaatcatcggaacatgatcagtgactacaaattcaaataaaacattcaaaagcaattcactaatccaatgtataaacttatccatatattactcaaacctgtcccaaatctcccatcagctttagatgacgatgagaatcttcagaaccccgaaaaggaactagaacttgagatcccatcttagctggttaggaaatgaagaatcagcacaaaaaagcatggaatt

SEQ ID NO: 43228 - DNA, 1862 bp, Cannabis sativa
aaaatataattgttttgatccaaattgatcaaataattagtcaagctctcaattgaaatgcataattttctttcaacagagttttatataacattgatatgtgtataagcacatataagattctcaaaaacatataatttcataattttcaaaaaacataacgtgcaggatctagacctaataaaaaattggatccaaacccaaagatcgtgcgtgaagcactagaaatacagatcactttcaattcacaattagatctacattacaagcactaaaaacactaaatttaaaccctaatctaagccatatagtgtaattcctcaaatcgagtgtactaacaaactgacaattgaggcctttgaagtcattacatcacagttttttcatataaaaaccgaacaatgtaaggatcgatttgaagagaaggaaaagaatgttaaagtgagaaggaaaactaaccatgtttgtttcttgagaaaaaactttcccggaaaatctttgagctttggcggagtcgaaagttagttcttcagaaggagtgagacccaattttctgaaatttgcaccaattttacgttttctttggtgaaattaaaaataattcaattttggtcccccaatttttattatttaaaaactaacccctatgaaattcgcacttgtaaaatcgaatgtactatgagcaaaatagtacaaattgaatcggatgaacattcttaacaatctcactataaaagaaaagaaaaactctattaataagttatgctttaataactaaagggtgtgtttcaaggccagttttgagattgggtgggtcttaggagaaaaaaaattgttagagcctttatttaaaaaatatataatattttcgaaaactactaaaaaagtatgtataattttaaatataaaatattttttgggcccactaagtgcggacctagcccaggcccgaccctggtatatttggaagttatggtgtaattagatttagatgtaattagacaatttaaccacttgaggctaactcaagtggccaagtaagtatgggagggtggatgcgcgtgtggaagtcctgtgatcgaattttaagttgtacattctcttttttcaaaattttactatattattaatttatatgatataattttaaatttgttgttttaacgtttacttatgaagttactaaatatatttatttaatgtttttagaataggtatcaacttttctagcagcagatcttattttttcagttagattaagatagattcaaggaaatctcacaattattcaggcggaaatcatacctctaataatggttgcaatggatttgttgctggaattggacttactctcatttcttttgagcctgattgtttatatttgttctatgcctatttctagagatttttttaggctctctttttgatgttttttttttttaatttattgttcaattttcctaaggcatcctttatttatgcaaatcattcggccaatatgactatgcatgaattaattgcgcacgcacttagggtagatggtgagctaaattgcataaagaatcttcgatctcttcctttatgatgtactcaacgcttatttatttttcgatgaattttattaattgttcaaaaaaaaaaaattagataatttaacataattgtctgactatatcattacattgtaaatgtataattaaagaaaatagaggcattttaattatactaactaattctcatgactcctatgaaaattaagtataattatactataataactaaaaaataaatcttattttaaataataattactaaaaaatagagacttatttatttttacacataaaaacagtttttttttt

SEQ ID NO: 43229 - DNA, 2727 bp, Cannabis sativa
aaactagtaacaacttgtatctaaaaacaatattttagtcacaagtaattttttgttgtgactataaaaattacatttactcacaaaaaatgtattttgtgactaaaaatttgtcactaaaggtagttatcttttgtagtagtgcttttagtatttttttatgatattttcttagtgaaaaggtattatgtgagatatctaagactcaagaatatcctggaattgttttcactattaatttcaatagtttttggttgtattgtgagatcaaattcttaaaaaaaagtagcaatcattaaactactcaaattaattacgtgaatttttgtggtttaaaaattattcaaggtggaaagatccaagatatttctctttcttttttaaatgattttttgtggttaagaaaagaagctagctatgagattttcatacctttgctttcagcttttcttttatgtacaacaaatgctattacacctaataatattgcaccacttgatagagccacaacacaagcaattatatattatgatttttgtttgtctcccacgataacctaaaagttcaatgataagtccaaatacaaaaatcaaacattttcatttcttgacaatactattttaaatagtaacagtaactttaattcaaaaataacataaacataacatattatgttaccttgtaattctgatgaggccgcaatgcgaaaatacaaatcatttgcatcatcactttcaagtattctaatatcaataaggggtgtgtttggccacaccatacaccctaccgcatcaataaatgaataagctatacaagaacaattatccatacaccatttatgacatgtatcaaggttgtttgaagcaacttgcacgagtacatacatatcgggaatacgaatattagagatcaactcaaaatagtcatcatttttatcgcaaaataattcactttccctaacacaccctccgctccaatttcctttgttccactcttgttgtgattttggcttaaaccctcttaagcacttgcacaatggagattctgtcctttggcacgccccaaatggtccacatctcccgtaaaaattgcaagcacttggaccctgatagcttattttcccataattagctttatctttcatcacaaccatcaccgttccatttggtgaaagaaataaaaccgagttggtgaactcatcgtttgtcttcaaatatgttgttccttgttctacattttcgactaggttgaatggagtcctataagaagaatatatggttgggttgccattactagtgaacttcaacttattccaaggtccacttctcgagtaaatggtagatgatgatccattattaatcgaaatcacgatttcaggaagtgttttctttatgatttcgaaaatgaaatttccaggcgatggatcgttttcatttttccatgaagttagcttgtaatcctcgccagttttgagattgaaacccagaacggagcctggaaagaatgtatcacatggatttttgaaactctcccacaaattttcacctgaagtgacatctctaaggacgaagtttccattgtctaaaagtagacctaacgtactactactagttctatttgatcgaaggtcaacgttggttgaccaaattgtcgaggaagaattttgtagttcttcgtgttgaataagctctagatttccattgttgttgatttgaagaactgctgatgaagtagagcttgtaagagaaagtggatgctctcgattggcaacccatgcaactgaacgaggagaatcatgtcccttataccaaatacctaaatattgatttgtagaagtgttgttgggagtaagtaaagaaagaagcctgcctaattcaaacaaaaacttggttggaggaaacaagagtttggtttaatgagagtggttgtgaagatgttagattagaaatgaatattgagaaacaatttgtggaagaagataaaataacaatgatgatcaaccatagagtagttaaaggaggtgtagtcattttaaagagacaagcttgctataagcacaagaagactattctattaattttctgctctaacattatatgtagataaggataagcttttcgtagttgaatttgttttggccacaaagaaattgatagtggaagagatgaaactacgtggaaatttcttattgtataacattttcaaaatgctcttattataattaaattgatatggacgtttcaactactagctactttgaagacttttacctttttgagtctatctaatgaattactattttctagagctagttactattttccttatgaaatcatgacatcatacataagtttgatattttacaacttgtttggtgggctgtatacatgtcgtattgtattaaataacaaataacattatgtttagataaactattatattacattaattattacgaccataaattttaatgcaatgttattcgtattatttaatacataacaaatgacacgtattagcttgtaatataatatttacaaacgatctcgaagtcaatctcggctccgaccctagccttggaccctagacccgaactcagaccacgaacctgaactcggacctaggctaatatcagagccgatcgtccgttagcccgaaggatactcactgtatacatacagaagactgaaaaagatccctctcactattatgtaagtgttagtttta

SEQ ID NO: 43230 - DNA, 3494 bp, Cannabis sativa
gtgaggatgaatttgagccggactacggtctcgtgatttttttcccgcattgggtttccatgtaaaaatcttggtgtttcacttttatgcttaatttgtatgtttatattgtttgtggtgctttggttgatatttaatattgcatattgtggtgtttgataagtatcctatttttgacttagagaaaaaatattgtaattaattacaaatttgcaataggtttttctaacaggaagagtcaaagaaactgttaggcaaagaattgtatcggtttacccaaaaaaagatcaatcaaaaagataagagatggtttaactctttgtaattctttatatacatatagaggagggatttaagacgtttcttttttggtattggtgcttttaggttgtactaaatgttcaaaaaaaaaaaaaatatgttatattctctataactctataagtagtttgactaccctgcaaattaataaactcaggctttgaataatttcgaaaatcacagtggaaaaaaaaaaggggggacagaagggaaattatcaggagacgtccttttcatatatttgagattaaagacatttattgtaccacgtacgtatatgttaattacaacgacgttacattgcttctattgatcatttccacaactaattttaaagtagaaattagcatcaaaactatgcaaatgcgactttcagtaataagaaagcttccaattccattaataaatttgttaacaaatattttatagttgagtatttggatgatgacgatcgagaaaggaattccactatattcaactttaattaacatttgtatgtggagctagctaacacaataataccaaaatgatgaatatataatttatatgtatctgctctttgactggataaggtcttgttggtattcacgaattccattatataaatatatatccttctctcttcttcatgtcagctttgactttgcctctgtattttgtccccatacctggcttacctgctttcaacttaatgctgctcctgtctagatattaatatgtacattttaaacaacaaaagaaaaaaaaaaagtcaaaacataaataatgtaccaacagattttaaactttagcttataaaagagaattgctaaaaagttttattagtgactaatattttttctcttctcatattattattattaatataattaagtgttgaatcttatatataaaaagaaaaatattaaaagatactaatagtgcttagtaccctctcttatatgttaatattgttattagtgcaattaagtatcagatcctatatattttaatgtaatagtttttaaagagtatcactaaccaatatcataagatttacgactatatgtttaaaacgtattacactattagtatctaataacaatacttaaaaaaaaatcttttaaaaaatattattaatcacaagattatctatataaagtgttctgaattattagagattctaataagaatgcttcttaccaataaaagcaaaaatgggaatttaatgcacctggcaactacactcacagtaataaattaaattgtagtgcttttcagaatagagaaattaattttctgatgacagaattttaaaagcatttcctataccaaataataattacaattgttgccaactatagatgataaaaaagacaaattttccctctcttttctcttatgtgagtagtgcaaccaaatcaatatatgtggattgtctgaattaattgaagattaaaaacaattatatgtatatatttatagagttagttaatatatttcatataaacacatgatgatcgagagataattaatatatataatatatgatatatcatgacaaagcacgtatcaaaaaactttatatatgtaagtcacaattaatctagctaaatccaatatatactatatatatgtaaatatatgatacataaaacttgagaaagagattcaagggtttatataaattaacagtctttataaattgttatatataagatgaatgaactattcttgatctcattatcaattagttttagttttgagatgaaatcttatcccaaaattctaaaaacaattaaaaaactgataactatagtaagataatgttaaactagtcgatcgatgctgttttcaaagaaggcactaaaaaatttagtaaaaacagaaaattaatgagaattggaaattacctgctaattaatataagtcccttgagatcatacatataaagctccatagctgagctacttgttgtgtaaggggttagaaccagttggaacgactcttttgtcttctgagattgaagaactactagtattactagtaatattggtagaagtagcaatagtagtagaagaggaggaagtgtttttattttttgtactaaagtagttagagaaatagtggcaaaaatgtagtactgatccctttgctttggagaccctacaatggctttgagtgagagcttgtagttgtacattattattaggagtataatttaagctccttttgtttccatcatcaaacatgaactcagtactcgccaaatttaatcttcttgctgcatctgatgacccaatggaattagccataatcaagagacacataacaaagataagctcacttaataatctcatcatcatgatcatggaattgtaacttgaataaatataagaacacagtaaagaaaaaagatgaataataagcaagacccacgagaggatatatgtaggatggagctgaatagaataacatagataaagaatgaaatatatgaaaggaaaaatatggacttgttgggtggttactggtagggacatgaacattaaatattagtaatattgtattgtatctcggatgtagtaaaacatagatcgatacgtccacatcgatcttcgttgatcagaatctccaccaaacttcattaaatgcttcaaaaatccatttttaacaagaccggatgacaatttatattattaattatgtgtgtgtgtgtttgaaaacttctgtttcaaaaaataaaaacttgtgtaagtaaattactagtgctgctgcaagactatatttttagcttaacattcttttttgcctaactaagtctaagctatagctgatgctgtccaatattttatgtatatactgtacatatatactgttataattgtacatgcttataagtatgttatgtatgtgttgagctcgaattaatattctctgctgtagcaaatgtggtagaaggatatggattaattaatggttattatgaaaaaggctgtcatgatttaaaatgtgcatgcatgcgaagatcaaagcatgttagcgaaagaaacatgaatatgggtatgtgaatgtgtataggatagagggttttgatcatgacaggatggctgtatctgcctttgtcaagcacgtttttatgccaaaaggggcagtgattgaataatgatgagggatttttaaccaccagctca

SEQ ID NO: 43231 - DNA, 4598 bp, Cannabis sativa
ccgcggcgctacgtcccaactctccctcttcttcagtttccttcccgccgagatggccttccatgtctcttcaagcgagctattatcctcttccttcttattctcgtcgggatagtcgtcggattttgtctccggcgatgggttgccgagcaataatgaactgtctttagtgattaaattcgttactgatttctcttcagcttcatcttcttgacaatccactgttgggttttgaccggaatagtcaccgaagtttattcccggtgatgggtcgccgtggaatagtagttcagtaggtacaacagtgaccgttttttcttcctcgattaaagataaagtattggttggagactgagttgatttttgttgttgggattgggaatgaaaaattaagtggtcggtggtctttttgttattgtcgtcgttactgggttgataggtggatgaggcagcaatggcgacgatgatgaaattaacgacgatgtagatgtaaagtggagacataacccaactcttaaacgacaaccaaatctggggaacagtcgagagagtcagatcaacgacgaaaggaatcactgccgcctttaccaatgtcagagtcgataccattccggctaaaagcagtaaaagctttcctgcccagattgtcgtttcaaatctggttttctgcaaagctctgtacgacatgtcgtttttatatatgataaagaaaaaagaagaagaagaagaagaagaagatcctcaaataaaaaacagaggaaaatgcaaaagagagagagatgttaaatcagcatgaaaaaaattgctgatttttcttaattattaacaaaatcataagcgaacagagatatgaaaccactgttatgtacatatatcaagaacagagaacggtagatattgaaacaaactatggatctgttataagaagaagaagaaaagaagaaaacccatcatagattttcaatcaaagacagcaaaaaagtgatgatgaatttgaaaagagagagagagaggtgttcatctgacaactcagaagaatggtaagaattgaggagagagctttagaaaaagagagagccccagaaaagaaagagctttttttgttagttgcagacagtagtagtcccaaggacgaccctaatagaggttttaagcgcttaaatacatcttcaattaagggtgtgctaatctcatactcctaactagttggtatatataccaccatgattaaatcttaaccgttcattgctacaaacttgttcgacctataatggagtactattattaagattttattactatatagccaccttaatgtcaacaagaggtggctcctcctacaatttgttatgaatggtttccaactccaataaatttcgaacaaattatttgagagaactaaataaattagtgttagtaatttgattaattcagactctttataatttttttagtttggtttgagctttaaaattcttcatgtattgtagctacctacttgttatgatgctagagagaatattaatattgtttgaaaatatttgtttttagttatcttttgtgtgttataaatttgaaaaaaaaaaatagtaaaaatatgaataattacttaagtgaattagttgcttgaaaatttcattgatctgatttaattataaggtagatttgaagtgagatgttaattgtatatgaatttttattttctgtttggctagtggttagtaattttaccgaaaaataatattctttagttactaacatttaaaataaaaaaaaaataagtaaatactctcaattatcatttatgcataatgatttgatagaattcatcaattagcaaggtaatataacattattagcacattttaatattgagttgaacacattttgcttcaataaataatataaaaaattattaatcaattatagagtacaatattgatctagcgctaagcacaaggtacgtgttatcggaagaattttgacaacatcaaaatgtaagcaagcaataaatgatcaaaaaaaaaaaaaaacaacgaatactctacttagaacaacaagtattcaaaggacattgcctagataatagagcaaatagaaaaataaaatgaacacaagagaatatagtggtttagtcagattacggtctgcgtagtctactgttacaaataatttttgcttaattttttcatcttgaatcactcctttatatagaaagttagtgtccttttataactaaccgattttagaaccgttctacaattaataataatattaaattagaataaaataaacgtaaaagaataaatgaagaacagtttaatctgttctaataagtaaacaacttatgcaatctataaggtgcgagttgcatgtttatattctcgcacgaacttgcaggctttaaatacgttctatattcttaaaaggactaatgagcctactcgaatgtctacgttctatctgagtcgctttgacagacattgtatgtatcgacaacatgggacacgcgagtccctatcgagtcatcgaatacttttcgtcattcggactaatctttatgtaaagaagcaatttttacctagtcccaggagaaagctacttagtcattgcatatgttttgacatatgcgcgacttgtataaattcctttcagtcctgcttatcttattctatgtgagacatagtatatgactagatcctgtcaaggccgcattatctcgcgagtttggttcaagcgagttcaattgtcggagagtcattaattaacagctcatttatctcttaaggattggatctacgtgtcaattttattggagactgatctcgagtttttaggcaaaaatttcgcactataacagtgtctaataataagaatgctctaaactaaaatatgtaaaaagggttctaatctcacagtctcacttattagagattatacttgactttttggaaagctaacttgttgtggcagtatcatctttaataggatgagaaccctcgtaaggtacatactaatgatccaattaaggcttatctacagaattgtcaaagctaccgaaaaggtagagaagagatgtgcaccacatatccccaatttagctttattttaggaggtgtatcacataatttcgccgaaattacaacactagcaataggtttaatttttacctttggtaaaagtgtagcaagggtagtagttgtatagattagatcaatgaatggataaggggctacactacaacacaacactaccactacattttggcaccaaaataattttatattataactttacatcaaaatctaatctccattaacggcgctcttatatagcgcctctgtcgtttaatcaaaagctaacaccacctgatcacacctttaccaccataattgcaaccacttttttctcaaaatcataaaacaattcttttcttttcttttcttttttttacccttaatgaaaatataaatatatataaatataattgatgttgtaacgtttatttttctaaaaaagttttgattattattctcacttttcttacaggttgtaaattttaaagtagacattctcatcatattattccaaaggagaaaaaaaaaagtctggaaaattccccaagtttgttggttctcattatgtttgccatagttttttcctaaattaaataataccttagagaatgtagatcaaggtttagcgaccaccatagaagattatagaaattttttttctgaaagaaaattatagattaataacttaatagaactttaagtattttttttgtccactaatttatacgtacaacggcacaagttaaatattgtagaatatcaatacacgttttcaaaaagcaaaagcattttcttcttaaatatatttttaaggtttagtcaaatttttgtgacatgtataaaatatagattatagggagcgagttgtataatgggcacgtataaaataattttatggttagggtacgatttaattaagacacttaaattttttataataatgatattcattgttgtgatagtagttcatctacaaagtttaataattcttaaataatttattatgttctaatttgttagaatttggggataagatgaatgagatttcatctctaaatcaattgataatgggaggagtagccaatttatcttatatatcacaatttattttcacaaattaacaatataggactaactcttaatacaagttaatttcaaacagtttatctcatatttaaggcactataaattatttaggtgacgtttggatatatttttgtttttaaatttttaatcacaataaaattttgattttgaaaaataaaaatgtgttctataaatattttttatattttaattttaaaaacataaatcaaatgtatgtcttataaattttatttctattttcatttgttgattttatttatgttgcgttcggatccgaagtcgggatcgggggctggatccggagtcgatgtcagggtctgagtgcgtgttccaatatctaggataggatcagagtctaaaatataaattaagaaaaaaaatatttaaaacaatttagaaagtaatttttgtttt

SEQ ID NO: 43232 - DNA, 3264 bp, Cannabis sativa
cttaattactcatatagtgcgatctaatattcatcttctgaacttagtaagctatttttttttggtttatatatatatgcactttttctttcaatattaatttatataatatatatacgtactattacatacatctaaattaattattatgcatgctttattagtgctgcatgccttaatacttgcagcatataagtatataaattattcactatgtatatacatatatggaaaatcaggatcctataatattttaatgtaaatatattagcaggaatagtgatatatattaatattatgttaatatgttaattacttgaatttgcagaaagaaattatataaattagcaatcaaatttgaatggctgaagaacagttttccgagttggtcaattatgaatgcagcatcaagaagaatctagtgatcatcaggtaattagttaatatttattgatcattatttatatataaataaattttacaactaaattatatataattattatattataatttataaattaattaattaattaaattgattaaatagtgagaaggccgaaagtgaaaaaggtgaaatatctgatgatgagaaggtgatttgtgaagtgcaaaatgggcatgatggcaatagctgctgctttgatcctgttcagagaattgtcgatggatttaaccactttctctctaacaaattcaagtaacgatataaattattatttatatatagacaacatatatttacttattattaatatatgttatacataaaaaaaaaaaacaagaacctaatcaatcaatttatttgatgaaatgattttgcagcaagtatccatgcttgtttaatgaacttgccgactcccaaagtccaaaggtatgtcttgtgtgaaaaaaaaaactaataaatatatataattgtttatattaaaaagataaaaaataaactttacataattatatatacaaagcattacttatttgattaaatttaattaattttaattaactacttaacagtttctggtgttcgcatgctcggattcccgagtgagtccttcccatatcttaaattttcaacccggagaagctttcatggctcgtaatattggcaacttgattccactttttgatacggtaattaattaatcattaaaatttgtaatcaaatttttcattcaccaaaaaaaaaaaattaatctattttattactgaaactatctcactgttctcacagttaaaatactctggagttggttcaattattgaatatgcagtaaaaaaccttaaggtaaatctttaatttttttagttcctttttccttcaatataaattatagatcaaagttagacattatatatgtatatatataaatatagggacataattttatcccgttgtactttcatggaatgtattctgtgatatacgatagccgttagatgagggagttatttgatttgagtgctgagattgatcgaggggtaattaaggttaaaaaaatagtaacgtacctcatctaatataccctgagatctatctaatataccaccgaatacattccgtaaaagtacgggacacgtccctataaatatattcatgaccatcttcaatttttttaatatcgtgttttgtacataattatatggttttattttttatgaatccgaaattttaaattttacaggtggagaatatactggtgattggacatagtcgttgtggtggcatagaaagacttatgtcttatcctgaagatggttctgctcgcttgtaagttttttttttttatcctaaaaaaacaacaatttggacacattttagttttagaactatatatatgatataatgtagtttttaccggatcactttaccctcaaaaaaaaaaaatataatataatttttttattaattttgactcatagtctaacatgttgataaaatttgcagggacttcattgatgattgggtcagcatcgctcaagctgcaaaggataaagtcaaagctgaacacagccatttgtcttttgaggaacaatgggacatatgtgctgaggtaataaatctaaatacttagtccatactaacaaattttttattatttgttaatattgacacattttattataacaactacatacataaaatttctaaaacaaactaatacacatatatgaaaaaataaagatatgttctaatacacatatatacatacatatatatatatactgattttgatataataaactaatacacatatatacatacatatatacatatatacacattttgtttgttaattttttacaaactaatacacacacatgaaaaatcataaatctgttactagccgtagtttcaaacatgtatcattgatgtgaatgtgtttaatattttatgaatgaggattattgttattgaacactagtaatatctaacattttttagatatgttatttttcgattggttaacgatactctaaaaaattattacattaaattatataggacccgacttaattaacaatattgacacgagagtgctattttaacaattctgtatactattaagttgcacgtgctactgcacgtgtttagtatataaattatatgttatattaattaataaatttactctttcatattttactattttatgagaatatttttcacaaaatttaaagacctaattaattaagttaatttttttttttttgaaaatataatgtatatgtatttattttttattggcaaataatttccctttcaattagttaatttttttctcttacataagttaaaaattttataattttgtgtatttatattttctatcttattttcctctaaaaaatttatattattcttccttaaaaataaaataaaaaaaattaatgttaattatcataatatttttttaatattaaaattacaaattcattcttaattatttaagtttattttatttttaatctccatttgatttcaatcattatttatactaaataatactttgcaaatttactatatatttatttttaaaaatgatagagaaaaaatgttaggataagaatatatatacaagctatgttatcatttgcatgtaatttgtttgtattgtaaagtaatatatattctaaaagagtatatgtgtaatttaatatgaaaagtctaaaaacattgacactttatagaaatgctaaagggcactactggtgcctagcaccctcctacgtgtcaatatcgctattggtgcaattaagtat

SEQ ID NO: 43233 - DNA, 2986 bp, Cannabis sativa
aacgagtcgaaaagaatggggccaggatctgaggccacaatgggcaaattacgaactcccgctttcggataaagggtcaaccaatcggtatccaccaaaactctatcaattctttctcttatcaacttcccattatcccttttattcctccacgtaaatttacacccatgaaaccccaaatcgatccctcccgtctcttcaagaaaggaagaaagaatttcacagtccctgtacgaaaccatcctccctccatatttatcatccttctccagaataacattcaaatcccccacaaccgcccaaggcgattgacatctctttacataactagcaacttcctcccaaaagtcatctttctgttccttatacggagttccatatattgcgaataaagtccagtccttccccccagaagggtcactaacccaacactcaaaggatgtttctctaactcgagcaaccttcaaattagcctctttattccacaacaaacaaaagccacccgccaatcccaaggccggaataaaaacgccaaactcaaaacccaactcaaatctcaccttatccatctgatccctacccactttagtttctatcaagaataagcaatccaccttgtaccttctcctccaaacctttaaggcttggatagctgcaggtctcgcaagacctcgacaattccacgataggacaatcattggggcgggggggcttgataagggtcgcctcctcacccatcgaaaaatccttttagatttgaattgccacaaacatttctccttgaagaccattagaagtattcttttcatgcccatttttctcacaatccttcttctggccttctgcttcaacattcttcttcttccctcttgagttcttcttattacttctactcttcccagatcctctcccaacattatcagtcttccccacagagaaaactcccccctcacggatcggcgtttggccgcactcatcatccttcttcccacactcatttaacggcctccctttttgatccacaggaattacacaataagcagccttccttttcttaaaattcgatcccgtacacacctgggcctctaatccttcattttccaaagatatactgatctgggcctccaccacatccgattggactaacacatccctggtgacttcctctagtgaggtgccttcagcccattccacactaatgggctctggatacacatgcggagtcctagacttacagactttatgatgtggtaattcaatcatttgggccgcaaaaggcccacattgggcatcagagataggataacatccttatccttaggattccttccaattttggctattggatggtccccactacgtggatcactattaggcaagccacctgtccctatcgtaccaatcatcctcctgtcaccaggacgttgcacactcccactaccacgatccgcacctccactactcgtactggtcgtactgtccttggatcctctgttgtcaatcaacttcgccgcctcctccgactgctcttcgttctccaacgaccccaagttcatcttttgtagcctctccatcaccattttaggtcctgcatccctccttatcgccatcgccgggggtctggtatcaaaacaatttcgtataggcaaatttgctttaagccaggacccatacaaaggaactgcacaccccaccggaggatacacaaacattttgggccgcgttcaatctttcacgtcgtgaaacaaatacccatagttaaagcaaattgcaggcaacttacaatacttgaattggatccattccttcctgtctctggtaatgctcagaaaaaagcctgctgggatacgttgcaataacggtatctccaccatcaacttgaggaatcccctccttgcgataactctcggctccgccttatcgaacttaacatacttccctatttttgcaccaaccaccggagcattttgccaagccaagtacggggtaggcagtccatgcacttgaacccacaccctcgcaatatccatctgcactttttgccagcccccatcctcaggccattctattaggtttaggatttgtcctcccaacaaccatggtcgaccattcagcacctcctccaagtcttccttactatcaaagaaaattccccacagtccctcttcgagggttttaatccaccacttactccttagtctccaaacccccgagagtatctgccaaactttgctcttctgcatcggattcctaccaaaacatttagccaaaacccctttctgaaccacttcctccgtcagagcttcatccgtctcaagttccagtgaagaatcctccaggaacttctgtctcaaagcctcaatctcgctctccgtattgaccactttattaacccccgtaggctccggctccgtattccccaagttaatggagaccgataaagccggctccgttgagcttcccccgaccctatccatagttcttcagactgtctcttcctttcgcccaccaacacagcaacactacacctcgcttgacaaactatcactgttgtattcacaacatctcatacagagaaatggtagtaaggaaaaataaacttttggacaaaatcggcaccaatagaacttagtgtagctatattagataatttaatacggcgaaaatttatttactataagattaaggccgatttgacatgatattctttaagtgaagtgaattaataatatctatttgaagaattagtagagccactagtccgccatgcaaagaagtttgtactggaggtaaatagtgaaagttaaaaagaaaatttatcaaatcacgacaaagcaacaatttttatatagcaactactccattagctttggttataagcaggggcggagccagagtcgaaattcaacgagggccaaactatattataaattaagtgatagataattcaaaatatattattaatattataataaaaattaaaata

SEQ ID NO: 43234 - DNA, 2827 bp, Cannabis sativa
aaaaaaaatatatagagtaattcccctatatttttttattacaaaagataattattattttggactcagttttacaaaagttattgctctatatttttattttattacatgataattaatagcttatgttgtagaaaataaaggataatgttattttgaaacttatattggtcgaaatttgttagtgtaaggaaatcagaccaaagtcattaaaaaaaaaatatatgttagacaaaaatttagaattaggattaaaatttttgctttaaaatcgaacttaaaagtatgtttcatttttcaaaacatgtggtcaatcgtaaagaaataaatgactgataaagatagaaattgtaaatcagtggtgattgggaacatcaaatttatttgtcaattttgaaaaagaaaagaaaaaaaaaaaaaagagaaagaaggtgattggccacgccccacatggcctctatgaaagcaaaccagaaaaattggattgatttaacacccttctatctatattatttcaatgaagtatgaggtcgcatatagtttaatataataacttttaaggaatatagttaatcaatcgcaaacgcgatatgtcggagaagtgctagccttaggaaccactggtacttaataataatgctctaattttaatgtttgatgttgactctttcaggaaagaaacatacattttcctacaattatttacaacatttcattcgataaggatattaagtttttaatgaataattaaattttttttaaggatttgaaaatgagtaatacaaaataatcatttaaatgactcatttagtttattcttatgtatgtatatggattcttttgtacacataagagctagcttttgaatttgaggaggaattagaaaatttaatatcaatattcattaaggatgaagacaatagtagaagccatgaatgatgacaagggtggaagaagtaataaaaccaataattgaagataaaaagcagaaaattaagccaaatgaaccaggagacacacttattgatggagaagtccactccatttcatttgttcagaaaaccctgcctggttgctgacacttgagccccccaattcatgaattgactctgatttttcacagaatttggcttcattagctccccaatgcctttgagaaaccataactatctacagttggagtgtgacaattaattatggattaagtttttaatatgtgattgtaagttttttttatttattttccacctcaaattaaattatatatgctatctttgattaaataatgatgcctatttgtcaacaaaatggcaagctttcatttcgatttgcatttcgtatttttcattggcacaagaaataaataaggctaattatgattttgatctctctaattttgatatataacaaatcttgtctatgaatattttcaggccgtttaaaatttggctcaaactattgaaactagtaaatataaccgctctttgcacgattttgtaatagaataaatataattttaaaatatttattttgtaaaagttaccggtaattatttttattttgctaaatgttaattttaaattcattgttttacaaataaaacaatggtactttgaaattaattttggtcacacatttttaactatagtcctaaagttttctctcttaaccctatctaattattgtgacccaaattctaatctcaatacatgatcctaacactaaataaagtttacattatgttccattttgtaaaatatatagggtctaaattgtcactaaacaatgatcataagcataaaggagttctcaagattgaatccctctctctcaaagtcagaaattcaaagaaacaaaattatcattttacaagtgacatcaaaagaatatctataagggcatcttgcatatgcatatacggtccaaaagtttaaaaaaaaaaaaaaccatgacattacttctagccatgtaaaacaaatataatgtaaagaaattaataatattcttagtctatcttaggattgttcataaaatacgtaattcaatccaatccatacgattcaatctaatccaatccgtaaagtgtagatattcgcacttttgcgaatttgattggaaaatctaaactccgcacttgtgtggatcggatgttgattgacatacaaaagtaaccgatcaaatccttaacatatatttatatatatatttaaaaataattattactatactagaaatttgactaccatctcactgggggacacgtgtcaaaataaaaggaatatggatcgatacaatcgctttttatggaataactcattagctacgtaagtatcagagtatattcgcaacctactgagtgtaaagtcttaggcgcggaagcgcggaaaaaatatacaaactcttgcttagtatattagcgagaaactatatgtcgctcaatgagagtagtgaggcatcaagtacattataacttaggaagtcgatagcgacacatattgactgcaaaagcccttagtgtataatgtataaactaaatttgacagtcgggttggctcgagacctagtaagcgaggtgcctatctcgctacggaaagacttcctgtaacttcacccagttaacttcagatgttttttcagtgaggcttacaatcctgacgagacagaaactaacatccaaacgagcctcgaagaaatctttgtaaataagaactgcgatcatcacaaagaagcaacaagacgtgcatcatcgaccttagaagggaaaatggccccaactcgctaatatgatcactggaaccaagcttccgtcgagaaattcccagatact

SEQ ID NO: 43235 - DNA, 1755 bp, Cannabis sativa
aatatacattcataaggaaaaaaatatactcaagtttattctcgtaaaaattaattttaacaaaaattgaattttaatatgtattttttaatatctaaatgaattttttaataaaaatatataatttcttaaatcacttaattagttttaaaatattaatttattgtctaattttcttaatcatttaaaataattttttcttaagatctaatttttttttttgaagattttactaaaaaaaaatgttgaatcgatcttttttatttttattttgagggggtacaatttgatagcgttcaaagtttaggggacaaagttactaatttacatagacacaatagcatttaaacggaataataggacagaacctaacagaaggactaaatttctgtaaatgtacaagttcaggggggattcttaacaagtcttatatttaagggacaaaatcaagattgtcgaaagttcagggaaaaaaattactagttttatacataaaattaaataaaaagtacgacataaatattacattttcgttgcaaaactaaataatattagtacttttcatcatttgtcaaaaaagtaataataaaaatctcataagatattttaataaaataatgaaacttaatctttataactaatactagtatgttacactaattattagagtaaactatatttgataagaagaaaattattcatggctcttatttttttttttctcaatttttctagggtgtcgtttttcaagttattattaatattggttgtattttttgctgaaatattattaataaatatatatatatatatatcaacgcgagcacaagcggtttgggagccttaggtgaaaaattaaaattaaattttttattaaaaaaaaaaacaaaaaagattatcaatcaatacttattagaaccatttagtctgtttgactataggttcagttatccctgcttggttatatatttattcagttgaccataatgttcaacttacattttcattttctttgtaataaagaacttttctctgctctctttcctaagacggtatcagacgactcgtagaccacatttacttttttcggatcacctacacgcttcctgttgttctcctcggatcatcattgtcttcttcaccgaagtctatggcgcgcactcacagtggtcttcctccttaagctcccaggcgaccaccccggtccaatacttgtcactccaccactgttagataataatttttagcaatagcatagggatgtcaaccttgctcttggcgccaagaataaaactagtttcattgaaggtactcttctgcaaccaacgcctacaagtcctctgtttcattcttggatccattttacccaaatggtgatgtcttggaccatccactatgtttctcttgacatcaacataagtatcatgtttctcgacactactgcagatacgtggacgaagctcactaatcgattcagccaaggtaatggacctcgcctctttgagctcaatgaatctctcattgttctatgccaaggagatgactctgttacgacttacttcaccaaacttcgagcattgggacgagatcaacgagctgcaaccttgcattccttgcacttgtcaagcctctgctgacaacgtaaaattaaagaatcaagagaaggtccttcgtttcttgacagggctcaatgaatcttaccacattattgttacgaatattttaccaggatctagatttactaacaactatgtt

SEQ ID NO: 43236 - DNA, 4035 bp, Cannabis sativa
taatttctctaaaccattcggttatataggcacactatagatagatatacttattggataagcataatatacttaattattacgacttgaatttgatttaatgtacttaattaggcaagcaaaatatatcctttaattaataggaccaaattttatatgaagttaaataccacattatataataaggttaaattacttatctatgatgctatgaaaatgggagatacatatattacctaattgatagcaaatttcaactacatatataaatcaaattattcacttttatataacttaatttaaaataacatacgagccctccaatactagctagttttacaaaagaatatagaaaatgaaattgcttattgtatactcgtaaacagattatatatgtaattattattagtaccaatattagagtactataatatgtacataattgcttttgagaatgttgcttagattagcgttgtcttcttaatcaaataagggtacaaagtcattattataaaccaaacttgaatcaattttacataaaaagattaaataattaaaactaaagataaatataatttagatcgagcacatgcactccaccaatttttatttgaaaagaaacttcttcattttttttttggtttaattagtttgttttgaatcaatcaataattaaccataaaagaatacaattatcaaacacgcattcaacaacaataaaaatagataaacacaagaaccaaataatgaattaaagcaataaaataagtagggtcaagcttgggttaaagcaggttagatccgtgcttaggacctacccaacccagagcctaaaaaaatattttccatttgaaattatacatatattttagtaatttttaaaaataccacatattttttaaataaatgacccaataattttttttctcctaaggtccacccaatcttagggccggccttgaaaataaggagaagataacaccaaaattaacaaatttgagtcatgtgcaatgctctacatttcggttggaacaacatcagtcatatctttattgataattattcccaaggttagaagagtattacaaactatgatagagattacaagacgaactttctctctactatttacaactctctctatcttaccttacacaacagtgatttctctctcaagctctctctcaactgatgattttgaattacaaaagtgatagctataaataggcttttaatcagcggtaacttacttaactaacattgccttttaagtctccacgtcaactctagaacacgctctctgtaagtaaacaagcttcctgtaaggatgactcgaatgggtacaagctctcagaacgtgccagattgacgaaaaccactccgaaaggacgttctggactaatgacaagttattaggaatgaccatccagctagccacaagctttctagaaatagcttatccggaaggtcaccaagcttcccgtaactcctttttggagggacaactagcttttcagaactactttccaaaagagcgactaactttctagatatagctttctgaaagacgaaacttgtaaccataaccaaaaaatctccatcttggttgcaagttgaagttacttgacaaatcaatgttcgatggtgctattccctagccccttctggtctcaattaattcctatcccaatcaacttcaggcaatgctcaaatttactaacgggcactatcttattaatcatgtccgaaggattatcttcagtcgacactttggcaatcttcacagcttctttctccacaacttttgttctaaaatgaagctttatatctatgttcttggtacattcatggtgcacacaattcttggttaattgaattgcactttgattatcaatgaatagtaacaatcttctggttgggtttcaactcttccatcaacctagtaaactaaagtgcctccttgtttgattctaccaaggccatatactcagcttcagttgtcgatagcaccactacctgttgaaggtttactttccaactaattattgtaccacacatgttaaacacatagccagttcacgactttcttgtatcaatacacccttcataatcagagtccacataaccattgataacattcaagtcttcactctgtttattcatgtcaaacataaatcatttttcagcagatcccttcaagtacatcaagatccactttagagcctcccaatgctcttttccaaggtttcccatgaatttactcaccttgctaactgcatgatatacataatggagcatactgcactagcatacaaaacttttatcttaaagcatctgagtagcactcaatttgaagtgttgcgcaagtggagtgctttcggcctttgagttactcatttcaaaggtatccaaaacttttttaatgtaccttttttatttaggtacaatagcctctttctcatttttcgtctatatccatgcctaagattctacttgttggacccaaatcattcattttaaactccttcttcagttggagttttaagtgtttaatctctggcatactcttactggcaatcagaatgtcatctacatatagaacaaatatagtgtatctctatttctctctctaaaatatatgcagggatcaaaattacttctctttaaacctatcttggtcatataatcaccggatctcctatttcattgtctaggagattgtttcaaatcgtacaaggaatttcttaacaaacacaccacgtgtacctttccaacctcctcaaatccttcagcttatttcattagaattctttcttctagatgtccgtacagaaaagaagtttttatatctaattattctaactcaagatcttggcaaaccacaagtgccaacagaaatcttattgatatatgcttaacaagaggagaaattacctcattgcagtcgaccccttcatttgagagaaccttctagcaaccaaccttgttttatatcatgcctcttgtacactcgaaattccttctttctatttgtacaccaatttgcagccgatgaccttaccatcttatggcattggtaataaatcccaagtgtgattctttttgaggaatacatctcctccaacataactctattacattacttcctgtctctgcttttcattgcttgtgcatagctggtaagctcttcccaaatcccagccgccgtggtttctttggtgatcttcttcagaaccttatctccaatattcaatatgattacactataagctttgcaagaatctctttcttgtcttttcagacattgtctcataaagagcctttttctctaagcaacgctttatacaatcttcggtggactagcagggctctcatcttcattctctatagcccaaagtcatccgcactggtaaatttttccacatcgtattttgtggtagccattaatgtgaaccttgctctgaagctaatttgttgtgaatcaatcaatgtttaacgataaaaaacaccagatcaacaaacacgtattcaagaattatactaacagataaacaaaagaaccagataatgaattaaagtagtaaaacaaggaaaagataacaccaggatttaacgagtttgagccatgtgcaatgttctacatcttagttggaacagcagcaaccatatctttattgataattgcttcgaaagttacaaactctgatagaaattacatgacgaactttctctctgttgtttacaactctctctcattctctctctctctctatatatatataaccttacacaacaaatttctctctcaagctctctctcaactaatgattttggattacaagggtgacaacaataaataggcttatatcggcgctaaccgacttaactaacatcgcattttaagtctccacgttagctccagcaaaacgctcttcataagtaaacaagcattcggtacggacaatccagaatggtccatccaaacatgtacaagctttctgaacatgcgttctggattgatgacaagcagtcaaa

SEQ ID NO: 43237 - DNA, 2025 bp, Cannabis sativa
aaaaaaaaaaaaacaccacaaaaacaaaaaaaaaaaaaaaaaacccaaaggcaaaaataaaaaaaaaaaaaaaggaccattttgatcaaaaccagatataaagatctttaaagtagttaataacacagcttgaactttcatataagtatgattctataatctaaaaatatatatatatatcatctaacttctggataaacggcaagagaacggcgtctgttttcatcgtaaacatggcaaccttcgtcgaaattctgcgagtaactaacggcgtcgtaatgaaacgaaatgggcttgtgatgatgattcatggatccacacaaaccgatcttgttatttcttaccaatctccatagaaagcttctccaccgccagcctcttctccggccgccgtgtggagcggcgcagtagtggaggcgagagtactcgttttcttcacgtagcggaaaacaggtagacgatgccaaacagctagaaaagtacgacggccgcggtggaagacggcggctgagatccctctccataatctgatgggttatcactctctctatatatatatataataaagtgttgtttttcttttccaaagatatatataaatgggggaaaaaataaagtgaataaataagaggatgggttcatacccgtttctctctttatataggtaactaattacacctttctatccatttcaaggtcgtttaatatgtgggacatatttggtattcatattcttttctcacaaaacatattaggtcatattatgtaatatttacttgttttgtgtataagatgatatatgtatagagaggacaaaatatgatcacatgaccttgttccactaagatctaatgggaaagttaccactagtgctttttgtggggtacttttctctttatgaatatataatatatggatatatatatgtgttatgtattacactaattgattatgtggccaaattaatgatataattaataggttaatttaatttttaatttatactagttattttatgctttctgttgggttaatttggttgttaaattaattaatgtaacaaagatgtgttgtttatattgtacatatgtcaaaggcaaaatcatggttggtgcatgaggtcaaattttgataatgtatggagagaaggaagaatctctcaatcattatgattgattgaatatatatagaattggttgccatttgtttcaaaattaattgattgataatattatatggcatttttctttgtgtggcgtagtgtggtcgacacctatttgacatttcctttttcttttctttttttctttactgtaaataaacatttcaagaagaatctaaaccaaaaacataaatacaagttatcaaaattcagaaagaaaaaaaaaaagaatattgattttaaggaaattaaagtgaaaattataatacaaagtctttatggcgatttaaacaatgaaagtgcctttaattgtacaattaatttgattctatcaaatcagtgcatgtgtaatctcctccagctatagctttaactaaaagatagagatatatagattggagaaaaggatctaacgtaggcttattatacatacaaaaaaaaaactaaaaaaaaatgtaggcttatacataacttatatgggtattaattgtaataaaataattttttttcttttattttctttcaaatattatcataaagaacattataagttgtttgatgttaaaaaatttcacattacttaaaaaaaatagtaagcaaaaaatagctgctattttgaagaatattatataataatatatataaaattttaggattatttttctcattaccaattatttttaaaataaaatctcatacattttacaacattttataattttttatagtagtctcttttgacatcattgatcgttgaaaggaattatagtttttttatgaaagattaagcatatgtgtgagtttggtgcaactacacatctcaaaacagctatataacccccttttcaattattaaaaaagaa

SEQ ID NO: 43238 - DNA, 4318 bp, Cannabis sativa
aaaaaaaactttagatttatttgaaagttgggcttaaaatgcacctttgcccatttttttaagttgggccaaacattccttgttcaaacctcaaaccctaaaaatctaaaaaaataactgaaaaaatctcttctgcccatttctcgatcctttccttcccattttcgctctctagattcaaaactccgccgtcgtgttctctcgccggccgatcccgtctcctcctctgatccagcaccggctgctcctgctccacgtaatattcaatctcatcttcttccgtgagtttcattgtaaacactagatgttgctataaataatattcaatcgcaaactctctttctctcatcgttacttttgtactccatgcaattttttctttctctcttttcttacattcagtaaaagaatgagaaaaactgtagtgtgatatagagaattagtagtagtggaattgaagctttgtgcgttttgtgtaacactgatattttcattttttttttaaatagtagtttaattttcatttttgatttggtttgagcttatagaactaataggtttttggaaactgtttctaatttagtttataaatttgtagataaaggagattgtgatttttgaaaaggaaaaatgttaggaggaacggggccaatcttaccccttccggctcctccctcagatggaaatcttggaccacttccaccatctcagttgactgaagagcagcagaaggagagagagagggaggagcaagagcaggaggagctgaacaaatccaactcggttcctgcttcagttgcaacccatacaagaactattggaatcatacaccctcctccggatattcgaaacattgttgataaaacatcgcaattcgttgctaagaatggacctgaatttgagaaaaggattatagcaaacaatactgggaatgccaagttcaattttttgattccttcagatccttatcatgcttattaccagcataggttgtctgaattccgagcgcagaatcagtcatcgtcactgcaaccttcttcgcagcctgcagactctacaggaccagagtctgccacgccaactacggctgctgatggcgatgaaacagcagcgcagaagcctgatccgtcggctcagtttagacctgttcgtaaggttcttgagccaccagaagcggagcagtatactgttcgacttcctgaaggaattactggggaggaattggatattattaagctcacagcccagtttgttgctcgtaatgggaaatcgtttttgacaggattgactagtagggagattaataaccctcaattccattttttaaagcctactcatagtatgttcatgttttttacttcactagcagatgcatattcaaaagttttgatgcctcaaaagggcttgacagagaagcttaagaagagtgttgttgatatgaccactgtgctggaacgatgtgtgcacagactagagtgggaacggtcgcaagagcaggctagacaaaaagctgaggatgaaattgagcaggaaagaatacaaatggctatgatagattggcatgactttgttgttgttgagtcaattgactttgctgatgatgaggatgaggatttacctcctcctatgaccttggaggaggtcataaggagaagtaaggttacatctatggaagaggatattgttgagcccaacaaagaggtggaaatggaaatggatgaggaggagatgcaacttgttgaggagggcatgaaactgactagacttgatgagaatgatgaagagaagaggaatgagatgaaggtgtctgaggaaccagaaccaccaatgagaattgttaagaattggaagaggcctgaggataggattcctgctgaaagagacccaacaaagtttgttgtttctccaatcactggtgaattaattcctattaatgagatgtctgaacacatgaggatttctctcattgatcccaagttcaaagagcaaaaggagaggatgtttgctaagattagggagactactttggctcaggatgatgagatatccaaaaacattgttgggcttgcacgtactcgtcctgatatattcggtaccacagaggaagaagtctccaatgccgtgaaggctgagattgaaaagaaaaaagatgaacaaccaaagcaggtcatatgggatggtcacactggaagcattggacgaactgcaaaccaagctatgtcacaaaatcttaatggagaggatcaaaatgatgctgctaacaatgactacaggaccctacctggtcctgctgctcctcctcctaaatttggtcaacctttacttcgtcctcttccaccaccacctggattagctttgaatatgcctcggatgccttcaaacacaattcaatatccacctcaaaatagtggactacccgtacctcaacaaagacccccaggtatgcaaatgatgcaacggccaccaatgccacaaatgccacaaatgaccatgaattctggacaacagacctatatgatgaaccgaccacactcaatgcctccaccaatgtctttaggtggaccaaatatgtctataccacctcctcctggttctcagtacaaccccctatcagttccccgaggttatgctccagttcctggaccgccaccttcaatgcctcatggaatgcctccgccacctttgcctcacggaatgcctccaccaccacctgaggaagctcctccaccacttccagaagaaccagagccgaagaggcaaaagcatgacgactctttgcttgttccagaagatcagtttttggctcaacatccggtattgtttcttgtgttaataccttcgacagctaaatttttctggcatctgatgtctaatcaaatacatgatttctattttttatttgttttctgactgagatttgtatgtgtggcagggacctgttcgcatttctatttctgttcctaatgtcgatgaaggaaatcttaagggtcaacttgtggagatcacagtacagtctctatctgaaactgtggggagtctgaaggagaaaatcgcgggggagatccagcttcctgcaaacaaacagaaactgagtggaaagcctggttttctcaaggacaatctgtcacttgcccattacaatgttggagcaggcgaaacacttgctctttctcttagagagcgtggtggtagaaagagatgatcagattctttgaacatgccatttgaggtttttgctggaattttcttgataccttgaaaaatatgctatacattgattgttgaatcccttattgactttctttgatggaagattagtatatgttagagatgtaccatgaggaagttttttgaattttattctcatctttaactgatgatagagtgctatctaatacagatcaagcagggtgtctcttacagggcaatgggaagtacacacaagtatcttcggttcttgacagagctaattcgtctacctttagtactttcccttgtgcagttttcttggccaatttttatgttccctatatttgtataacggctgtgataattttgaaagcattcttcagttcttggtgttatgaaaacctttaaagtttctattcatttactgtttatgtttcttgttgacactttgttcctgtttacttatttaaaggaacgttttgccagatttttaattttatttttgtaggaaagcttgctcattctggactgggtggactggtgggtcacagtttggttcattttgagcgtcgaaacagtcggtgtgtgtgtttcggccagtgcttaaatcttatatctgaaaagcctaagttaaccttcagctagttttcttttgtttctggtctctactagagtttggtgttgcctgattatatgttgttttgcaactacagaaagctactactactcttggaatggtctcacagagagacctgtgttgaaactttgggtttgtgtctttctctaattttctcacacaggtaggatagtcctctacacaaaaaaaaaatgaaaataaaaatgtgttgatccttaatacttatttgtaactccaatggtagtcatttaaatctttgcccttttcttttttttttcttttcttttgaacagtgatgtggttggagtctcatgtggggagccagcaggaacttttagctctttgtattttttttttgtcaggactaacagaagtaaattttgttaatttttgaaaaatggatattttaaagacgatttctatatgactacttaagaattaattgcgtcttctgttctaaaattcataataagaagttattgaaagttcttt

SEQ ID NO: 43239 - DNA, 3466 bp, Cannabis sativa
agtagctatatcctgttgcactttagttgatttttgttatattgtgtgactagtttactcgtcatttcagtcatactaatgtcagagagtattcctcttaccaggtgcttttgttcaaaaaaatatattggagccatctgaaaatgcaagtaaagatcaggtattttcaggaacggggagatttgttcccagtgagaaggtaatggaattgagaaacaaactgattaagtttatggaagatcacatataccccatggaaaatgaattctacagactagctcagtctggttcacgttggactgttcatccagaggaagagaggttaaaggaactggcaaagaaagcaggactttggaacttatggatacctgtatgtgcttcagtcctgctactaaatcaaacatttcttgttttattcttctttctattatttaattatacatgtattttcagtatgctaccctgccgcctcctcttaatgatctttctactcaagtgtatgttgtctcaagtcatttcttgttatgcagtttgacagtgcagaaagagcgaaaaaactgatttttggtggaagcaattatcattcctctggtggtacattcaatcagttactgggagaaggcctttcaaaccttgaatacggatacctttgtgagatcatgggccgttctgtttgggcgccacaaatattcaattgtggagctcctgacacaggaaatatggaggtgagatgaaactttaagttgtcaactaaattttttatttaattaatctgacaaggtcattttcatggaactggctccgagtggttcaatttttatgattgtttttattgttgtcaattttatttgtgtaagagaaatttgtggaatgcagaatgtaatgatacattattaatgtttgaaattctcttatcaaatagattgactgtatgttgttattattatgtaatatatagagtttaggtctactttgaattttcaaaactattttgtagtagattttgaattgcctcaatgaagttgattgtatgagttacattttgtttaattttcgtgtcaccattttctttcttctctccattctctgcatttctatatctttcttctttctcttctcttccttttaggacaatctttgtgttttgggtgttcatgaagataaagaacaacagcttaaaacttttttttttttgtaagaaaagctttatggaaggtcattgacttgataacaactttccattttaggtattactgagatacggaaataaagaacaacagcttgaatggcttattcctttgcttgaggggaaaattcgatcagggtttgcaatgacagaaccaaaagttgcgtcttctgatgcaactaacattgagtgttctattaaaaggtgagtctactcagacatttgtaaagggagtttccacttcacatgttgctaacacgagttctctcatcattgattgttcgagatcattaggttcaataataaagtcttcctttaatgaaattgagtttcttttctaactctgaaatgcttttgttcgctttcgtttcactaaaaaatagctgtatgtttccataaaatagacagtattattttatctttattattactcggaattgttatttgtggatgtccatgatcattataggtagcatatgttgcttccgtggagtttatgctaatcatgtttattgctgctgtgaacatgtgcagacaaggagattcgtatgtcatcaatgggactaaatggtggacaagtggtgccatggatccaaggtgcagacttcttatagttatggttagttcttctggtgttgtatgggactgtatttttattttgataatatattatatgtctgctgtatgtgatgggagtaacatttctatttggcattgtattatgcaactactttacagggaaagactgacttcaatgcagccaatcataagcagcaatctatgatcttagttgatattaagactcccggtgtgcatgtaaagagaccgctgatggtttttggctttgacgatgcacctcatggacatgcagaagtatcatttgagaatgtacgtgtcccagcaaaaaatattttattgggagaagggcgtggatttgaaattgcccaggtataattcattgtcttttgttgaaaatctagatctttatttggtatttggatgatttgaaatcacatttaagttgtgttgtaatttttaatcttgcagggtaggttgggccctggaaggttgcatcattgcatgaggctgataggctctgctgagcgtggaatgcaactgatggctcaaagggctcttagtagaactgtcttcgggaagttgattgccgagcaaggttcttttctttcagatttggcaaaggtatgttgctttagtaccttgtagtaggtaatagcgggaatgggatttttgttcttacatttgattaaatcagtgaagtgctcatcaacttccttcatgttcataatcaacttaagtttatactgcctatttgttatataatgatgatattcttttttgtgtcgtgtttctgtcatatagtgtcggatagagctggagaaagctagattattggttttcgaagcagctaaccagcttgatatacttggaaataagagagctcgagggaccatagcaatggccaaggtaaattattttttctgtatacccccttgttttcggctgcacagataaagcaccgggatttgattttgtttattggcggtttcatggtttatggtgcaggttgcagccccgaacatggcgctgaaggtgcttgacatggcaatgcaagtacatggtgctgcggggttatcttcagacactgttctgtcacatctttgggccacggccagaacactgcgtattgcagatggtccagatgaagttcatttgggtactattgccaagttagaactgaggaaggctaagctttgagatctttgtattgactgtttcaataaaagggtttttcctttttgtgctaaacagaggaggaataatctgagtatagtatttatgttacattgggggtgagggaggataactaaaagaaaagaggaaaaataacgtctactttaaacttatactgacactgtattatcgaactgaaaataaatatagcgctcatatattcttattttattgtaagatgttaaaatctgaagccaatttggtttgccgtttgatttgccgggttatattgtattatatagtattgtgtttgattacattgttttgtatacttattttaatataatactatgattggtattgacttatattaatagattattataaacttgatttagaacccatttggttttggatcccagtcttcggacccgtaccttgactctagcctcggactctagaccttggatgtgaactgagtcctagacaaatccttgactttggatcttgactctagccttgacccca

SEQ ID NO: 43240 - DNA, 2269 bp, Cannabis sativa
aatataaatatcattttaattagcggtttctataataacatgaatcatcatatatatataagtttaaaaaccgcgcgaagcgcggttccgttctctagttttaatcataattatgtgtcttacaattacaaatgttatacattagtgtaatataattgatgattgcattttgttgaaatactatatttaattttcaaataaaattaaaatgaaaataattatcattcaaattcaaataataaatttgcttgagtataattaggatactaataaaaatttaaattataaaacaacctaaccgattttttaacaattttaagatctttatcaaacaaaaatataatctctcaataatagggatttcgttgaacatattaatttaaatttacattaaagcaatataactaatttttaaattcaaataatttaaaatttaattaagcaaaatataatgtcacaagattttgtggagtatatttaggataataatttaaattaaaattaacacaatataacttattgtcaaatttaaacaattttaaaaattacttaataagtaaaagttaatgtcataataatagagatttggttgaacaagataactaatttttcaaatttaaacattttcaaaaattaatagtagataatatcacaataataggaatttagttgaaataataataaatatcttaacatcaaatattaaaaaataaaagttataactttaacatgcattaacgcatgggataccatgcaagagcaccttttaatcatatttagtaattaatgatcatgtaaccattattagttttgagcaaaatatccgcttaaccacgaaacttgtagtacttacattgcattgcactacactggttaattttatttgtggttcggttgtggttaatttttctactatatatcgttgcagcagtgcggttaagcaaaacaaatattaaaaaactgtaatattcgcaccacaccatatatattaatcttttatataaaaataatatttaaaataagtgtcatatttattatttacaatatattgaattttacttaaataaaagcttattgaaactttttatattttattttgtaccctgaaaaagtgtgggccctaagcacaggtctagcccgcctataggcccgtgcttagggcttgccctgcatgcggctaaacatgcttggtaggctgatcgattttatttcgccaggtgaactctattattctagcaaatagatttggattttgtttttttagccccaaactcaccacgaattgggaaactaattataattatgtgtcatacaattataaatgctatctattagtgtaatataaaattgaatgattgtattttttttaatatcttaaaatatatcaagatattttaatttttaaataaaaataaaattaaaattaaaataattcatttaaatttaaataataaggtttggttaagtataattaggatactaataaaaatttaaattaaaccaatttttcacttcaaacaattttaagatcttaatcaaatataaaataatctcataattatagggatttggttgaggatattaatttaaatttatattaaagcaatataactaatttttaaatttaaataatttaaaaatgaattaaataaaatgtaatgtcacaagattttgtggggtataattagaataataatttaaatcaaaattaaaacaatttaacttattgttgaatttaaacaattttaaaattcactaaacaaaagttaatgtcacatagagatttggttgatcaagataattaatttttaaatttaaacattttcaaaaattaataaaataaaagataatatcacaataatagggatttagttgaaatactaataaatatcttattaaattatttaatttagtctaattaattgattaaaactaaaattattgccaccacaccatatataaaatattagtcttttatatattatcatagattaacaaaatttgtttcatgtaaaataatgtttaatgctaataatgatgacgatggctttcttttgatctttatttctcgatagggcaaaagatttttatgagtatgtttatggattttttttttatgtttttctttaatatacaaaattagcaatttaaccattgttaaccacattattttgcgccatacatatgtgaaatgttgtttgcggttaaggaatataaaattaatcatgcgattaagattttcatttaaccgcactttgcgggctagatt

SEQ ID NO: 43241 - DNA, 1462 bp, Cannabis sativa
aaaataacttttaaaaaatatcaaattataaaataacacttataaaaatattagaaatgatgtatactcaatagcaatgctattataaaaaatcgctaggcccttcataattgtgtttgggggtggttgcaatggtgtaattttatcatttatcttcttttcttctttaacacgatcgatggagagaaaattattattgcagtagtcgtctcgtctgccctccactttgactttgggtcattactatagtcagtagtcctttactcttttgaaacctaacaacactgataagtcattaatgcaaaatatttcaaattaaagttgctttggcctaatctagtcatcatgggtaatttaaactccactaatttatgatgtctttgattttatacttaatgtagttggtttgacaattgctcagcttaatgggtctactaattgggttgtaattacaaaatatcccttttcatttcattgaaatatgtagatctatgcccatctatttaaagctaataattcacttaaaaaaaattatgccaataattcatttaatttattatatatatatatataagaaaatcatccttacattaagttttgaattttgaaatggttttgtccttttcttattataaaaaaaataaatacatttaatgagttgatttctgataattaacaagtattaaattaatcgaattacgatccaacaattagggaaataatcagaatgcattttctcataagataaaatccactccaacatatattaaatggggcaaatttggtcatatatgtaagacttattaccagaatatggggagtgttcggtattttttgtcctaattaaaacaagttgcatctttttcactcaaacgggcttcaagggttgcatctagaactaaattctactacctttatatttttatttatttatattttcagagagaaaaaaaagggcatatgctaattggagtttttttagccatggacctatggtatattggtataattacataatttatacttactttgattatttgttctcaacatatttaatatgattattgaaactaataataaatttataaaaacaactaaatactcaaaattaattagttccctgtaatgccaaaaaaaaaaaaaaaacacgtagtaatcaggaccggtcttaaggtatatgagacttaaagcaacattaaattttaggggcatatatatagtttaattattggggtttttataaaaatattgaattttgggtaatacttttcaattttactatcacacgacagaaattacatttatactgtcctctcccccccgcccccctttttacttcttttatactgtaaacaacaacaacaaaaaaaactgcgaggcctccatcttccccacccacatacagaaccaccacggtccacggcaacaccaggatagctggaaaacaaccattaattccgac

SEQ ID NO: 43242 - DNA, 3198 bp, Cannabis sativa
tatttatgagaaatgctaaaaggcccactgctggtgcctaacacttttctggggtttatatcgttattgttgtaattaagtatcaagtctcatataatttaatttaataacttttaaagagcatcactaactaattgtagggtgatacctctagatgatactagacatcactgaagcttaataacaatgctcttcatttatatatttaatagaatttttatacacttttaatcaaaatttaatgtatttattgacttctttatacatttttatcaaaaataaagttgatttattcctaatgcatcagagtacaattgtaaaatttcagttaaatataacattgactcatttctgagttaaatttagtataaattttataccgactattagagatgatccaaaaagctattagttatattaatgagtcacaaaatagtaaataaaagtgatatatattgtagtgtaaaatttaactcatgctatattttgtgtcaattttgacacaatttttagcgtgttaaatttagattatttttacactactattataattgtatgatcatatactaatgtatatatatatatatatatatatactatattatagcactacattgaaaatacttttatgtgccaaatttaatcacattatacactactattaaaatttaattttcatgggctaaaaaaatgcatgtacgacacatttatatgagtccattagagatgttaactaacaatttttgcttttaaatgactatgaagagcacaagttcaaattttaattaattttgattgatatgttactgaatattattataaatatattgcttttttttaaacaatttttttttttctaaactaaatatattgaaacttgaattgcatatgtctcatatgagggccactagtaattaattttgccaataattgggtccacgtagaataaattgaaagcgaaaaacctctacacatatacaactttattttttggtcccaacatcttagttaaacaacattaaatatggaaaatggacccttcctttatttttttcttttttttttttcaaaagaaggaaaaaaaatagtatggaatcatagagttataaatgtacattaaaaatttactgcatacccatttaagaagacattattgcttaggctgacatgttcacgagtccagcaaatcatagataaataagaagaagagattgaaccattgaaatagtttcgaaaacttatgtctttatccctaaagatgatgagtagtaattaatatgccaagaaataaataataataattgagttgtattatatgtaccctttaaaaaagcatattcaatgtgaaattgtattgtcccagaaaagaaaagaaaagaaaaacataaatttgcataggaatttaaaagttgttcttctttattgattgtttttttttttcacttggtaatttattttcttcactccattggcaatagtatacaactttacatgctttaattttctactaaagttagaaagaaaaacaataaataaataaaaaataatggatgctaagctagttagctaagttataacaagtaagtcaaaaatagaatcactgtgcccccacatagcaaaaggtattaatatcaagagattggatcaaccccattttctcattacttcattcatattcttataacatatatagagttaaaacaaataaagatatagaaaatgatagtgactttacaatagtaatgtctccaaatatctgacaccacatccacatgtagttttgagaatggtaaaaaatgaaattaaaaaaaaccccatgatatttgtatacatttaaataggaaaaagaaaaaagaagtatgggtttttttttataggtaaattgtttagttttttttttttaaggctttggtcctacaaagatagggaaacccgtgattatattcatagtacatattattgagtacccctcttggttctgatcttgatgatttaagtgttagccaaaaaagtttaatttgtgaccaagtcttacaatttcatggatttagtaattattgttcaattctttgtgtgtaaaaaaatttggattttaccacatttacttcttgttttagataaactataagttgtttatcattggaaagaagtagcttgtaaaaaatatgtggtgaaaagtgagctgagtgtgcttggtaaagaattgagaaaatgtttcaccatgaagtgaataagtaaataaatatatatagtttagaattttacagtagagaaagttgaaaaactgaatttatcaagattggtattgttgttcctttaaaggaatgaaatgaattaagttgtggtgattctcgtgaacaataataatttgagaaagtattgagtggctctcgcaatggcctacctcttaaaccagtccaaaacccattcaatcacatttttaacctattacatcaacaaccttattttgtatctaaaataacaatggtggtgaatttgatcatctcttgtgtagattcaaataaaataaggtgaaattttatggtgcactcctttttcgttttccacatctacataattttaatttttttttatatgaccatggacaatataggttatttaagttatcttgtaaatttttaagaaatttaaaaaaattaaacgtgcggaaaaaaaaattaaacagttttttgcacgttcgtttcttttattttatacacgtgtaaaataaatcgtttgagaattagtttttataagcccgtttatacttatttgataaatatgggtctgccattttataaaaaataagttggcccgtttaggtccggtatggatccggcccaacataaatagtctgtacttatggctgggttggacttactttgaaagtatgggccaagcccaacccaacccgtttcataaaatgagtcaggtcaaactcacataaaaaagtaaacttttataaaaacgggttggattggatcgagccgccaaatgtacaactttagggtgaagtattacattttataaggttaaggtagcttagccaccaattactcgatatttatctataactacatataaagtaaatatattttagccaaaataaatacaaatttagatatttcagttgtaatttttattatttaatattttgaagacaaacacaagttttactattcaatttttatgtagatt

SEQ ID NO: 43243 - DNA, 3271 bp, Cannabis sativa
ggagaatttttaacgacaaaaaaagttcaggagacatgatttagtacatatcaaagttcaaggaaaaaaattgctaattagcctaaaaattattaaaaccgctaaccaattaacaatcttatgaacagaaatattattattagtgcaatttaatatctaatctaatctcacttattttactttaataaaaattataaaaatggctaacacattatagtctcacctcataggctcgtaacaatgctctttaagaataaaagaatgggaataaacctagcaaaaaaaaagcaaatgggaacgacaagccaccttaaacgcgaaaacaaaaacatcgaaagactgaaataactgaacaatatgtagaaaattatgatgtttcttccagtgtaacttctgatggtcatgttatatagaaatcaaatcaaacagtccaatgaaaaacacaaataagcattttccttttaactatgttttcaagtgaattcattcaagattgaaaacattgccccttgagtggctggccgatcttatgaaaagtgatgtttcacaaaaagcatgagtaccatgaaataaacacaagagcataatgacttcaggcaatgcactaactattcaacaaaccacaccatgaaggcaggagaattcgtgagggtaacatgaccaattgtgtacttacgaattgtgaatacaacttgttgtggtcaactgtgaaaaagcttgaaatatagaatcaagaagattacaaaaataagagctccaatgactgagcctataatccatttgtgtttggtcatcctccgggacattgcagttaaaacttttttactcttgtcaatggcatcatcaactccatgaagctgcaacaaaaacataaacaagttcagcatcacaaaccaatgctgttaatgagtcaggatcctaaaggaataatctcccaagtttcacacaaaacagtaaactacagatcaagtccaagtgacagtggattgtaaggaaaaaaatctcgtagtgtgcatactttattatgagaatgcagaagagtttcacgttgttgatgcaaatcttggagaattgagatgccaagctcttcagtctccaatatggtccttctgctctccataattctgtcactcgactcatttaacctctccactgacattgccattctctccctatgttcagcagaagcctgcacgagttgttgataaagacaaagatcaactaaacaagaaaaccggattcgtctaactcatatcgttaacatgtcaatattgatgttgtaaacagaaataatagaggcctgctatttgtacagagttctaatcaactttagaagatcaatagaacaataaaatgatataccgaaaactgtctaatctctctcatatccatgagatactttagactatgcatgtctgtgataggatgtaatgtagtaatcaaagagttgtgtgcttgcgtaccaagaagctatagaaataactagtaacaaattctactgataaatactaggaaccctagtaggcaggaaaagttcaagtgctcaagtgtgaagcgcaatgccaactttattttgaatggtatgccaggcggaagaaccaaatgctgaacaacaaagctaaatttctcaaaaagagattatagtgataatgaagcagagattaaagcggagaacacatcaaacatacacaaaactcattgatcaagatggcgtagaggaaagcatcagagaacaaatgacaacagcatatcaaacaacacaacataaaatcaagggagtaacactaaacaagacaatttgttgattcaaagaaataccgaatgaacatctgcatttccagactctaacagctcttcccgggaagcctgattagcattaggtgatgttactctcttgaattctcttttcaactgattcaaatcagatttatattcccttaatttagcaagaagtacagctttcacgctcggttgcaaacttcttgcttccaagtccattttccgaatctaacaaaaagacaaggatcaaaagctagatcaaaaaccgctcaaagctgagagaatcattaccaaaatgaaaaaaggcagaagccaagatcaccagaacatcggcatcatctataccagctttaacctcaacaaacttctgctgcttctgctctgcaagtcgtatttatcaattagaagaacaataaaaacaaagtgtgatcattactctaccaaataaaaccctaattgcaaaattcaaccctttgttgacccaaaaactttacatcgaaatcgaacgaaattttcattaaaatatatatgtatataataaaaactaaaaaatcattgaaacgctaaaagaatatatattgaatatgctattaccatgatcagaaagagcagcagctgaattacatttcctagaaagattagcggagagctcacaatactgacgctcgtaaccttcgaagacctcgctcatcttcagtgtacccaatctaaaaaagggactcttactttgattattcaattggcgtcagaaaatcccaattttgatttgccgtacggagaagatcggaaggagtaggatctgggacgatatgcgatctgtgactctgtgaggatgggtggatactggacagttggagaaggtaagggagaattggaactgacaaaactgtacggttgccaaatggatgaaatgagcgtccggttcgggtacttggattctattttaccaccaaaacggttcgggtacttggaaaaaaaaaaatacatataatacttaagtttaatacctattacaaataaatatttaagtttaacttttaatggtattaatatttaagttatatttttaaaacttgcatatgtagctaagtgttaagtgttaagtcattattcatatatcttttttttttattagtatatttaaaattataatacataaaaaataaaaatttaataatttggactaatcaagtactattatatgatcattgacttgatatttaacagtcagttatttacgaaagtttcaaaaatataatttaagtactattattttttaaaaattaaacttacgaatatatctctaaatgagagttaaacttaggcaccgcaaattacttctatttattcaatttttttaacaaatatttcattaaattataataacaataggctaattagcaaattttcccctcgaactttgacatatactaaattattcccctgaacttttttggcagttaaaaatttcccttgaactattgagattgat

SEQ ID NO: 43244 - DNA, 1623 bp, Cannabis sativa
tcaggagtaactatagacagaaattaatggattcacgtaaatgctcaactattttaatccaaacgtctaattacactaaatgtgtcacagcagcatatataaaacaaaaaggacctgttcttccattgctaactgcagacgcatttactgtaatgggtgttgatgcggggatgtgtctctcagcctgagcaagtagtgatcttgcttcatctctttctttctttagtcttgcaatcacacggcatgcagcatcatgctgccaccaatgacaaataaacaacaaattaggcatatcaacatcaattttactagcctggaaaggttttgggaagaaaaattaaataagtaaagttcaatcagaaacaaatatttaagataaataaaaataaatagaaaaaatatgtaaagtgacttgtaaaatagaaacattaaagttagatccctcttcacaatatcatgatccattgacaaataattgaaatgattggccaaaccgtagcattgaaatattagtagagaagatatccaaacaaaacaaaataaaacataaagaataaatatgatctgaatcaagaaacataacagaaaggaaaaataaaagcccatagcaaatgagaatgaaaaattcaattgcctaatcaatttaactcaaacaatacctggtacaaagcatgactcaactcctgtcgtgcagtatggagctgttgttccaatgcaaaattggatagcatcaaactatcccattcctattctcattgaaaatgggagttatacattaggagcatgaatttgatacaagatatacaataggagtgtcgccttatttccttaaaaaaaatgaagaaaaaagaaatcatgcatcaatatcataggctgcatgacaatcataaaattaaaagggcatagaaaataattaactgatacggaaactgattgggatatgaatttcagccattactcgagatttattatcaaaattattttcaactaacttattggaagtgaactcaatttcttcagagtatgacaccgataattgagttcggttcttccagtacttgcctatcatcctatctcatagcctcttgcttggccatagaaagtctttaagattaactagcccatctataaaccatgcatctataatctaatttattatgcaaagccaaagttaatggactgtttaacaatattcagcatctgcctgcaaaagcacaaaatcctattaccatccaaaaattatagcaagcctgtcaataacttcctaggccagccccatgataacgctgttatttcccaatcattgataaattgatgaatattaatagtagctataacaaagtgctgaaacgcattaccagttcagctctatatcatgagaactatcaaaatgtcaactgtgcaattgcttcacgagatagaacattaagtgtgagaagcaaaaaaatctaaatgacataggttctcattgcacatcatgatccatgtccaatccataataactatccagtataaatatagattgtaaagcccccatttacaaagatagagaagatacacagaacagaagtctgattttctatttgactagaagcacaaaatatatagcatattccactattt

SEQ ID NO: 43245 - DNA, 2167 bp, Cannabis sativa
ttgtagggcacaaaacccaacatacccctaggctggctggcctattcatggaattagggttcctggccagcctttaaattgggtcttggggtctggccgaccactaggacccataaacatagccggccaaggccaaggctccaattgggcagctagtttttctccctctatttacctaagctagggtcttacgacggccttagaggaatatacaactattgccttatgtgttgtttctcttggaaactctgcataaggctaggtagtgagtcccttatagtcaattatgcaacttaggacttactatgtgtcttagtaagtgtactgaagacggtacttggtcgttcatcaaccatgtacattgtgttttacctagaaggtacccttgtgtactattgacttgaatgtgtttgtagctttgttaggttggtcaactccccttatttcttccgtggaggtagtatgctagggtgcctccatatgaccctcacgtggccagggtggccacaaggggccgagttaggatggtggaggagaccgctcagccctgctgatgttgagcgagagattgaccaaggggctgagagttctaatgtaaaatctgatctagagaaggctactccgtgaagacgaggtggtatatgacttgttctatcctccaacatggtcccttgggttgctatgacgccaatggtaggccattgaacaagctcagtgaacctttcgagctttgactggatcatgtcttagaggagtcttctaagccaaggatactagatgcgagatcaaagggagacagttgggtctccgccgcttctactcttttggatgaggtctttagcgagattcttgctagtggcttagtaggggatctccactacaagattccccgtaggaattgttaggcacataggctccctttggattgattggtgtggtatgagtgcaatattaagcatggggcggtgaaagaacttcatcaatatttttgggacatcgctgcttactttgggatgttcccgacacagatcagtactactttgatctgaagtctatgcagaagcagaaaagaacaagatatttttatttcagtcagatcggtctccaatggttgggtgacactaattacacaagcacgtcgaaggtcagtgggtacgccaaaaagtattttattgcctacggcctctgtaggatcaagcactgagaattttggcatgtgccattcttgagatgttgtatctctactttgcagataagggatagggaaaactatatcatatctcttttaacagagcaaagaaatataatctggttgactagtgtggacaatttatgaatgtatgacttatatcctactactccaaaagttgtaggagcgctagctgcagatggggtctgccctggagatgggcaagctcctaacttggatgatgataacgtacctttatcctatattgcagaaaatctagagaagaaagaaagggctctctgccaatgtttggcaagagggggtccagtatgtgatgcttctctccgtattaggcctagaggctaggcttttgagagacgtacccaccccgtgctcacatcaaggagcaagggcaaggctatcgttgaggactctgatagttcctcttttgatgaagatggtatttaatagctgataacaccatgcttttttcttgtattgaatgtttatgattgcaatctgactttgctctttctttttgtagttatgtcttctaggttgaggggtcttactgggggacattcagatgagcccatatggcgagtgagggccaaggtggccaagacttttagtggtggagatcttgtcaggtgttcattgcctccctttctgctaggcctgcatcaactaggcagcttgtgattcagcctgtaggcctgaatactcagaggcctagtagaggagcggggtcagttgctgggtagggggctactaaggcagtcaacaggcacattgagcgagctatcccctttatggatgaggatctaaagcagcttgcaacagtgagtcaaataggctttactctactgttgttcaggatctttctctggtaagttgtacttttagctctattgatcttttttggcactgcataggccggctggccaagaggtatgttgcatgtgtctggctggcctt

SEQ ID NO: 43246 - DNA, 2693 bp, Cannabis sativa
tcctttcaaagttaaaaattgggctgatggattacattaaacgtgtataggaagctgtagtgttcatgttgaggtgcatgaatgacgatgtcttggaaaaggaaaagaatggtgacagctctttaaagaattctgaaactttcaagaagcattatgctgctgtactcttgcaattcgacgaagtcaataaacaggcaagaatttccatgaactgttttgatttcaacccttttcttgtatcatgtgcctttttttttcttctttgagacattactcaagctgtttcctgtcatatgcaggtttcttctgctctacttgcattgagaaaacgcaatacatatagtggattctctcctttggctagtttaaatgaccctgatggtcgcttaagctccgcggatttttgctcacacaatatccaagaatgtgggtctcaggtagctgaaattattgacacttcaaaaatgaaggccagaaaaattgctggtaaagcgatgcaggtattgagaatttaacaaatgcatagccttttcattttacatggtatctgcaagtcatatacagtgctaatcatgcatttcctctttcttgatgaaattttttgtttaatatagttacttttacaaatgatcaaatctttaaaccatacaatagacttcaagccatcattaatcctaatgttgaagcttgttggagctcggtatatctttgtgatataagcacgtatgttcatgttctatattgtatactcgggctaaagaatgagtcactactaaagtaaatgcgctagtttataatgagtaaacagtggcggaactaggtgaacttatttggaggggtcaaattatttgcataatatataatttttgtatatgtatctatattttttataaagaaatctttttttggaggggggcaaggctactacttggcccttcatagttcctccagtgagtaactctacgctgatttctaccgaaccacatgtctgacagtaccagtggatcaattaggttatttgtcctgataactgttagctgcttaattttcccacatttaagtttattactgtttcaggtaatgtcttctttggaaaagatgggaaaaagcttcaagagttcagaggaggctgtagtgttcgtacaaaatcaactttcggatgaggatttagaattagacatgccatccacgagatcttctacaacctacagagataaagctaaggttcatctcgaacagtctccagcaacatcaacaccttcggcaacttgtcatgctcttgatccttcagaactcattatatcctgtttagctaccatactcatggtgaaggtataaatacagatctttctcattatattgatatagaagctttttatggaaagttcaagttccaactctagttgatgattttgattttggttgacctttgtaaacaaaatgcagagatgcacagaacggccaatcccaccggctgaaattgcccgggtgctagactatgccctcacaactgtgcaaccgcgttgttcacagaaccgttttgcttatgaggaaatacagatgttaatgggcattattagaactaagatatttgcacttgtgcctacataagtcgtgctaaattcccctattatttttctatctgcaccatataacataattactactaggtttactgcagcaattatttgtttcttcccttttcttctaatgttttctaataatgttgtacagtatattagtgccagtatataagaataagttgagttaacagttttaccacgctttgatgttatttttattgcattgtataactaaattcatcaatagttaaacaagaaagttgtttaaaaacaaagctaaaaggccataattctaaatcaaactgtcaaataacattattatgagggctgtttccttacatgatagctcctaattctcaattgagaaaaaactctccagtgaagctattcgtcgaaattcacccaataaaattagacttttatatgatactataaacccaataattccaatcaaaatttaaacttcttcttgggtttttttatcaccttacacgcttgatccaccacctgccacacaatagatttgggttgaaaagatccaaaagttaagcaaacaaaagtgaattaaaaaagaaaaagaaaatacaattagtattaagttactcaccttctcctttttgtttttgttttttctcttctttttctttttcttttgtttctttggttcagaactctcttcttccaaacaatcctacatattatgtaacttttcattattaaataaaacacaacacttttaacagctactcagttacaagagctactcagttagaagatgaaagtaaaaaagcacctcagtctcagtgtcaccaaatgaatctacatgtttaataattcttcctgagcttgaagtacctgatttcatagataaggggacaaaaagaagaaatattaagcttatcaatataggtccttaattgacacattaaggaagtaaacagaggatttataaagaaatttaatgataggttacttcttcaattcactgaacccattaatatatatatataaatatacttatattctcacttaaaagtcatgccaaaatgagggtaaagtatttttttttttttacttgtgtataataataagaaaaaagttctaataaag

SEQ ID NO: 43247 - DNA, 3597 bp, Cannabis sativa
  modified_base (39)..(43): a, c, t, g, unknown or other
caccatgaatagcacatagcaaagcagcgcccaagaccnnnnnaactctcatcatatgaaatgggttcaatatccaattatgaaacccttcgaaaaagaggatgaatcgaaatatacctgctacactaaaactaggcgcaaagaaccaaccaaactgacctagcagataaattaggaatacaaaaacaaaaacaacaattagactggagaatgcgattgcattataaggtcacaattgaacagatcaagcaagttcacattaacgttttcgccaatattctcgccgagagattaagaacataaatcagtagcccaaacaagatgtccaaataagaacatccacgcccaggccgataaattctaactattattggtgcctttaaatatttctcaattcatagtacactttttaaaaagggtgttttcttatatctttctcgttatttatatgagtttttttttttatttgttatagtgtgtacatattatagttatttttaaaattttattttatttaaataatttatagtactataaataagttcaaataattatttactatatgtataaaaaaaataatcacacgtacaataaaatgtttaaatatttttttttagcactataaactatttaaaattttatgaaaattttgagtaatctgaaatactatcatgtacatgatcatgaaaataaattttaatataaataataagatatctttttttctttaaaaaactaaaatatcgtgtttcctagtgctattaatataagatatatttgcagtaaaacttccttaatatttgtaattattatacatatgaccctaataaaaaaaagtagcaaaatacattaatatcttacaattttgttgcaatcatactcttttaaaagttaagggccaactcagaaatacgtaattcaataatatgtcaccacatattttttagttgacactaacagacttagttgacatgtagcatctaaaattgtacgattgcaacaaaatcataagataaatgtacttttactatcacgttttttattagggttatatgtgtaataattacaaatgttaatgaggttttggcgcaaatatcccttaatataattaagtatcaaattttatatattttagtttactaattattgtgtcacactttttctaaattttaattaatttaaattcacccataagtagagatgttcataaaatactcaacctaattcaatacgcacaatccaatctaattttggattacaaaatctaaattcgcacttgcgcagatcgaatgttgatgacatgtaaaagtaattaatcaaatccaacccacacatatttatatatattttaatgtagaaaataataatttaaaaatctaatagatatgatacaaacatatttcaaaatttgatgaatcaaatctatatattcatatatatatatataagaaaatataatctaaaaccaacttaaatatttttttcaacatacatttttttcttttgaattttgttattttttgttttatttattttatttttttattttaataaaataacactaatttattttagtttgttactggttatgtgaaaaaaatatatttttctaataaatattaaataatataatattaaaaagtaattcatccaatccatatttttgcaaattgggtcagattaaatttaagttattgtatagattgaattggatctaaaatataaaatttgtacttactgtagattaaatgcactacgaataaaataatacagtttaaattggataaacacacctacccataagtatgaaattacttttctttatagttatagttatttggagatacttatgtcaatttgtataaaatattatatttgaagatatatatacctatttatagtaacttttaattatattagataaattgagtcaatgtaagattttgtgtgtgctgctatttattttgctaaactttaagtttaatagtgatgtaaaatgtgtgttaaatttagcccaagttaaatgaacattaatattagtattaacttttataattaatttgtattttagatgtattgaagtataaatataaaaattgaattaaatataattttatgatatattttagattaaatttaacttaaaatataccacatttattagagatggtctaatgcatttgaattaatttagtataataacttacttacattacatgtagaggttcatcatacaaattaattatgtgaaaaaaaaagttggacaaagataataataatacaaaaataaataaatatttattatatataagcattaccacataattttggttgtcaattgtgaaaatcatttgtatgaatatgataagtactatctactttttcatgggtgccaaccgacaaaagatatccatggtctaaagacacactatattacacaactataccaattccattttcatttttatttgatctctctctctctctttctcattcatagaaaaataattggtactcctttaatttatatatacaaatatctctttaattcatttctatttgttgttaataatcatataaaattgtcactattgctttccaaccatataaaaattacaataaataatatcaacataaatagtaaatactacttttatatcattataaaaaatattcattttgtggtgataaatttaggctaatatgtcacactattttatttataggtaaaatttagttggaggtaataaaattaaataaaataaaaataaaacaatcttcattctattttttttgtttagttacatgttaaaatattagaatattattataatagaatgacctttttattattttaatagaatgactattccatttttaaatagaaaaaaactattctaatacaggatttattaatttttatgcattttaaattttatttcattttattcttaattctattcttattcttatgttttcattcctcaaacctaataacactatcctagtatgctacattgtttgagtataaatcatttgtgagatttatattatacatatattaattcaaaccttaatgctttatttggtagggtagattgaaggagagatgaattaggggtttgtaaatttgggtaatcaatctacactatctctaatagaagatctaaaatttgtgtcaaatttaacataaaaaataaatttgtgctatatttggcccactatttataattataccctaatgtatgcacatgatgtaaaacaaggaaataaatattaataatattgatgatcatttaatattttattgaaaaaattcaaaaactattattttttattattttagtattttaaataatggtaatatggtaaataaagaatgtaaattttagtaaaaatcaataaatcataataattattgatattgtagtaaataaaaatgtaacatttattgtgagctaaatttagcacaatactttgtcttgtgccaaatttgacaaatttttaacatatatcaaatttaataaatttttaaaaacattattagtgcgctaaaatataaaaatatatcaactttttggcggcttattaaaaatg

SEQ ID NO: 43248 - DNA, 4179 bp, Cannabis sativa
aaaccctaatgggtctgggtttacttgaaatcccgacccattagggttaaggctctaaccctccatgcaaagggttacgatttttggctacaagcgctggttgtaaaatctgggaagaacactcttgtgtaaagtactccatagccaaagagctcaataatattgactcgtggactaaaactctttaatgccccaactacgtaaaaatcttcgtcttctttatctctaatcacatttctttagctctatctgtttttaatttggtttttaaaaaaactcgataaacatatattgattgacatacctttcaggcttttctctattggagtggatcctagaacctcctttccttcatgcctcaggggagcagtcggaaggtactagatttcttgtgttctcaaagactttatggttctttaagaaaaatgatagctttcataggtatatgagatagacttttgaggagatctctaagagcatttttaatgctttccctgaacactagaatatgttaaaaagtggtttgcagcaaaatgttggtcaaacttaaattttggaggtgcaataaggtctgcacaaaaaaggattcaagtgaatgttgatgttacttttagaaattgtgtgactgccgattaggaggtggttagagatgataatgagagtattaaaatcttgtttgcaaagaaggtttcagttagtaatgtgttgcaagggaaattcgaagctctgtggtgggggttaagctacttttgtggaggagacctatattcagaatttgaggtgttggtgaaggcatttggtatgaacaaagtttttgcttgatctctttctttgcatttcttgaactcttagaattttttgccagttttctactatatatatggttattatagagttgtgaactattttttttttaaaaaaaattagaatttattgtttctaaatttatagccacaagaggtaatcatttttctctggtcaggcccgccggcctttcctgagcataggtgcggcttggttgggattgtattttgctattgtgattcgatttttgttactacgactagtcttgtctctgtgatatggtattgaattttttagtattatttgtgtgacatgattttattttgttttgtttcattattagttcttctttgttattcgatggctcgccatcaaattactgttagtggttggaaataataagttctctgcaactgaagatgttgttagtacgtatcttgcacatagttgagtgctcaagctacgagattgaatgaatctgctgcaacagtttctactgttgtatattttgaacggtagataaatggaactcaatatacgagttcttaaggttaaatgtgatgttgaaatatttttaatttgatagtttttagtttgttaatgagacgatctaagaattatgcgaataattatttgattcatttttttttatttaattctgatcgtattttcaagaaaaatatatattattattttacaatatttttagtaataaaattacataattcattaaaaaaacatatatttttttttagtactaatcgatctcctctaaaccacttgaggctagctcaagtggccatagagaatgcgtgtgtattggagttcctagattcgaatcccaagttatgctgatgtaatatataaacgcttaaataaaaaaaaaagatctggtcttgctaaattggatcttgaccatgacttaatgagtttatttggtttttaggatacttattagatgaccaagatattatcttgtacttaatgagatttttataattatgcaagccctttcaaaaaaaataaaaagtaatggaagcggtgggaatagtcgtggtgtatcttctagtcttagaaaacgcttgaaatagcaacaaattcaataccaaaaaatattggtaaacgatgctaaaaaaaaagtaaataaataaaaattacagctaatggtgaattgacacgtggaacatgtgccaagtgggcccatgagaagcataggggtattgggtgatggaaataataatgaattccaaggtaaaacagtggaaaaagaacagaggtggtggggtccagtgtggatctagtacgagaaaacacaggataagaatagtgcacctctaatccacccactacatgtcactacacaatggtatttcctacaccgtccttaaccatgtctatgtcctctcctctcacacactctcacgccacccaagtcaccgaccgtcaattccttcataatctctctacctccctcattcaatctctcatttagtttaattcatttccccttttatcattatcaaatgttcataatttcataacacaggtactttttttacaccaataataaacttttttccttttatcagttttgtgaatcaccatctactttcattttcctcttgttatctcaatttttttttgatgtttttgtgattatggtgcattggtttcaatgaatctgcaggtgggtcttgatctttctcggtgttttttttaatcatattcagactcttatattattatggtctcctggatgattttttttaatctggggtgtgattatgagttgggttgatttgaaaatatccatttatgtggtttgtagcccaaagatatgaacttttgtttccgattgtcattttttaataggtttagttgttatctgattcgatttttagtttggtcttattcttttatttggtatgtcatccttttatgtttggggtagttgagttaaaaatcaatgataatgttcttctagcaatactgggaaatggcaaaggacatgggcatatgtgatagagttgatttaattagataaaagtctaattttgaaataagtttcctattacgatcatcttagaaatataatatatttgcaaggaatccaatgggttttatgatataagtgagtgaactatgtaaactgtgggttacaactaaatctgcctttcaatgtagaatggtcatcataagtgtctgtttgccatatctgatagatgctgaaatcttttaatataagtgtgtttcatggttttgcttaattggttaaaaggtcttaacttcagccccaatttgtgatcgtcaaatgtttgttttctgatttatgctgatgtgatattctttgtttgaagtttaagttatgaagggtcttcattgatcatggcctattgtctcttttggaaagcttttttgagtacctcttagtttcttgtattataaaatgacattggttttgtatgttaggctgaaatccttggattttgatttttcacaaaaaaaaaaaaattgtggagttggaaaggagagattttgtgtatgaaatagaatggctgatcccagaagtggagttagacgatcaaagagggttaataatgcgcaagacaatcctgctattttagctccacctgcttgcccaggtacccgaataggtaaaggctttaacaatcatagtccctacatatagtttctgtaaaatttagttatttcactgtattcttttcaaaatgcagtgccaaccagcagaggacgagggagaggatctagagctatgaatcaaggtaaaaatgttaagctgattggtgctggaatcagcgctcagggaaacactggttttgacttgccagtaggaaatttgatttctgtccgtgagctagcggctcaaaaaagtgcagaaaagctggctgttgctgacgatgaaggaagcacaagtccgcttcctgagagggtactttttgtctttattttctcaacctatttttactagaacttaacaatactgctttcagggaaccaattgactaaaaaaaaactaatggattaactgaaactgccatctaaaaccggcagctacttatcacttcttggaatttttgcccttgctggtttgaaatggcattattgtagttgtagtacgcacaacacttatttcatgccgcagaagtcttagttttcatttgattgagttatgtgtggtaactctatattgttactaagtgaaactttttcagctcttagatttttttttgaacaatttgtagctctcagatcgacaatgtgcagttgttcctaccacatgatttctgtttcatatttatgtggtttccataataataaagtttcttctccgtgtagtttgtggactgagcttct

SEQ ID NO: 43249 - DNA, 1346 bp, Cannabis sativa
ttgggcttcaggagaatggaagacaccaacaaagccctcttggtgaaattggcctggcaatgcgcatctagtcatgacaccccctaggttaagtgttttaatgctaaatactgtcgtcggaagtctttttggaatactgagatgaaagggaatgactcttgcgtctggaaggggattctccattctagaagcatcttacgtaatggtagtctatccctcgctgggagaggcgactttattgacatttgggaacaaccttggatcccatggttggagtatgaggagttcatggctctcatgagaaatgttcgaacacgatatccacttctaaaaacggttgctgacttatccaactcgaatgggggggtggaatagtactcttgttttgaaagtgtttggtaatgatatgggcaataaaatctacaacattctgagattacccgctaacagtccagactctcttgtatggaagcccacaaaggatggaagtttctctgttaaagaagcttacaaggccatcacttctgtccacggccataacactgataggaggttatggaggttaatttggagcaaatacatccacttcagacactctatcatgatcatgagggccttgatggggtgtctccctacaaaggacaaattgcctttcgtgaatgataaaatgtatcctttgtgtgattcggcttctgaggaggtcatgcatttattttgggattgtccgcttgctcgtgccttatggtttaggggtcctttcccattgaaccttggcattagaactgaatcttctttggcagatagagtggctagtgctgcttaatgcatccctagggagctcactgcccagttcttcatcttcttgggatatctctttgagagtgtgtggaaagcaagaaatgaggctatattcaaaggtcaaattactaggattgacattgctaggaagaacttactcactagatatgatgaagccatcctagtaagtaaggttgacttggaggcagcgaccgtgaatcgcaccccttgcaaagaactttttctctatgcctaaacgcctctcttatctgtatggtggatgcttcctggaaagatggaaatgtaggcttagatgtaattcttcttgatcgtgttgcagattcatagaaatggtatgctaagagtgaaaagactgcctcggcacctgaagcagaactgatggccattttttgggcactgcagctggataaggagctgggtcatgactcaattgttgttctgtctgatgcacagataatggtgaaggctttggaggacaggcgttttccaccaatttgggaaatcagacctctagctttctcggttct

SEQ ID NO: 43250 - DNA, 2769 bp, Cannabis sativa
aagtttcaactaatatgagctgtttacttcagttgctttgcatttctgaatcatgggaggctcattccaccatgatgtttgatttgggccgtcggatttttccaccgaagttcctttcagaacagccactagaagctggactttgtctatggcttcttcaccccaagcctttgtcacgtccaacatttaggtatcacaatctgaagccatttcatttgtcttcatccttcaattgtagtatatgttgagtcttatatctcttggggaattagtgaaggcacatattgaaggttgaagatttattttttttaatgttcaacagagaaattctgcaatcagaattgatatgtggctctgaagatttgaattctggaggtgttatctcaaattctgctgaatgtagtgattcccaaacagaggaattacgtaaatttttatcttcaatggaagaagaaaagaaaaggcgtgcttctaagttaagtgaacagataagatgcttagaagaagatatttctatggttgagagagggtactcagagaaggagttttctcttgtgaaagaagatggattttgtcttgaagagtctagatcattttcaatgccaaagaagaatgaaaatacattgatgaaaaatattactcagttggagaatgcttacttttacctgagatcccaaatccaacataaagaactgccaaagaccaaagagaagaaatgtgatgtgaaagttaagaatgaagactcaagcatgaatcaggcttcagatgatcgtattggagcctttttcgacggattatgcaagtttgctcgctacagcaagtttgaagtatgtgggacacttaaaaatggagaatttttcaactctaccagtgccatttgctctttgagttttgatcgcgatgaggactacattgctgcagctaaagtatcaaagaaaatcaagatcttcgagtttgctgccttatcaaatgatgcaactgatattcattaccctgtggttgagttaacaaacaagtctaagctaagctgtgtttgctggaattactacatcaagaattatctggcatcaacagattatgatggagtggtaaaggtgtgtttttgtacttagctaaagtaacaataagtctgctttaaatgatgacaattcttttgtcattgaagtttttatttccttttcagtgatctgcttgttaataaaagaatgggttgctttgttttgtgtgcgcatgagttacagatgtgggatgcagctactgggaaagaatgtttccaatacagtgagcatcagaagagggcttggtctgttgacttttctcgagctaatccaacgatgtttgctagtggaagtgatgactgttctgtaaaactgtggaatgttaacgatgtatgctctctctctcttttgtctttttaacattaagtttcttctgcttacctgcttattgtataccaagttagacccttttattgatttggtttggtgttcatattttcctacttttgcagaaaagttcagtgggaactatctattgccctgccaatgtctgctgtgtccagttctctgatcactctagtaatcaattggtcactgggtctgctgattacaaaatctatggctatgatcttcgccatgttaaaatccctttgtatactttagccggtcatggaaaagcagttagctatgtcaaatacttggatgctgaaactcttgtttctgcatccacagacaacacattaaagctttggaatctcaacaaaccaatctcatccgacgatgctagcagcttatcctttaccggtcatattaatgagaaggtagttattatattccatcttaagtcttttctttcaaattacattactccagcttttaacattcatcacttgcttgttcagaactttgttggattatctgtttgggatggatatatagcttgtggttcagaaacaaatgaggtgattaatgtctattagttctttctgaagaatcccattaaagttcaagttcaaacattatgagattaaccagttgtgttttatcttttgcttgtttcaggtgtatagttatcacaaatctctaccaatgcctataacttctcacacgtttggatcagttgatcccgtttctggacatgagattggcgatgatagtggacagtttgtttcaagtgtctgttggagaagaaaatctaatatggtagttgctgcaaactctattggagtcttaaaagtgctgaagatggtgtaatgagaaaagcttccaaagggatcattatttcatggtggttaagaatctttacctctacagtcagtttgttttgctcatttctttcccaagaatttattttttccttcttggggtggtagtggggtggatcattatttcatgtagtggaagaaaaagaaaattaccttggcttaaggtttaagatgagagaaagagaatttgtatataaaagcccttcaagttgagatttcacgaatcatttgtaaattgtaatcggtttataccccttaattttgcattgtaatcaggaatgaacgatgtcatttcgacataaaagctacttcattataaattagtgctaacttgcttaatttagagattatcaggcaaattaggatatggccctcaaacatctgcataccagaatagaaatgttgctgctcaagaaagaaaggaagaaaaaacaaaggccacaaattacataccaagaaggaaacttctgctgtgttcagatgttatcataagaagtgattttttt

SEQ ID NO: 43251 - DNA, 5360 bp, Cannabis sativa
tgtatcatattcagttatatgaatccaaatcttttatcaaaatttctatttatgtactcccaaaacactaaaaagtgagctttgtcatcaaaagctccaaaaattgttagtttatcaattacagacaaaactcatagtcatagcacctttatttagtaccgataacagagagagagagtaaataatcaaacaaaggaaactaaaacaaaataaacacaaagttcaaataataccttattacgtctatggaatgatgaggaaacccaaagagggtcttgtacttcatcctcctttaaaacacaacaagtgttacacatattagtacaaacaggggacaagcagacatcacaacaaacacagttcatacttatacaaatatatatatatatatatatatataaatccatgtgggctctctctaattagctcaaggacttacacccagaagcctcactttattaaaagacaacatgattatttaaaaagaagatactaaaagcaatgattttgaaaactttttaaacgaagaatatcaatgatgatgacgaaggttatcgggcttgccattctgcgatttgttgttgtggaagtaggttgtgaagttggatccgaggtcggagtagagcgaacggaccttcgaaatgttgccgttgatctcctggattagagccacgttcttcaccatgttgtctggaattcgagactggtgattctcgttcacctgttgaatcaacgctctgtttcgatccagaactgtctgtacctgtccgaaattctggtcgaagttcttccacaattcaggatctccatcttcctcttctccatcggagacggcaatggaggctggggcgggtttggatcggcttcgggcccgcatcctactccgattccggcggttcgattcgtcttccatgctcgattctacggcagagaaggaatcaaacgtgttcatgtgagagagaaagaagaagaggataagctagggttgccggagcagaatcggcttagccatgggaacacattgttttgagcttctttggtcctttttcgtaattttggtcaagttagagttggtgactcagaagaggttaagaccaagatatatatatactagaattcattggctggtgcctgtacgcgattaaatatgcgcgtgaaattcactgaggtgtgaatagttggagaatgtttacacgcgcttcgaatagaattggggaagtctggagtgggagataaatatctaatgtgagagcatatcgtaatccaaatggaagagagagaaagaggaaaaagggagaaaaagtaaaaatgttctgccacgtaggtggaaaaaggtctccccctaaaatatcttccaatgagaaaggataaagtagtttaccagacaggaatctgctatgatatttttgcattcatataaatatttgatattctctttttgctaaagctttttacaaatgatatttacaatgaaaaatacaatggttgttttactagttgagaatatatttgtcactcggacgataattttgtgtatcataaatttcattaatattaaacccaattccccatccataagtgcatactcatatttcatgtgttttgattggattattgtcaaatgtgccataacaattctatttttcttttttttggtctttcttctttttggtttgcatggttcatttatttgatttgtgaaatttattgttcttaacaaggttttgtttttctagttaaaaaagaatacaattattgttattatttcctgatgaactacaacatgcttatttacctataatttaatgtttttgccatcagcattctgcatcgtgataaaatcacacacaatattagaactttccactcgtaatggatttgggaaagaaatttaacattttttatttgatagaacaacgctttttgaagggcacttttgaagatgcaaaagcgaaaagtggtagtgctaatttcgcttttccattatcgatccccaatttaagaatctttgtacaactacaatctataagccttagcagaatatcactgaagaaattggtgtaattgccatttgcaagacaaaattaggactaaaaatccagaattggatgcccaacttttcgtatttttgagccccgtggtcccaattttcaaaaattatctttgatgttagttgacaagtccaaagcttcttaaatatctatatgaaattttgttacataattgtggaagtatgattactttcaatggaaatgaaattgatagaataacaaaactagatatacaaaaagtagagttggctatactagtcaaatacaaactattcgtatacaagtgcataaaatatctcatgtaaaagaaatggaattataaagttgaagatggcaactagtctgctggtttcctttttctcccaagaatagctgctctttggaatctagggccaccaatccgccatttcttaaaatctgccattgaggactgagctgcctcatatactttggtaaaaaaaacaggaaaactattaggtaaatatcaatggaaggattcctgaatgaacatttagaatatgttaaaaatgtgatatgaatctcacagttggtttcttcctttgttaagagtgttgataatttcgaggcagctgcaaatgcaacactatgtgccttagccaggacttcctgatatctgttcttaaatgcagacaagaggaaggaccccatatctctatcaccaaccctgttcgtatgaacaaaaattaagaggcaatttacagcccatttagcaaattaaagcttgacaagccaaaaccaccaagcagcaatccattagatttcttaaccacaagtaatactgccaagtaaactaagccagagtcaatagtatgtcctgttaggatgtggaagtgtgtggtaataattatgagttttcatgtcaaaaccaattagaagattagggttagccatcaacttataaatggtattaattttctaattgatgtggactctaacatgtatgaatgattttgcttccatccattcaatgtgcttagaaaaagaattcaatgtgcttttaaaaaaacgataagaccaaaacagaatcatttcctagatatttttataggatcgtgtcagcccctcgttaatgctcttaccataatgatttatcacagatttaatcgaatcggacgctgaaagttaatggaagatgataaattgatgacatcatcaaagagtttagggtaccatcatgagctacggaagtgtgcataaccaattatccaagcaaaactagttccacgttcaaacagtgaaagcaagtattgacgaaataggttcatctataatggattcttcacaaatatatctaaaagggaagtatagaactgacacatacgtgtaaaaacatagtttaacagaaaacacatttaatttgtacgagtaaaagaaaggataaagaagaaactcacagcggagctattttgcatccaaattcatagaagtacagacatcgagatctcaaatcaacacaagcggcatcagccccaagttccagcctggttctggtattaaaagggataatcaaacatcatagtgttagcatagcaatcacattttctcaactttgaactcgctaaagaagtcagataagtatatataacaacaattcctctggggttagtattagtaatgattcaatcctgttaaccctcataagcgaacttgcaaataagctgtatgaagccagaagaccattttgaacttgcaaataagcaataaataccaagaatcaccataattgactaagtgacacgggttacaataagagttcaaattgagaaagccactcatagtagacttgtatcagctaagaaagcaaatacatgctaaagatgggaataataagagtatcaaaaggcaaaagggaagtacttttctctaattaagccgttgaaagtcctataatcttacaatatttaactgagattaaaagggttgagttagtactatcattacttttgattgaaacacggtgggggctttatagtcgctacttgtctgaggtgtagctcatgagcaagccaaaagggcagttcaaccttggaccctggttcaacctgaaacacacccaataaaatatcacaaacacattcattcaagatccggagttcaaaccaatctactaacttacacaagccgtttcagcactaggatcaattccaaccccgtttaccgccttttggaacaccaccgagacaatctatgagcaaaaacatataaatacattgataccaaaatttcaaaatctttcgaaatagaattcaattatgatgctttacctcttcttctgcgataatatcatcaatatcgtagtaattcgccattgaaattagtcaggggttgtcttatcccaaagatacccaattgaaaagacaagacaggaaaacaatggccactgaatctcgtctctatatataagttcaaagccaaaccctaattgaaaattatatgaagttcaagcacagatctgaaacgacaccggaaaaagaacacaaagtagaagcaggaaaaaaatataaaacgtagaaaaggacctgaattcgggatgctcctttactgaatcttgttcatctgaaaattcacgttggagttatgtcaggatcacttcactagatctcgtcactggcatagagaatatgaaaaggaagaagatgaagacggcgaaaaaaataaatggagggaaactcaaacatatacgcgggaattggatgtcattttaatatttctaattttatttttggctggaattttttcaatttaatttaatactagaaatgtttacataattgttcaaaaaaatttaaaaaaaaaattacaaaaatatatcaacacaaaaaaaaaattatatttactatttgaatattttatttacaaaaatacctatttagttataataataattaaataattttttttatagtttatttataattgtattatagttatcatgagattgttttttgggttgattttacttgttttatagtttatttatagttgtcgtgaggttgatttctcattgttttgtagttgattttttttttaatttttgttgagcaaagtgtattttttataattttaaaactttacaagtgtatttttataattaaaaattttaaaccataaaattataaataaaacataaagatattttttaaaagatttcgtaataccaatgctaaattttgcttaaaaatggaataaaattaaaatgtcacaataaaaacatgaggttgatttctcattgttttgtagttggtttttttttttaatttttgatgagcaaaatgtatttttataatt

SEQ ID NO: 43252 - DNA, 6837 bp, Cannabis sativa
  modified_base (204)..(205): a, c, t, g, unknown or other
  modified_base (6724)..(6736): a, c, t, g, unknown or other
  modified_base (6762)..(6766): a, c, t, g, unknown or other
aatctcttattttattccttgtattattttataatagagttgtaataaatcttgattttcttccattgttataaaatctctaacaaatatttaagaccattttttacttttttataataactttaataatttacactaaatatttcactaagggttcgtttagaatattgtattaggtcgtattgtattatattaaattagatnntatatcatatttttatataatactctattaaactttaatttatactaaaatattatatattttggtgctcatacaaatattattttacataaaaaaatatgaaaaatataatataataattcaatataatactatacaatacaatacagtataatacagcatatcaaacgaagtctaaataaatatattaattttacttaaataaattgcataatatattatttatattagtaacctaaaataattaatttataatataattatatcatagtaagattttaaaatcttaaaataacttagtaaaataattttttttgacacataataaaattaaatatttgttaaattacttattacactttttcaaagaaataataaataaataaatcacagtttattaaattattaatttacttaatgtttatatttattttatgttattctttttagtttcataacttactaagttatgttatttttattttatttaatattaatattattatttttattattgttattttgtaaattttttaatatgttaatattttaaatcaattattatttttgtaataaattttaatttgattgaacaactaaaatgtaagattaatttttaaaataaattaaaataaaggttagaatatataaaaaaaaaaaaaaattacgtgtagtctcaaaatttaacattattaatgatgtagaattttgtgcatatataatttgatgtgtcattaaagtaaaatggtgtacaaattctacgttaatttataaccttaaaagttaaaatacaatttggaatttgctttgtgtagtgtggggtttataatgtataagtgaaattaaaaatgatttattatcatctattgtttgaatgaaactaatttaataaactcaaaagtatcattgtacgtgtaataaggtaaaataggttaacttaaataatcctttattgttcaattcaattaatatcagttttaattgttggtctagttgtctttgtttaattcaaaaacatcgagcaaaaaccacatgtgcatagagtgttggtgtaaattcttataaattaacacttatatatatattttaaaataacgtctagctagctcgataaaatatagaaagaaaaaaaaaatagtgtttggtattacatgacatttttcttctttgtctcatttgcaccagctcgacgactttgctactatgtattttcatactttgcattaatattattgactgtaatttttattaattgtttgattgtttttgcattatatataactcatgcatctaaatacgtgaatttttacatgtatgatatgtgttatatattatacagattgtactaatgtaaatatagatgaatattctttaataacttgaatctcaaaaacaatatagttgatctagggaaacgtatcaaaacttaaatctaaaactcattaagataatattagatggcttatactttcaaaaacaataaataattttataatacagaaaaaattatttatgttgtgggaatctactcgaatctccacccccacatggaactgacacctgtcctgcttcgatttttctgtcctatattttttttattgattcccaattattaaaatattgatatttatgatgatgtaatgaactgaactactggcaaaaaacaataagagtgttaagattttgtttaaacaaattattaaaacactataatactgctggtctactattcttcgcataaaaaaaaaatggaaaaatcataccataacataacataacataacataccgtaccatatactatccaaacaaaaacatataaatatatattctcaattatcatatacatatatggatagatacatatatatacacataacacatttgaggattaataaaaagagaaacattggatataatataatgtcgtaagccgatataaaaggctaaaagcaaaaatggatgattcaacaaaggtgtatcccacaaacaaaattggtataaaataatatttgtgtccattttcatagtgggtttctcttctattttatctcatatatgtatctatttatatcaatatattcggctttttcctctctgactctgttaacaataaataataattataagaaataaacaacattaaaatgtgcttacgtttgaaaacaataattttctacaagattctttaatttagaagttcttggtattatatcagcaaaaccccaccacacacttaatatttaattaaaacaaaactttgacgaaacaaacacaacaacttgagatacccctctcctctcctctcctctcctctcttactaccttttcattctaattgactgcatttgtacgttacgtagtgcaacttgcaattttattatttattttcaattgtgttgttaaagagggaccactccaacatacgaaagttgtcccttgggtgttttaccaaaatacccctccttccaaaggctgcaactgagagtgtggtgtccacggtttggaatttggattggtggactggattgtagttgtcaaatccccaagtacaaattgcttccatgttgttgatgttgttcccaaaatttgcccatcttcttcagaatccattttattttatttattttttcttaatatatataaagagattggagattttattgttacctaaaaattgctataataataacaatactaataatgatgatgatgattatgataatttgcataaaaatcaaatattctgattctccatatccgggttgactggtataaaataaaactaggattaaagagagagatatgtacggtatcatatgatataattggaaagaatagaccaaaacagatcaatgaaccatatataggcttatctattggttggctgtggtgctcaattgctttggtattcttggtggtggtgccatggtggtggtgagaaaggtgataattatcaagtggcatcatatataaatatgtataaatttatgtatattagtggtttcaaaattccaaagtagatcgagatagtgggagttaatataaatatatatcacaagtgggtttcatatgcattcttcatttcttgttttttctttgttgttatgaatagtgaaaaaaaaaatatgggcatctaatgtaatgttcaccttatctaattacaaagaatttaattgatgagaagggagaaaaataaaatttgtcattgtttgtattttcgttttcaaaatgagaagcaataaaggagagaataatactactcattattccatccatcactacttattgcttgtattttccttttgaaaaattatttaaaggaatataatattaatagaaagaatacgattcagtactactgcttatatttacttctttttcttttcttttcttttttccttcacaaatgtattggaataacttctttttatattatactgaaaatatattttctactaaaaatatggataaaaggattattataaatatgtccgtataagtccttaatttgaaaattaagtatttctaaaaaaagtacaacatgtaacgtcttataatatttagcaccttaagctatccatttatctaaatattattaataataataataattataattatataaggggaacaaaaataacagcaaggaaattgtttacaaatgaaagatgataatcatccaagtgaaaaagattaaaaaaagtgatagtagaaagttgaggttgcctcattttatttagtggagtttaagtttaaataatgatttatagccaaatgaggagcttaattattgtttccttacgtattaattgtctcaaacaccacatggtctgcgctatcagtgtgttcttagaaagaaaaaatggagccaaaacaggattttacatataaaaattataagtaaataataatgaattttctccaaaaaaaaaaaaaaactgaaaataatgtcaacattgatttatagctaaattaatttgatttttttttttctaaatataaatggtcttgcctacagtttgatgggagtccatttatgggtaattgcttgcccgagatttatttgtagtctaacctttaatttaatgaaacaattttatttcaaaaataaaaatatatagtaagtaaactaaaaagaaacaaaactcgctacaatattcaagagtttaacacttaaatgactttaaataaaattaattattgctagaggtagacatgggcgctaagcattaattcaaacctattgtttacattaatttttcactatttccagacttttttgtctttatttttattattgttgtgctcggaaggtacgatcacgattaggcacgaaaaaatattgatttaaacactatatgacatgatgctacaaattgacatgacacgacaagaaaaatatgtcataaacacgacacgacactgttaaagaaatgaacttttacaaagaatgaattcacgttaattaacaaactgtaacaacagtttatataagtacacaagctgatatgaaatgaccaaacgaccattaactaacttaactgaaaaaccggtaacagacaactaataataaacaactaattacagaaccgtttattctatactcttaacagacacgacacgacacgacacgacacgagaaacacaaaaacacgacacatatcgaaaagcacgacacacaataaatcaaaaaggcacgacacgacatattaaaagacattataatttaataataataataaagtatgaatttaccaattataaataagttaaaataatgataaaacttaaatataatattgaatgttataattctataattaaaattattaaattatgaaaaaataatattatatattaatttatttatagggtgtgacataaaaatttgagtatttataagtaaatattcaaattataatgatattaataattttttatttaattataagtaaaatattgttcaaaagttatataaatataactaaagcttagaaatatacatataatttaataattataaaaaaatatgaaaaagtaaagcacgaatttaagcttggatatgaaaataggttgtcatgtttaaaaaatacgatcgaaatgagtaaagtacagcacgaatccaagcacaacacgaaagtactaggcgtacaggtcgtgctgagcctaccctttaaaaatgttgacacgacacagcacgactcatatttttctgtaacacaacacggcaagacccattttttaaaaagcacgaataaatatgggtcaaactagcacggcacgcacaaacttacaacactagtttttaccaccacagtaacccaataatttaagagtattgataaatgtacacacaaattatacacaaacttaacacgtattttgacaaataatggaagttaaatttgtgtgtgatttatatatgcaaatattattataactcataaattaaatttcacactaaaaaatataatcataatttatgtaatactctctttattttattaattaaatagtaataatatattaaacaataataatacttaaaaataattacaaaacataatacacatgactacaatatcatgatcaatcattaattataccctaaacataagtattaataaagataacatttaattaacatatgcaagaggtatattgtgttaaacataacatttgtttattctccatgccaaatttagtacaatatttacatcttgcattaaagattgtcttatattttagtgtaatatttacagttatacttcaatgtacaataacatttttaagacaaattgatctaaaaagtaaaatatcattaatgactattaataaattaaatatttaaaaattattaataaaaatattgtaaataaaatatagaaaaatttatataattgaccaaaatttataaaaaaaaattacaaaaatatttcaacacggaaaatattttatttttacattttgaatttttttatttataaaaatacatctttagtaaaaacaataaactatttatttcggttgttttatagtttatttatagatatattatagttgtcatgagattgttttttggtcattttatagtttatttatagttatcgtgaagttgatttctcttttttttttttttactttttgttgagcaaaatgtatttttgtttaaaacgtctttacatgtgtatttttgtaaataaaaattttagatcgtaaaattgttaataaatattaaaaaaaaagaatatttttgaaatttttcttgaaatgtatgcaataaagtatgtcattaatgattaatgacaaaaatataattaaaatagtaatatttattgtgtgcctaatttagcatgttatatcttgtgctaaatttaacctaatttttattttaatgaatcaaatcatttatattgcatagaagagtctttacaaagcttcagcaccatatcaaaaggcttgatctaaaaaatagctaaatacaattataaagcatcactacaaaaaatcttacttnnnnnnnnnnnnnaacttgtgactaaaagtgaaaaaatnnnnnctaattataaatcatgattcttatgttgtgactaaaaggtccgtggataaaagtattattagtcacaaaaa

SEQ ID NO: 43253 - DNA, 1461 bp, Cannabis sativa
tcaaaatgaattgcatcatatcttgaactttgaacaattatattttattactattagccatattatatatatctatacattttatctcatacaatcctcaccatatatagatatatctatatttctatccaaaagaaaaacttcaaaacaccatggaagagccattgctttacatatccatttccataatcctattattattaggtttcaagctctataattccatcattactagtaaaaaaattaccaaaataaccctaccaccaactccaccctatgcactcccaatcataggccaccttcatctcatcaaacaaccatttcaccgaacactccaaaacctttctttcaaatacggcgacgttttctctctatggttcggatcgcgccacgtggtcatcgtatcatctccatcggccgttgaagaatgcttcaccaaaaacgacatcgttttggccaaccgtcctcctctcctcctagggaaacacttagcctacaactacacaaccatcacccaatccccatacggggaccactggcgcaacctacgccgcataggcgccattgagatcttctcctcgactcgtctgaagtccttttcaggaatcagaagagacgaagtcaaaagacttcttctcaaactgattcctgataaaaaagcgccggcaaaagcccagtttctaaaagtagagatgaaatcattattgtcagagttgacttataacatcatgatgagaatggttgcccaaaaaagatactacggggacaatgtttcggatcagaaagaagccgagcggtttagggaaattatgaaaaaggttgtcgcctatggtggggcggcgaatcccggggattttttgccaattttgaattggtttggtggtaagaatagttttgagaagagagtgaagagacttgcaaagaatactgatgagtttttacaaggtttgatcgatgagcataggagtaagacgagtagtttgagtggtcaaaaggatagtatgattcatcatatgcttactttgcaagagtcccagcctgattactacactgatcaaattattaaaggctttatactggtacgtaattatataaacacgagggaaactacatatctcttttaatttgatgtttttaagttttacgctctcttttaaaatttattatgtttatctcttttttctatcattctatcaattttacctctatcatttcatttcatgatattttttatttttctctaataaaaattttatctcaatttttccacaaacatacacatctatcaacaaataacacaaatttattatgtttgaaattatgtcttagttatgtgagtatgaggataatttaagtactatactcatttatttgaaagtaaatttgatttatgtataaaaaaagtaagtattcttcaatttctttccacatacagtggtagatttgggcttggttaagaca

SEQ ID NO: 43254 - DNA, 4616 bp, Cannabis sativa
tttgtatcttcagttatgtaccaactgcttatacaagtatacattacagctgctcatgttctgttttttagccgtagaatgcatttctttttctgagaaagttgggatcaaagattcaagaaaatgttgttccagaaaagaaaaataaaacaaggttcaagaaagtgtatcttcaccaattctggaattccattctatgtatttgaattctatggcagcgacatccattccgccattcgaatatctgaatcaagacaagttgatcaattagaaaatgaatggttttcttgcttggttcctaggttttatattgggtgaattgagaaactgtaagtatgagcaacttatgagataattcatagaaaaattcattcattgtatcttttatttgccaaatgaaataaggtttgttttcatcagttacattggtgttccttattgagagattttttttttatacagttttacatagtttataatctagtttatttgctagcaagctatgataaatattctcgaaaatttctttctttctttttttttatctgtttttaaataattgtggcttagaatttgtggttaccataaatttcactgcaaagaattttaatttataatctaattttcatttctccttctctaactaaccttgtattacatcttatagattcttcaaactaatataaccatagctcaataaattcataaattgctcgcaattaggtgctagctatttttaagtgaaactaaaattcaaatctgagcagctactagctatgattgatattttcgcataagtgtgtatgattcatgaagtgtttgacaactactactttttcttttctcatcaatggtattgtttctggacatgttaccccacagtgaggattccgctaaggagatccactttctccatatctatttcttatttgctctgagaggctctctagacttttgcaatttgaggaaagaattggtaggctcaaaggttatgctatcttacgaagaactccatcaatatcttatcttttctttgctgatgatagccttcttttttgccaagctgatgggtgttcatgtggagttgttaagagtgctttggatatttaccatcgagtgtctggccaggatcttaatttagagaagtcaatcatgtctttttcaccaaatacaactgaagttgtcagaaattccttccaacaaattcttggaatccctgttagcgagtgtcatgagaaatatttgggattacctgcctactcggaaagaaataagaagctattctttggggatgttaaagagaaaatatggaagctcatgcattccaagaatgataagcttttttctattgggggaaagaagtcttattaaaagctgttgtccaatctattccaacatatgttatgagttgttttaaattgcctattactttcggtcgacagcttgagcaaatgatggctaagttttggtggggttcggatacagataaaaaaaagactcattggaagaaatggaaatcgctttgtaaaactaagttggaaggtggtatgggtttccgctctttcattcatttcaatcaggcattgttagcaaaacaagcttgacgactatttcaacaacctgattctcttcttggccgtgtacttaaaggtagatattttccccataataattttatgagtgctaaggaaggtggtatgtcttctctaacatagcagggcatctactggggtagagaacttttatcttctagtttaagatataaagtggggaatggttgccagatcagatgtgatcttgatccttggatacctcgtacttcaacttttacttcattgggttacattggttgctccaataacttagtgtctcactatattacacacactaaggactggaacttggctttattgcagctcaatttttgccctgctgatgttgataatatacttaaaattcttttgtctcactcaaatgagtatgacagttggatttggtattactgcactttgggggattatacggttcaatcaggataccatcttgctagctctttagaagatcaacttcattcctctagttcatcatcctatgatgcctggtagaaattactttggagtctaaaactcccttctcttaagtgaagatctttgtttggagagtgtcccagaatgctcttcctgttgctggatccctctgctgtccgaaaatcattgatttagcgtgctgtagcccctgctttacttcgtgggaaaccgtggggcatgctatgtttggatgcaaacatgctaaagctgtgaggaagttgattggttttatgctggattttaatgcagcaactcatatgaaatatggagattatgtttcctatttgtctaccgtttatagcagaactgacttcgaactgctcctgtgtactatgtggtttatatggacagatagaaacaacttcattcatggtaaaaaactccagcaaccatctgaaatttgggccaaatcacaagcctacatctacacttttcagcagcaccaacttcctgctgctacttcacgacaggttgcatctggtgtggctaatcatatgccacgacaatcacctccttctaacaaacttaaaatgaatgttgatgtagccattgatgctttaaacaataaattgggagtaggtgctattatacgtgattctaagggacaagttcgggctgcttattccaaaccacttgtgggcaattttaaataagaagaagcagaagctaaggctttatttcatagtctcatttgggcaaggaaatttcattttactgttgatttcattgagactggttcgttacttttggcttctattcttaatcatcaatctacgggccgatcatcttttcaagatttggtggctgatgttaaacatcaattatcctatctctcttcagtttgtgtatttcatgttaggcgaaatactaaccaagccgctcatagtttagctaaacaaactttagtgttggataatgattgtgattggttagaagatttttcttttactattttttttttttttctgttgttgtaaatgactttgtgtaatttataaattataataacagttttttctaaaaaaaataaataaaataaaatactttttttatattaaagaaaaagaattgagatatctaaaagtaaaatataaccatatagaaggtatcgctggtagaattttcctacaatctctctctctctctctctctttttgaaagcaatgatagccctattcttttaattacttttattctttattaatgataattttagaaattaaaaataaaaagactagattgtctacttgactttgcatatggcagtctacttcttcactttccagtaacttccctcatttctttctcccttctctcaaattattattattacaaaagttgggagttaggttacatagtttcaaattcagatcacgaattgggaagtttgctattccaactctaatctctcaaaacttccctattagtaatatcaatttaattggttcatggagaagaacaattccttcaacttcagagccaatcaagagaatgagcttcagaattccttcaatggagatttaggacttggactcaatgatcgaagattcgcgttttcccgccaagcctcgtttcagcaataccaggagcctcggacgccggtttccaacaacctggacgattccctcgcgggtaggccttttctgtcaagaactgtgtccagtattgatattcctcttccggaggcttatgcggccgaacagaatgttaaattctttggagcaggagaagtttcgcctcataaattatcggtttcattgcttctgggttcgatgttgcggatcatgagttctgggagtaggtatatgaagaggttgttcatgttgatatcgcttaacgtggcttattcaactactgagctatgcattggtcttctcacggggcgtgtaggtatggatgttgcattgggttctctactaaaaattttaagttgatacattgttgtttgttgctggcatttatatgtgtatatttattctatattgcttctttttgtgtttgtgggctatgcaggtttggtgtctgatgcatttcatttaactttcggctgtggtctcttgactttttcattgtttgctatggctgcctcgcgaggaaagcctgatgggatttacacttatgggtgagagtttatttttcgtggaaccatgaatctgaacttgaattgttaagtcttggctaaatgaccctgtttctcaaatgatgtttcttatttctctacagtgaatactgactcatgccttttttttttaattttttttgttgagaattctatattaatctttttttttgataattgaattctatattaatctaattgtttcacatcaggtataagcggcttgaggttctgtctgcatttaccaatgctgtaagtggtccacttttctttgttatttagagtagctccacctttccttatatgtccggttttatacattttgggtgtttggtccatcttcccttattactattaatgtatgcttttgctgatttgataactcttatgagtttactggaaataggata

SEQ ID NO: 43255 - DNA, 1901 bp, Cannabis sativa
tatataaagtcaattagataatatgttgatcagtgtatatggatcaagaatatcttagctagaagaaataaaaaattattagtataattaaaaaaaagtaaaaaaattatatgtgactatttaattaagaatcattaagatctagatatatactacttttaacaaaagctctcaattgcaccaacaattgttctacagacacataaagattgtgtcctcgagcatcaacatatccacaaatgtgttttcattaagtttatatcccacaaatcttataaagaatttttagggacaaattgtttatgtttaatgtttttcataaaataaataaaactcacataaaaaatctaaaattgtaagatacactgatattcttttcaaaagaagaaaaagactaaccaatattacataacaactatttttcttttgtaattttaaacttttattgttatatgtactcaatatacttaactaggagataagggaaaattcgatatctgagttatattattttgggaatagagtatctcttgaaaataatgataaatattgacaacacagatgagagttggaactgaatcatctatgatttaagaataatgttttgctcttttgtcatggagatttcaagtcaatatacttgattctactagatcttaagctattctctcaaacctcaggccttcaaccaagtgaagccaagtcagccttctatttttgtgggatggaagaaagggaaatacaaagagttctaggtatcttcggctactttagaagctctttaccatttaggtatcttggaattcgcattgtaacctgtaggcttctaagctctgaaagtgagatactggttgagaagatgactaaaagaatcaatgtattgagctcctaaaatctctcttttgctggacaagtaatattattgattaactctatcttgatttctattcacttatactgagctcaaatcatgttgctaccgaaaaaaaacattgaaaagaattaattccatttgtattgctttcctttggaaaggggtagcaaactatgtaggtcctagtaatgtttcttgagaagaaatgtgcaaaccgaagaaagaagatggacttgggtttagaaagactacactatggaatacaactgcccattagtaaatatgtttggacattttccaccaaacaagaagatctttgggttaagtgaattcataatatatatttgaaaattaggacagtgtggtgggattgcaaattccatcaaataaaagttagtactagaagcatattgtggcaaccaagaatcaatttaaatctagtactagctttcaattccttaaagcaagtacatataatattcaataggggtataaactacttacacgagattatgatacaattcattgggctgttgtagtttggagcagattaaaatgcttaagcatagttttatcttatggttagctgttctaaagaggctctagataaaggctagaatttagcatttcaatatcaccacatatgcaaatgtatggtatgagtgaagatgatgatgaaacctttgaacacctcttctttaattgtcaatatagtagcaggtgcttgaaactaaaagcttggttgcaatatggagaatcaaggctatggaaataccaggtcttattaggtggctggctcgggtaaaaattaccaaagctcgaaaaatggtaatggttgtttctcttgcaccactagtatatcgattttggtaaaatagaaatgaagtgttatggaatggaatgtgtttgactagggcagtacttataaaatgaatgaaagatgatgtaaagaaaagagcaaagtttcttttgtttttgccaagaaaagttatagtaaagagatacaaagatggaaaatttgtaaata

SEQ ID NO: 43256 - DNA, 1788 bp, Cannabis sativa
aacccccagctgcccagtcccattcctttcatcccctgtcgtctttctttgtgcggtggcactgttcagaccaaacacaatgttgaccacttaaattcttctgagtgatcaagaacattactcatatatttggaaagctcattaacatatatagagatgagcccaaattaaagaaattaagataactcagttttatgctatatttttttttccccagattacaatgtccgttttaatgcatttttttttaaaaaatttgttatcatttactcttagcttactaattatggatttctaaagcgttgagatatgatcaaagaccacttcgccattacaaagctataccagttgtagagaagctaaatttcaaaattgagagtggagagcaactccaacacctgctcaacattgggaagcccttacaaaatcatgtaagtatatgttgaaatcaagattgatgttaattatttctccccttttattcaaaatatggtcatatagagaaagtgtcccacttcatattgatggggattagcttatgttggtcacatagtttactttgttcaatctatttctctctctcttgttatgtttagtagccaatataaataagcgagcaagcagttatgtagtcgccaactctatgccctccaaatatccaagaaacctaattaagagaagataataacttccttcaaaataaaaagaaaagataatcgcagccaaataattaaaatagtctgtgtaaaataaaaaagaagagcagtaacaagaaataaccatggtcataaatatttgtgtaagatgaattaattttttttcttgaagagtttagcctactgtacttccgttgttcttaattttatagcagtatagtatagtatttgaggttttatactatgatgatgatcttcttctatactctgtcaaattactctgctcagtttcaatttttcatgaggaaaattcaaatttttgttttttcctttcattatttatgttcaatactattattataattttttttcataaatgaatcagatatatacatacacattcattaataatatattcaatgaattcatgatgcaatatgttgctgtaatgtcattcaaaaggattgtgtgaatcaaggtttcattaacttccagttccacaaatttaagttcaaatataaaaattggttttgtttaaaaaaatacgggtcgtcacgaatccaaacacggtacgaaaatatcgagcctataaaccgtgtcaggtatacttttaaaaaatattagtacggcatgacacgatttatatttttttaaaatacagtacaatatgatctgtttttttgaaaagtattgataaatacaagtaaaaccagcacaaccttacttacaatactagttggaattgaaaaaaaaatactcatttttatattagtgcaacactaaatatgagaagatggttggagatgggctacaacaaatttattcttgaaattggtaaattaagcgctgagcaaagttggagaacatgggccacatgccagttttgttgcagaaagtgcgtctgtggcgagcactgagaggtttgaatgtgaatgtgttgcaatgggagaatgaggaaacaagtccatggaaataactccacgttgtcaactcggttgacttcatttggggatgtgatccacgcttcttatttgtatgattaaagaggacttcagttaaaagtttgggccattggtagataattgggcctcccttgtggaattagttcaattccaaaacaaaatacaatcta

SEQ ID NO: 43257 - DNA, 2183 bp, Cannabis sativa
ttataacttatcctcaagaccaaagtccaaattcaacactttccacgaaaatatctatactattaacaatttttatttcctaactggcaaagaaagtcagaaatgtttttaatttagattaatgcaatttaagaacaacaagttatttttatagtagtgccttatgtcaaaccacaatcacctggaaagtactctgagccctttaagatatatatagtatatgcatcaaaatacgaccttttagatcttattataaaaacacttgccaagaaataattaaattagttaaccataaaaagaagaattatatattatcactttgcttaagtcattcaatattaatatgttactttcctatttcttgcttactatacatgatacatgtaattttttttttctctaaatttaggctctttaacattagtcaatgtttccacacattaagtccacaacaaacgccaaagacaattaatatcattgtttctttatatgaataattgcatctattgtcactgttaattctcaaagtcttctatggccaagtcactggatacatgaaaatccaaaatttattggttaatatgtccttataatgaaaacaatatgtatgtatgaatattcagctcaaaatatttgagtattactactctatctcagttcaaaacctcacatatcataaatctaagggggtccatatatacttctttatcaactgaaataagtatctatggatttgattaaatttgaagtgtctttccttactaactgttagttatatcattaaattgaggccaaaaattggagatgtaacatgactttcgaaataataatataaatccaaacaaaaaaattaagtaggatcaaaattgtggtttaaaagatgacaaaatttcattcattaatttattaatgtgaaattaatcatttttctcttatcgatttggctgcagatcttatttgtgttctctagaatctcactagctatacatggcaataatatatatttttatttttattattttaagggaagaattataaaaatatcagaacaagaagacaattttttaagaaacttttattaatattctttggaggagaaaaataaagcattgaatgctaatcaggaaactaacaagattatcaagtttaaaattatgataatcgttgagagttcgtaatttcagccaagtttaaggctgagtcgccgttatcgagttgattatgagtatcgttaaaaataaattaatactaaatttcattatcttgggatcctggcgctaccagaggagacgtcacagcaaatctattccatcactacccactacttttctatctaaattacaaaaatgccatcaattttagtattaaaaacatggatagttcatccgaaatttacaatacatacaaacaaatacattaaaaattaaattgtaacgtgtattacttattattattattattattttgattcaatatgtatggcatttcttcatttaaaatatatattgaaaaaaaaaagttagtatgctcatcatttattttcgacacattaaatagttaaaatggttgcctaattctactggtggggattacatgaacaagggcctgaccattgacgttaaatttgtatgaagctattgtaagatagttctagggaagtgaatttggtaggaaaatccaatttcagtataaccttatttaggtaaagtcattccaccctatcaaaaactttggtcatgtcaagtttgattgtcatccaaccggtgcttcttgtttttctccccttaatggcatgtaagagctcctgtgccatcataatgttgtcagatataagtctccccttgagaaaagtactttgatttggtgaaattaaggagttaagaacctgcttcattttattagccaggattttagaggcaattttatagatagtagtgcaaaggctaataggacggtaatccttgagggtagagggatttttcacatttagaaagtgtgatgagtgttgtattaaaatgtgtgatatcaactccatgattcaggaaactgagcattgcattagtgacagagttgccaacaacattccaattttttttggtgaaaatggttgttgaatccattaactctaggggcttttttagggggcatttggaacagagcttgtatcacttcattggggaaaa

SEQ ID NO: 43258 - DNA, 3513 bp, Cannabis sativa
agcttgtattataacatttacaaaaaatttaggatcaacaccaatctccgacccgaacccaaacccgggacccgaacctagacggggactcgaattcggactcggacccagacccataattagtgttggggtcgagtgtattgaaaatatattataattttactcaatttattaatacaagtcaattatattaaataatacaccacaatccaacacaacacaatacaatacagtgtaccataagaatcggactcgaattcgggactcaagactcgagacctgggaccgggaccgggacacgggacccgacctgagaccccaacccgaatctggacccagacccagatccgtagttagtgttgagatcgagtgtattgaaaatatattataattttacacaatctattaatacaattcaattatattaaataacaacccaatctcacacaatacaatacaacctaccataacaatgttgaaagagttatttggcaaacttttcatgtgtttttaatttaggtttttaaatattttagaaattcattgctcttacataattaaaattgtgctagtttcttgttcaggtagaaactagaaaccggcgacgaacactaaacagtcaacttagttccgtccgtttgagtgaatggatggagtcgacatctctgcgaattcgaagcttcgaacaacttccttcgcctatggagttcgagtctttgatcgaatcctctaactctcccgccgtaaatttccgattcaaccacataatttatttctctgttttttttttttgttcaatcaatggtaggactctcaatctttcgtttatctatggcatacaaggtttttaaaggttgcgttaacgactggaaagctttttccaagtggaagccctccaatggcggtctcgactatttgctggtaaaactgtgtgtgttttaatttttttagtttgtttattcacttaagggatagctcacttgaaaatttggaatcctttctcttctcaattgtttttctttcttaatggaagctcaggaacgggtaggatcatgtgttgtggaggctatgctatctaaatctgcacccgtcttctacggtgatcttagaagccatgagagggtaatttcacgttccttcccgttaatggcattgtaagcattggataactgtaagattttaattagcttcacaacttactatccctctactttttttaggttgctttaccattttctgatttcattggtttctgcaagctacgtttgcaaaatgctgaagatggtgccggtagtagtttcgaattggaaagccatggtataacagagtctgattctgttgatgggtgtttgaccaatgacggtgttgctcaacaaatatacttagcacaggttcgatttcaaggatatagagattataatttttctttccttgttatttttaggatcatgtttgtgtcggttttgcttttgaggtgtacttttcctgctcgattcatttggcacaagaatttatgtgttctccacacaattcagatagtactgttttgcaaatattgtttgtttgtgtatatttcaggtgccaattctgcacgtagaaagtgaagataaggttcagttggaaacactgagagaagatattaatacggtttgtaaatctcttggaccagtctgtgtttactactctatggccatctaacaaagagtcctttgttctcactctgaatctaactaccagttgtctacttctgcagcctgtatttttgaaggaaaaggttttagcttctgtcaacttgtggatgaacagtgctcaagctagatcaagtactcattatgatccacaccataaccttctatgcttagtttctggctgtaaacgaggtaaaactattgtatttagggaaatctctaggtggtttatttcaacattattgcattagctgttacagaagtttggatatctctgttcgcttgcagatgtttcatcttttggacgtttatatatatgtatatttatatacattattaagacattttataaatttataagtctcatatatacttattaagactttatatgttcaaccaaacattactttttatgttctttgaaatcataaactggatttttatgccacaaccaaatacagctatataaacattacaatcatatcctcctccttacaatctaactattcagaaaattttgaactcttcataatattatcatggcccatttagatttgttatttattaaagagcagatttagctattttgacaagagctggtttttatgtcttgattgcaagagtaatctctgtctatatcctatgcatattttctggaaaataataaatcattattttctgaacattgacaagcttgcgttctttacagtgcttttatggcctccttctgccagtcccatgttatatcctatgcctatatttggggagtcatcaaatcataggtaatccaataatctattcttttttccttgtgtgcatatcaatttttttaatttaaaatttattgtgattggggtgtgtgtgagatagtaatcaggtatctgttcttgatgtcttcaacttttaattacttttttcctttccatttcttttgtttttggttttgtggcagtttgcttgctgtagaaaatccagatttgttagtttatccacgagcaaaatgtttaatggagtactcacagaagattattctccatgcaggtgatgcccttttcattcccgaaggatggtaagctttaattcagctctgtgaaactgtttatttgatttggagccttcttgttcctgttataatcttatggagatacattgtgactatgatctctacttattcttgttacttgctcattatctgccagttccaatcttatttcagttgtttatttagttgatgtttatttttactagtactatgaatcctctattctcgagcaactagaattgatgcatgcatatgcatttattgatatttagttgctaggatccttgttatgtgatttattttgatcgtcatatttttttagtctctctagtttgttacttgaatagtgttttgctaattgattttcttacataggttccaccaagtggatagtgatgatttgactatagcagtgaacttttggtggccgtccaatattatgtcgggcatgtcagaacatatggatgcttattatttgcgaaggatattaaaaaggtggtggttgattaattcttttaatgaaatgatcgggttagtaatttaaaaactaacttttgattgtttttctttatatgggtacgtgttccttctttcaatccaaatttacatgaaagactggcagacaaggaaatggtatgtgtctcattcacatatttatatatgtgtagtactttttctttacttttccaaaaaaaaaacgaaaaaaattgtatttgtaaggggaacatacaagagcagaaaagtggtcgaagaaccacaaaaacagaggtgtaatgtaaaagt

SEQ ID NO: 43259 - DNA, 5967 bp, Cannabis sativa
ttcattataagcagcaaaaaaaaaaaaaaaactagtttcatcaataacataatgaaaaaaaaatacaatgcgaaaaatatataatataaaaaccatgccaatattagaaaccagtttcatcaacattaaaataattttttttgaataaaaatcataaacttattaattaataaattcgttcaaaataatagaacgcacttcagaggaacaatcctctaactgaagcacacagcctgtagagaaagaagagagtctcttgtcaagcaatgaaccaacttatttgcagatcattttacaaaacacaaaatcaataaaagttaaagtaaaaagcaaatttccaacatcttgaaccagaagaccaaactgtgaagacataaaaacattgctttgaatagcttgtacacacaccaaactatccgtttccagcacgacattgtcccaagaatgagttgcaatccatctcaaagcttctctaatgcctatgatctcaacaatttcaggtttgacacaacaaatctttcccttcttgaaagcttctaacatagtaccatgatgatctcgagctacacaacccaccccaaactgcccctcttgttcaaataaagccccatcaaccttaactttaatcttgtttaaaaaggtgcaatctagcgctcacgatttcgccccccaatcatttaaaggacacaacgaaagatccttccttccttgagcgaatttgtattgatcgagcatgtttctagttgatgttgcaaaatttaaagctgatgttacaatattttcatattttcatatctatttgttatttgtttttttattcattttattgtagaaccgtttccgttttaatttatgtaccaatatttttagaactgattcactcgatctttttttttttaaaaaaatatataatcagttttgatttattatgtgttatttgtttttagtcattttgttgtgaaacttgttctaatttaatttatgtcgtagttggtttttaatttatgtcgcagttaattttttatttaagtcattttagaaaatagttcttgaattatttattttaaaaacagatttttgatttaattaattcaaggaactggttttcattttagttattttgggaattgatttttaatttagttaattcaaggaagcaatttttgatttatttattttatttaactggtttttgtgtgtaagttcttattatctttgttgctttacgaaattagtttctttctcttaaatttttaatgagttgataaatataatcagtttctttatattatattatattgtttgtttttatttatttcattatggaaccgtacaatttagatttacgcctcaaatttttgcctcacttttttttttttttaattaattgatttatgatgtattatgtattatttgtttttactcaatttgttgtgcaattagttttatttttaattttgttttagtgtttcaggaactggttttctctttgtttttttaattataaccagtttgagttattctgtgttattctttgtattcattatattatagaatcggtgcattattaattatagcttgtttgagttattatgtgtgtaataattaaaatatttagttattattttctattatgttagtctagatatctcgatgtgaaaatatcaatttgctagaatgtaattattagaaagtgttattctttttaattaatagaattatgttgtatgagcttttgtagttattaggaattatggggctcattgtttgagtctattttagctttgtggttagttaaagataaatttggtattgtggtaattttttttctttaaatgatataggttctattacttaattaaataatgatatcaatagtaattatagtggcgaaactgaagattaaggtatagttttgtgatatgtagttatgttgaggaattagagattagtttggacttatagcattggtgtgaactttagtggattttctttgaatgatattaagtatatggaagctacttacaagtagtttacgtgtagcattaaagaataaaatatggatggatagtatcttgtggttagtcattaagccaataaagacttggtcaagtggccgtaaggtggcacacttggagcggagtaaatagctaacagtatatatataaagatgcttattactcatattttggcaaactcttttttattctagtcttgatcgagtatgaaaggagccttaaacttaaacatattactggttaattgattttaaaaatgtaaccatggttagtagtcaggtatctagggaacattagtgtagttagttaaagggttataaataccactcaacttatacttcgctcacttaagctctctcttataatcaatccaattttctcgtcctttgtgttctccctagatcaaaccatcaccatacaccactatctttctcacacatatatatacatatagatatactagtagaatgctacgtgcaaggcacgtatactaagttttatgctaagtgtgtcttactttatttaaaaatattattagttattgtttgatattattaatatgcatattcaattaatgtaaataatgttattaatataattgaaagtaaatattgaatgcaatatatgattgtttaaaaaatcttgataatctaactccaatttattcttaagttaatccaaaaataaatttaaagtcaatgttcgaaaaataaagcatacacaatttaaattatttcaattaaataaaaaagatattaaaatttaatcgttaaattgttgataggtgaagataccacatgttaaaagttgtaatgtttgtattttgcactttttccttttagttggatgtgcatatagttggattattcatttctctgtagataatttatatatggtacaaagttgcagtgttcttgtgaaaagttattatttttcatataagatagtaaaatatagtgtaaataattaatttaataaataaaatctacttatgatagtcaagtacatttattttgtttatttaaaactatatatgtgcagtaaagtgcattatttgggcagcagtacataaaagtactttttccatgatatctgtgaacataacaacatctaaaatctttatagtatcatcaaggtcaacatatattataacatttagaaaatagataataaaaactaattatacatgtataactaagcatgacaatcaaagatgatggctgagaaatcgctggaaaatggagagcaaaagatgaggaaaataattgaatattcaacctatcatagagcacagaagcaaacgaaaaagaaaaaaaggataattgaatgaaaatatattgtgaacttagaatattcaaatatttaatcaagccgctattgaagttaaagtggtttatgtagaatctttttagttatattttattattaataactataaaattatgagaaattattcatatctatactaaaattataatcataaattttaacaaacaaatattaaaatttaaaaataatttataaaatatttctttaaaaaaaaaatcagtacattctactctttaaaaaaactgttttaaatataaatgatttttaaaataaaacaaatctaacaaactgtaatcttaaaaaaatcagaacatccggctaaaaatgagttcaacaattctgacaatctggtcacaaattttcttattctaaaaatgagttcacacctatctaagatcttaaagttgactccaagagttccaaatatatatcaaaatctccatttcatgcttgttaatttagggaacttttgaagagcgaaaaacatcttcaatcactttaattctcccagcagtacctttcgataagaacaaataaatgtaaagcaccttcaatcactttaatagaaacaagcacataagattagtaagttgttcgatttaaaaaaatccatataagcacagtaaagcaccttttatatctctgtttagagtcacatgggcaaaccacattcttacttattcagttatttgaccattcttcgccaaattagacttggcaatatctaatggtgtagatcctatgagcttttacacctgaagttaataaagatcatgggaagaagtttggttcattttatttccaaataaatattaagaaactaaaagtaacaacttcaccataaattctcacacgatcatatattctataataagagagttaccgcaacacaactacaatgcacatatatatcaagtgcaaaaacataaaaaaaatgtaataaataaaactaaagagtagcaaaacttcatagatcaagaataataatacctcaacaagactctttggcattggttttcctaatttctataagctttctatcttcccttagtatttatttagtccatgtaaactttgctagaggcgcattcaacatttgtaattgtgcaattgaaaaattttgctacctctttcttatgactaagttggagattctacaaagcataaggtctatatgactacatcaatatcatggtaaataaaattagtacaaccataaggtccatataattgcaaaattatcacaatacatgaaattcgagaaattctattaataagaaattaatacaacaccagtgagatcaaaccatccttgtttctcaaaagcctcaccaaatatcacttcactgcttttacccggtatatattgcttgaagtctcctacttttcttgttttactcgactcctctacaaaacctttgattaaccaagtaaataataaattgattatcaaaagtaaaagtggagagaaagaaaagtaaattgttaggcgacctaaaatacagagagcaaacaaattttttaacacgtatataatatataatatataaatatatatttctctcaaattcagatctgatatctcatgaattaatgcactaaaatatgaattacaacaatctatcaaatgcctcattatcattatgtaaatttcaaaactctacctttgatttatttcacaactcaactgaaagaattgaaattatcagaccaaattagtgttcccacaatcatcagatcaaagaaatgaaataagtgttcccagaatcaataaactaaattaaatcttaaaactacccatcgacataattcctaacaaagcatccatacccaaaaataaaagacgaatgtttatcaagaaacaacttacttttgtcattccaccataaagccatctctgttcagagactcaaataaaaacatacataagataataatcaaaaaatcccttataattaaaatatatatatctatatagttacctgttagcaatgctagcgaatgagagagtatggcgggagttatcgatgactttgaggacttggagaccttcgaaggccaatcatcgacggcaagggcgatgtctgtattgaaagattgaagaatgggtttgaaattgaggatctctgataaagtacacgagagacctcaaaaataatctaatgtggcatatgagggcaactggttggggacagaaggagctacatctgaattgttgttgtgagaattggatttgctggaatttttcgttgatttggatttcttttgcaataaaatctagcgatttcttcttttccttgggtttcatgatcattattacaaacgaagaggccatcgttgttgcaaacgaagagatgatcgttctagagctgtaatcgcatatggattctagggatgagaaattcatatttaaaaaattaaatttggcttagctttcttgttagggttatacgataaaaatttaaaagtaatattaattttatttaaaaattaataaaaaaactgttattttctaatagaaaaactttaaaaaaaagtcaccattaatttctcataaaccaagaatttcagttatatagacacactttatatagaatagatacatacatatatatatata

SEQ ID NO: 43260 - DNA, 1922 bp, Cannabis sativa
cggtatttaggagaaaaatttagtctaattattttcatggttctgtacgtgttatatatagttatttaagatattttgtaaaattttaagaaatttagaataatttataatgtagaaaatacttttcaaacaatctattttatattcgtgtataaaataaaagactcacgcgtgtaacaacctgtttgaaccatatttttacattttaattttttaaaatttttcaaaattttgcagaatgtcttaaataattaaagcatacacaactataaaaaaaaattaaagaatttttttttttccatttcttttatttgcacaaactacaattataccattattatatcttttaatgattatacaaattaagccttatgttttaatagtgatattatctctacacaaaatacattttttcacactaattttgtataactcataattatatttatattcttttcatccatgcaaatgctattacctttgtccatgtgcatatataatgtaatggactcctatacattatcataataatttgatgtgggacatgataaatatataattattgaatttatatatagagaaatttttaagtataagatttttatgtatcattttgtctaggagcgtttttatttttggtattttaaaaaattataattcaatttttttttttatttgacggtgtatatatatatatatatttaataatttactgagtcaaaaacataattcaaaacaggcacatcatttattatttgaactatatcttaacactataaattatttaaaattttaaaaagctttgtgataattacaatatatatcgtcacataaaaaaagttaaattataatttttccaaacacaaataatataggacaagagtgataactctacctaaaatctccatatatatatataaatatatatatatatttataattaattattaagtgaatttttataaatgcctttttttatattttatttataatttttaattatgaaatgacgcttgtaaaattttaaaattacaaaaatacattttactcaattaaaaattactacattatttatccaaaaattataaaaaaacaatcttataacaattataatacaactaaaaaaacagtttattatttttaataagaaaatccaaagagtaaaaatgaaaactttttcgtgttaacagggttagtggattggatttcttagagttattaagaggaaagaagatcttattcattggagactcaataactctcaaccattgggaatcctttatgtgcttgcttcatgctcatgccccaaaatctactacaataactccaataaataatgcaacattttctaatggtattttatttaaggtaagtgtataaatactatatttagactattttggatttttgttcttggaattataatttatgtattattgtgattctgaactttttagcccgttaaaagagcaatttgcggcaaaaacttctttgtgctttagtttttaatacacttaacccttttattttattttttgcgacaaaaccttcttaagtttatttttctttgtaaatttgacaagtcagttaaatattaccgttaaatatcaattggatgaccactgtatacacttgtatatatgtaacagtaaaaccgcgaagtcgatacgttagtaatctagttggtatttaataataatatttacttgacaccttaaatatgtaaagaaaaagaaacttaaaggagttttgctacaaagaaaaaactaagggggttaagtgtataaaaattaaaacataaaattaaaacataaaagagtttcgcaacaaattgtttcgcaacaaattcctctcaaaataattcttaaactatttacagttttgtaaattggttattttgttaaattttttcatatgagaca

SEQ ID NO: 43261 - DNA, 1546 bp, Cannabis sativa
agaggtaaaaatgatagactttaaaaaagaaggtaaaaataaaagaagacaatatgaaaagggtatagagtgtaatttcctcacgttcaaagtagtggaagtaagcccaaacatcattatttccaatcaagttgggcttcttttctacaagcccatcacttaattccatcaacttcggcccatgcgtagcaacacaatgttagtacttccatccaagtcggtggcacctacgttcgacaccaagtatttatgttactgcttcactaaactataggcttgtgcggaaattttcataaacaactattttaaaaaaagaaaaaaaagaaaataggttcaactcacataataatataaattataaaatatctagttgaaaaaaaaaaaagaggaaaactctatcaaactatctatagtttcattcgtttcttttctctatctacagtatctacctaacctaaaaatgctaaaccatcttcttcttcttacgactgtcagcccatcttcggagagaggaggcggctttctttctcggccaagacccaacatcggaactgtggcaatgtgactagtattcttctcttttcattacttcttaacacaatttttgttttttgcacacacttaagcctcttttacaaaagggaaattgtttcattttatcatatatatatatatatgtatatatataattatagaaaattttctactatagtattaaattcagcaataaagttacaatagtaacgtatgtatcatattattttttattttaaatttcaaaattacttaaaaaaataaattctcacttttaatcttcttagccatttctcgctcctatttttgttagaataatcatgagcatgctgggtctttgtttttgaccctattatatgctagtcccaaaatcggctccttctcaacccaacagaatgttttttcaaagattgaaaaatgaagatccattaattacatagctaggagatctatcaaatagtttgatttacataaatatctcatgaccattattattctccgttttaaattactgcaaacaatcatagtcaccggtaaatcgtcgccggattgtattgtgattgtgtagttaaaagtatcaaaatccttgtttttgaattatatatatattaaattgaaacatcaacacggttaagaaattaagataaacaaaatataacaactatatgcattaaagaaggctaatttttttttttaaaaaaaaaagaagactaaaattaaaaaaaaaaactgtaccgggctctttatatatagcggagactcgatgccaagaagagccactcaagggtagtgatcaattctttcaatagcaaggagactcgatagtaagctgagaattactttgcatttggtaatagtctttcttcttattttgtgagttgtttattttcctttattggtcgatctgcttatttgtatcctctatcccaatataactattttctttcaaaaaaaaaaaaaaaaaaagcgaaaggtgtagcccacccactagcaaaatctattactagtcctt

SEQ ID NO: 43262 - DNA, 3035 bp, Cannabis sativa
aattaattttgagatggaacctcattcaccttagccactttcattcttaaattatcgataataattattaaattaaataatatgaaattcaatacttatattgatagttatataatacattataatagtattaaatattaccaatacttttgatatttctcatattaatatgatcataaatattttaggtgtagagtaagtgtgacttttcactagtaattataaaatattcaaatgagagaggataatacaactttgagtttttttaattattataatattatattattttatgttacttttataatagagtataattgtaatgagtattacatttgattttttattgtaatgaggactcatttactcaaactaatagtcattacattgtaatggatacaaaaataaaagggataaattgaaaaatagccacttttttttatcaactaaccaaaaatacctccattttaaattctattgaaacatacccacatttataagttcaataccaaatatacccttacctgtctcccatatgattcagtcattgactcctctatgcacgccactaagattttgccattgccgacgcacaaaagcattaccacgagtcagccattgatactgtccgttcgcatcttctgcatcgccgatgtccttccacctcttctgccaccaccatcaacactatacagttcaaccactccaattgcaactcgccaatattattcgatattgagggtgtgttaacattgtctttttaaatttgtattagtttgtctttaattctagtttctccctctcccaatcttctattttcttctattttgtatatgcttgtagataatatataatgcattttaagtgtttgtttaaataactcaatgaagtataactgagtccattcaatctttatatacagacataatcttttatctctttcatataatgaaaattagttattgatgtcaatttatatatccaatttgtacactatatttgggtcaccacaaaaatatatcactgaaacattttgttaattttatgatttgagttttcaataagactatcattgataattgtcctccttagctttcaattcctgtgctcatgcactaatagaaaaaactcatttaaatttctctaccactactgatagaagttttggataacgatagcatagttactgttgtgatattcttcaaccaagtttttaaattgcattaatgcctccattttaaatggtcaataattgtcttgtactgatatagttgaacatttgttggttgtgtcttaggaatagaaacttcaagcatgaaatgattattattgttttgactttatctattttcagagttctttatttaaaaggtttctaaaaaatttaactagtttaggtgttaaggaaggccactcaactaagaaaatataaatttgaagtaagtcctttctaaatgctcatgcacaccaaaaatattctagatgaatatgtgatgaacggaccatcttcaatccacctactggtgcatccattgaagagcttatatcccctgattttgatgaattattaaagacattttggaaaacaaagtctgtaaatcaaataaatggagatgtaaaatacattagagtcccttatgatgctatattctcgttttttaggtaacttggagtgtttttgacttctctttcttaatatatagatatatattgactaaaatctattaaaaaaatgtacaagatgttttgtgtctaaatatgactaagattaattcagttatcatagcaagttgtgttgtattctaaactatatacttatctatattaggtagaagcttatagacccaatgaactcagcttgccacggtcgctttggcattacaacaataacaaactctgttataagatttgaatttattttacttaattaatttgaaatgaaaaatatgaaaaatatattgagtaacccaattgaggctatacgctttgtaatagtggcattttggagggtggcctatgtctatattatgtttttcattcaatgcttaatgctatagctgataaggatggtgtaggagctactgatttgattagttcttgtgttccagttactaagtaagaaatcttgcttaaccccaattttagtgggagaaattaaatttggagtttgtatgacaatattagaaagtcaatttagcaaaataaaattaattttgtaattagtagcaatacaatatgtttttttatgtaagaatttgataagcttggctaaattattaaaagggaagtgtgaaaatagagtaatttttatcacaaaaaaaaaaaaaaaaagaatttactttgttttttggtttatatatgcttattactttatagtaattagattgaaatttattaagttaattagttgtataagattttttttttttaatttttaacatgaatttattaattcttaagtattggttccatcattagctctccattttgttgtgttaatcagagtaaaaagaacttggatagccaatcaattttaaaagaatgttaaaaaaattaaatatttgactacttttttaggatggggaagatatatatattttaacatgagtttcaattttatgttttgaaaatatagatataatcttatgttattattaatgtggtttaccattttaattaacttttttaaggatattaattattatatatatatttgttaaattatatatttttgaggtgccaaaaataatataattatttatatataaataatatgtgtaatattttataattatctttgtgatattatttttctatatatctttgcttatcttttgcacaaaatttatttaataaatcatgtcatttactttattttagtttatctaataagacatgtcgttttccttattttatgcacgaaatttacctaatatgggtttcgttcgaatcaagatcttctgttaaaatattgtgtttcatagtatattaaatcaatcttattgtgatagatcaattaatttgagcattttaag

SEQ ID NO: 43263 - DNA, 1172 bp, Cannabis sativa
tgcattaaatcctaaaggaaaagagaagcaaatctagctttattattatattaatttattatctccttaatctagctatagctacggtccagagcttttaaactaaactttctatatcttctctactattattattaatttatttatgaaaagttcacaattacaaagaaaaattgtaaccttttaggattggtggtacataaaagtagttaagtaattgtttaaatttcggctttctaaaaacttctttttgactcatttttaacaattggattaataaaatattttaagttatattatatgcaattaacatatgtttatacataaattatttatttagttttgtagcataataaaagatatcgttgtggagtagtttttttcttcaaatcaaacagcatatgccaacaagaaaagactagcagttgtaattaataaagtacccgaaaatcgattatacaatattaattaataaatagttgaaaagagatatctatatatatatgaatatatatatataattagtgtgacctaaaaaaaagaaatagaaagttctatatagtttgggcatatatatgattagaaacactaatattaatcagtacgaactaaaatgtgattcaattaattaacccgtaaatattttcatttatggtacttcttttgagtagtgatgattgcgtaaagaaagtgtgtgtagtccacgagagaacatatatgacaagtctttagtaaatgttttctctttgtgttgctttgccacaatgactaataatttgatctctctccctaagattttctaaaattaagtagagagattgcaaatcattcattatgtaggcatattttctgctctacaagcatgaatatgattgacgattgtggaaataaaataaacttaggatacatatgggcccaactattgaagataatttcttttggttgaaaacaacccatattaaaaaaaaaaaaaaaagtaaaatatgaaaatttaattaacctagaaaagataaaagtacttaactagtatatttagaaagtgcaaggttatggaagacttgacattttataattggttagtaattttttataaagtgaaacttaatataaaattgcaccaataaatatattacaccacaaaaaatactaaaagtgattcagatatactttgt

SEQ ID NO: 43264 - DNA, 2948 bp, Cannabis sativa
atgtctagtatgcacatccaaacacacatcaactactgaataacccatatacaacgaataagatgatgcagtcaagttggcacagaagtgttcatcgtacatacaggcattcaatgagctatagcctcacctcaccaacgacatcaatggtattccatggagatcgtacaagaaaattgagaactttaggacctttcgcaccactgctaccaataaaccacttgaggaaagggaataaaactccagccaaatccaaaatagacgtgaaagtgttctccaatatcaatgcagcaacctgcaatataaagaattgccaaagatttatgcacctaccagcattaagggacagaggaactattccaaacataatggtaataataatttattgccaaaaaaaaaaaggcacggtacttgagatggttgataggagttgtgagagaaaaatgacaaaagtaacacatcagaaaggctaaataaaaggttactccctttctctttctataagtaaaagatatataccaacgatgggacactacatccaaaaaggtgggaggaaagtaaaagttaaaataatgttaaaggtaataacaattagcctggaatgtacaagtgtaaaattgatatttaaaacaataaaggagaaagccaacacatcttactacatgacaagcatttctagattccaatctaggtttcttaaacacagaatgcttccttagcaagctaaaagtgagtaaagaaattcttagcatacatgcacacggacatagtacatacaaaaggagcttcaacacatggcatggaaattacaatgtatctttcaatcctacttaggtaaggtaatctttcaccttaaacagaatgtcacacataagaactcagtgtcaatggtagttatcagtagttccacaaataccttagtagatttatgatccaaataacagttctttagtatgtaatgcttgcctagcacatttaatcaaagccttgtcacctactgaattattattattattatttttaactgaaaattccaaacactgaaaattctgaaatttctaccacttcatttctctcctggctaaatattagacgtataagaataacttaacagcaaagataccttatcagggttatttttggtaaccacagctccaactgcacctccaagtgaccttccaaacacaactattctagatgtatcaatgtcagttctctgagaaagatgatccaatgcagcctaacagccggaacaaaatatatagttagaacatagctacgttataagcagtacatgaaactattgtatcagctaacaaatacctgagcatcctttgtaattccgtgttgtgaaggaaatccatcacttgcaccgtaactgtttgtatagataagttaatatcattcatccaacaagtatataaaggcacaaaaattatatctaacaacactagaagctgtcatgcaccgatccaaatcaagctgcaaatgacataaccaagtcataaaagtgaaatagaacacgaggttatatagataccctctatatgaaagcatgaacacgttgcactgcaacctctgtagcattatacggaccatgtcaagtcggtgagcaatatctacaggccaatagtcaaggccgctcaaaagtaattaaactggacatattaaattttaagaaaactgtacataatataacaaagactacgacgacgataataataagtaggatactcccagcattttcttggaaaaacaagagggttggacctgcaaaaccataaacacaaatttttaagcctaaaaaaaaaacacataatatccacggataattcttaaatgattcaaaaagaaataagactgtaaatttcacttgttcaattaacctaaaagcgtaattgacttataatatgcttgttagagaatcaaaaactagttcaacttcctaaatttttttacaattcacccaatggaatagaaacctaagctcaatttttctttccgaccacaaagttatacgacacaatcagatcttacaacttcaatcgaaccctaaaatgttcgactcaaacataaccataaccaaaattagtaaccagcttgaaattcagcaaagaagaaaataacgggttgaaagaaaagaaaagcggatcggacctcggcagtcgggaaagagcttgatgaaccaggcatgaaggcgtacgccatctgaggattggagccagacgtcctcgtaagggagtcggaggcgagcaggggttatggggtaggatttagtaaggcctggtagaacaggtacatagaccagacgctcctggagagcgaccagtaacgccattccggccaccaccaaacctcccactccgtacagcaaagcgttcacgtaagacaccattttcgagctggaactgaagctttggttctgtctgtctgtatagttattgagaaaagaaaaggggaaagggaaagtttcccccacacacacaggaattttttgttttgtttttaatttctggctggtatggacttgtgtttgtgccttttgaattgaatttcgcaattttccaaggaccaaaggaattagaaatagaataatattctcattattgttattacctattattattattattattattttttgaaatggaatattagaataatatttttactggattattttaaacaatttattaattaatatagatcttacttcaaaaaataatgcttaagacaacgccagttttcttaaaacggacaactaacactaacattgatagagtaataatacgtgtacactcaatactatacagacagtcttacatgataccgttttaggtacatatattaatattactattaatttgcgtgattaagtaagcacataaaatattgcagcaaaaaaaaaaaattgcagcaaaaaaaagtaagcacataaaatattgggt

SEQ ID NO: 43265 - DNA, 1506 bp, Cannabis sativa
ttaatatttgtcgctttactcttgcttcatcaccatgcaaaaaccgagtgagttattcccttttgaaagaattcctgcaattttcagtacacatcaaccaatccaatcacccacaacaacaatcaatttcccacctcattacaatgatttggcattgtttcctaatgctattaacccctttctctacatccttccgagaaaatttataaaggcgcaacaaatcattacatgatcggaaattcaaaggtggaaaaccatacctttcaaaggtatttcagccacagtcaccgagcgccagcaccctacaaaaaagtgtccctgtaatgccattcccacgtacaattttgagagaaaagaaaactcaaaaggaaagaaagtttcagctttatgccaccaattcaacatagcaacacataaagcacacactaatatatatatatattatacaagttccattctcactgagacaaaacatcaaacacattgactacatgaatttccaacctcagcccaacttaacaccaaaacatatacttcctctaaacatattccaaaaccaagtaaaaagagaacaaataactaacctctgaaagctgaaattttggggaaatgtggttgtagaacagagtgccaaatggcaaaaaagagaggtaaaaatgagtaataataagaaaaaaagccggtcttgatgatgatgatgatctcagattgaagataatttcccatatttaagataaccaagaagcttcttccttccaaaaagtaaacgacaaaggtcactgtttccttagctcccaatcaacacaacaacactctatcttcgatgactacgagaaatgggtctctcagatattctaatattattcctcctttgcctcgttaagactgatgatgatgacgatgatgattgtgatggtgatcttgttaaactcactattaaagtataaacctttgttaattactactacataatcacgtcattaaagattaaaactttatatataatttggggaagaatatactttttttgtaatgggaatatgtaatgtttgttttggtggggcgagaagagcgaggaaggaacagatcatcatcaatggcggatatagctgaaaaaaataactgtctggttttcaatttcgtttttatcgttttaaccgtttattaccgttataagtaagtaccgtatttatttatttatttattattattattatttaaagatatatttttttttacttttacactttaaaatagttttatagcaactcacatagcaactaaagtaattttaatcgcaactaaactctacataacaacccacatagaaactagcacaacaattgccggaacaacccaaactgtaaatttaaaaaaaaaaaaaaattagtatatgaagtatttttttttggaaaattactatatgtactatttttttttatttttttttaaatttacagtttggattgctatgatagtttctatgtatgttgttatatggatttt

SEQ ID NO: 43266 - DNA, 2519 bp, Cannabis sativa
aaaaaaaaaaaatattacaagaataccattttattatatttaatattcttactctagccacaactcgattagttatagctcttcttctttgtttcttttctatgtaaaatttatttctttagtttgttattcttcaaaatgttaattgttaacaaggctgcattagtataaaacatttgattaattattacattggtaataactaaatttttatttattagagatagaaaaaagatccagctattttcaaaaacgaagtgtcaacatgtttgtgcagaaacaatggtataaaaataaaactactaatttgataaagtctagctctctagctattagctaacttcaattacacgacttttcttaattcaattttactttcccaaaaacagatacaaataatgttattcttagaaagaataatagtgaccatgattaaatacaacaaacaaacaaagtgtctacactttcatcaatattatacaattggaaaagtgagaacaccacacctttgacccgtatacattatattatatatatgtgtccatatattttattttccaaatcaaacgaatcaaaagaataaaaaccaaacgggtagtgttaagaaaatagctaagcaaacagatacagaaaatgagatttaagtgtaaggttttctttttttttttttttctcaaaaacattttggtagatctttgggtggtggtggaagcttagaggagggagtgtccccattctcaacctcaaatgcagtagctaatccccatggcaaatgtacatctagatgacagtgcatcaaccatatacctacacatacaattaatttcattatagttgtgtacatgttatataagttttttaaatagttgacaatatttcttaataattaattacctggattattagcttggaatcgaatgacggcccaaccgccaaccgggacaccaatggtgttacgaatttgaggattaactaagttaaatttcttactatcacgacgactcttgaaattaccaaagccttgtgccaagatatggaagttgaagccatggagatgaattggatggttttcaacaccaatgagagctgtgttttggaacactatctccaccacttcattgaactttaatttcgtcactttcgtccctttttgtgcgaacagcaatgattggtcaatactcaaacttgtgttcgtgtagtcaaacttcgttggaggccgtttaggaaaattagttgtgtaaattccactcacaccagaaaaatatgcttccaaaatggatattgtttttggtaacacaaacgattgattgttcatactagctgagaaactctgtccaaaaggacccggacacgtggcattccctgatttgcaaaagtcaagacttaatcctatagttataaacatatgtttatctacgtggagtgggactgggacccattggggcccaccggccaacccagttaagttagtaaagaatgtgtgggctgtgggagtatcattgaaagctggtaagacaggcatgattggggttgatgacgtggaaccctcgtagacaataatacccctagttgttgtgttatcaaagggtgcaccagcaacggttatgtagggatgagcggtcatgtaataagatccaacatcttggttagcagtgaagagaatatcgatagtttgaccaggaccacttacgacaacatcagtgatatatgggttcgtgtaagatgcgtcgacagcaacaactgtcattttgtgattggctatcttgaaaaatagttgattattgagtgcagcattgattatacgaagcatgtaggtttttcctttcaccaccttcagcttgtatgtatctgaaagcaaagaattttggtgtttaagagagagtagagtaggcagtaatgtgaatgatatagtattggtatttattttgagttaccatttttagagcaagggtaaaagtcaccgggttttccattgatggtgaaagcatcagatatgttaggagctccaccactaagaagagcctctttctcaatgtcaaccacattaccattccaccattcccctgaaattcatggttacatatataattaataaactacattccttttactgcaacataaaaaaaaaatggacttttttatttttataatttaaaacagttttttttcttgtatttttatgaaattctacataaaaatctttattgcaactagggctgtaagttaaattacaacaaaaaatcgtatgaaaatccctattgcaactagcactgtaaccactttagaaacttcaacactaaatttgaaaaaaatgttaaaaaattagtatatagaataattctaaaaaaaaaaaaaaacattccctttccttttatcaatttattttatatatatacacaatttatcaacaaaacaagcccaataattttcccaatcgagaaaaataatgggctcaattacaaaagtgtgtaaaatttgggcctgtaatttgggttggattaagtttataagtacagcta

SEQ ID NO: 43267 - DNA, 1306 bp, Cannabis sativa
ttgcgtacatcggcattgaaagacctactgatttgatcagggtagcacgcccagccttagaaagggttttcgccttccagcttataacgaggtctccgtatatatttcctctgtcactctctggtttcccctctaataatgtatcaatatataattactgctacatgtgagtattattgtacttggtgcatgggtttgaaagtccaacctatattcgatcggtttgcaaagatggtattattagctattactttgtctactattggtccaattattcatcatgtactattttattattacagtactgccattcttagctcttgtcattgtctccccatctcctattttatttactataaattataatacagttatacgtaaactagattgtttatcatataataatatcatctactcaacattaatattaattccaacatataaaaggttaagtaaaaaagagcattactataatacacagttactcgtaaactagattattattttttaccttttctctgagtatagtattagtttaaaatgcgcgtattcatataatttatacaagcacggaaaatatatattattattgttattaataatttgtctagtaaaaacaaaaaaacaatacatttaattttgagtggcaattaaggaaatttctcaagttgcactcgtgagtcgtgatcacttgcttgacccatatctttgcatcatgtggtctgatactctgattgtcttttttttcttcttctgtttgagatctcatagaatttttatttcattttatatatattgagggtatagtcagataatgatataataacaataattgagttaagtgatgcatggtaatgttagagatagagtgcatgcagggggagacatatatataagtcaaaaaggtagacccagttaatattaggcagatggggctgggcttaaaaggggtcccatatctgtttatttgaatgagagtgagacgacactgcattaaatatcatgtaccctataaatatatatataactgttcttaattcaatggacatatacatggacagctgttgtttcatcatagatggcctcctcttctatataatatattattatgggagttttttattttattttttttgtcactaaaatttgtttaaatttaaacccttttcagaacttagtattagtataatattggagtcatcaataatgttgtgtatgtcgatcacacatatatatagaaataataataataatatataatttctaggctaattaggatttttgccccctaaactttgacatgtac

SEQ ID NO: 43268 - DNA, 1135 bp, Cannabis sativa
ctaaaattaaaattttttgtagtggtcaacagatcatagaaaagaatttattactcatagtaatattccccaaatccttccatagaacttgcctccccctttgttgtcattgaaggcatacactatatatagttacaacaaacttatcacatatttttagtttaataagacaatgaacccattgacttactcctcccttgatatcacaatcaaaataactaccgaggttctgagcaataatgattcttcagttagtgtgaaacaccatccttgaaacatattaaggcataaagccctcattcgagagactttaacctttttttcgagaagatcaacaaacaatcttattgtttatcattctcgtgatatctttttgctaattgttggttttgttgatcccctgaacattctaaaagaacaacctatccatttatagtagaggacctccctcttcatcaataatggacctcgtctcacacaaaatatctccaacttgaacctcactcacaaaaatttcctccaaaacatcaaaagtgttgctaacatttgaccttggaaggtgaggcaatactcactttttaatccttaacagcctaaacttgttcatctatagtactttactgttttagcaacaggagccttagtatcattcccatcgacattttttttacgaatcaagtatgtttattgctcaaaaactttttttgtagaatctaatagcattcgccaaatgaggagaatctaaatatctataaaactttacaaggtatcaaaccattctttttcactgaccatatacatgtaattctctttttcactatgtttttcactttgacaatcacaatatctacatttgtataagaattctgccataaaattgtgtttcttctgcgccatatttcataataaacaagggctgcaatgacagcaacaaaaattaatctcttcaccttgcttatttttgcctttcttaccttacaattctttctaaggaagtggcagccattctcaaattcagccatgaattaatcttttccaagaattccaaggagaaagagcactcaaaaaatagatgtgccacagtctcatcttcaatgttgctgagaaaatatttagaattctcaagttccttata

SEQ ID NO: 43269 - DNA, 2494 bp, Cannabis sativa
tatataaattgtcgttataataaaatcttaaaataaaatacttttataaacagagcataaatatcccatctttcaaataataataatataaagaccttagtaacaataataacagtcatagaaaaccaaagggtgtggtagagcagagcgccaagccaccagtggcagcggcaacccagaatataggagcagcttcatattcgactttcacttccatcaaccctaaagtctcagcctttcttcttcattctaaggttattgctctcatccattcatctgttattatgtatcaatatcaccactttgcctgattttaacttttatttatttgcgtgaaactaagactctacaaattaggattgggatggtgtgtgtgttttctttgttgattgttgtgttcaaaatagaatgtatttaatcttcactttgatggttttttcttttttcgttactgtgtgttttggttgaatacaatcatgaattcttcttctttgttcatactatgtatgaatttagggtttttaggtgagaattattattgaatggcagaaacaaattaggtttcgagtgagagattgttttataaaaggaggggtcgaagttttggtgtttgttttggtcctacattgatagacgatcattctgtatgtttagacctttgttcaagggttctcgactgatcttgtgttcttgtttagtagggaaagtttcctaaactggtgtaacatttattgagctgaatgggtcgtacttcaacaaggagaagggctgcgaagggaaagagtgtccgatttgagagtgcatctagtcaggaatgtagtgatgaaaacaatgatgttaggctgcagaagcgaccaaagagaagttgcaccaatcgccaaagaattaaccaaaactctcacagcagcgcaacgatggctcggttagggagcttaggatctcatgataataataactgtgatttgaggtcagagaggcgattgaggagaaagagaacaaataaacaatgttacaagccaaaatctcgcagcaaggcttcaaaggcaacaaaaaagaacataactggagaaaaatcagagcttttgaaacctctgagtttttcaaacattagaagtaagcatggtgattatgatcatattgataatgataatgatgttgttgctctgtctgatgaagaggacgtgtatgatcctgtgcatatcaagttcttacaatgtttgaggcgaaatggaaactcatattcagctgagtttgttgatgagattggtgtgactaagctaatcgactatgacatagaagaggacgtgcgccctagtatgagatttggctttgaaaatcaacttctgccttttgatgaagatgttgatgaagatgattcaaaagatgttgatgaagatgatttacaagatgtgcattctaatttgaaacatggtttagatgctgattgcgaattggaagatgatgaaattttgtatctcagatatctggatggtattgaagatgatgagaatacaacaccaaagaaatctaaaaaagttgaggagattcaacttgggaacgaatccaacctagaagatgaaagtgatgatatatgtcaagactatcgcacttttctggattacctggaaaaaaaagatgaagaaaccatgtttgaggatgatgatgatgtgcaaatacttacaacggatgagaaccctcgtgacgtagtatgttctcgtacctcaacttgatcttattagttttctcttaattattctttcatacaattgtgcttgcttaatgtgattagtttttatgcacaaatatctgtgtagatggcctctgattttttttcaatctaaaaaatattttacaaatgattagatagatgtagacaactctactttggctaaagatggcaacagaagtcaatcccaatcccggtttaggaaggagctcttggaaatattgagaagcccttataacccacaacagcgtaaagagctttgggacgaagtatctgatcgcaagcccaaagttaaagacagacagttgcggaacagaacaaaatcatgtcgtttgaaaaacagccctggacaatcgtatcttgatcaacataaaggtcagttggagtcgatccattgttagaatttctgcatttgcttcatctaaattcttatgttttgctcatgcttaaggtttcatacaatatgtcataagttgctttcttgtggcatttctataatgttgcaaagtttatgaattaatcttatatttatgcagattttgcagatcagatagagctagccaagaatgatgatcttaaaactctaaatctcttaaggggattcttttactggttgaaggcaagttttccatttattttattaatttgtgaaaggttgtgctctatatttatgatgacgtgtgttgagaatcatgggattccatctcaaaaccaattggcaatgactcaattctctaccatttattccatgtgggacattgtccacaa

SEQ ID NO: 43270 - DNA, 5616 bp, Cannabis sativa
ctactttttatggaaaaaatagcttaaaattgacaaaagaataataaaaatataagtttataataaaagttggacacaccgcgcgaagcgcggcttagttccctagtgtaatgtaaagttaagacataagacatgtgacaaagaataagaaaaagacaagacaaagacttgccaagtcttgtgaatgaagataataaatctacattaattcatgcatgccattaataaactcatagctagtcaagagtactagtcaacttcctcaatatagtgtggtaatttctagccaccaatataatattaatattagagatcagtacaagaagtgtcacttttaccagtatagtttgctattgcgctgttactaccgcatttcgcaaactgcgctagcaaaaaagtcaaagttttactaacgcatacttgcagtggctaaaatctaatttttaccagcgtatttacacactgggaaaaatcatttttgccagcacacacttttaattttgtactggtaaaagttctaatatcaacgttgatttgccaacccttttacaaacacatgagaagtaaatttcattttactagcacaatatcaaacttttaccaacacaaaaatgtgtctgcaaaagtaattttttgtagtgataagaaatatctaattcatcgctatattattatattacacttattagtagccgacactaacttttttgaaagttcagacaattaattaagtttacacgtacaaaacattcaaaattgtttatatatatatatatgtttgaaagtgatgtgatcaaaccgatcacaatgtccaaatatcaagaacaacttaattgatctaagtctatgacagattaacaaaaactcaatacaaagaatgtcaataaaaacagtaaaacaaactgagtttaacaagacaaaaatgaaatcaatattcagccattaaactactttccattaaacatgtatgcaaagaatacattgtacatcaattggtgattcgaactagagtaagaggaagagaaattaaactccaactgagcacaccagaaaactggtttctttacaccagtacactactctctctctctgtcactctctctctcttgtttctgttaaatgaaaatgaatcacacctagctaagagttagttgagtctatttatagacaaaccaacataactaacttaactataaaaccggtaaggtagttagaaagtcctaagaacatttagctaaggctaagtttctaggccactttacaacagaaagtttataatggtcacattattatctcaattattattcttgccagaaatataatatggatagatcattttctcataaaatgattgtgatctttttggtgatcactacaacaaatttggtgatcatgattttgctttacacgagagttgttagcacagaatcatcatcatcatcatcaagtagcaataatatgatgattatgatgatgataaggtgtaaagacgttgaaagagaagcactcctcaagtttaagcaagatctgaatgctgatacccttctttcttcttgggggagtgaagaacataaaagagagtgttgcgactggatcggaattcgttgccacaataaatctggtcatgtcatcagccttgatatttctccttcaacttttagttttgaagatattacaggatatcgtatgactaagtcacatgatccaggtaataaatatgctataattaagttctttattacttgagttgcaaaatttgagatatttgtgccttagtctcatgaatttggaagttcagttcccaagttttattggtaatccccccaaattacaataccttgatctttcttccaattctttgagtggagaaattccccctcaatttggaaacctttctagcttgcagtatcttgatctaagctataattatgatttgattataaaaaatctggattgggtttctaccctttcttctttaagacatcttgacttaagttatacagacttaagtgaagtcaaaaacgtgttccaaccaatattgttaggcaataaacttcatcacttaaccaatttgaagctaagagcctcccatcttggtgaaatatcaccttcatttcattctcatgtcaactcttcaaagtctctttccattcttgatctttctgagaatgatatatctattcatatattccaatggttgtttagctccatgcccaacctagtccatcttgatttttctcgtaactcgttaagttcatttccacaagattttggaattaattctacaacaactgctttacaacaccttgatctttcttggaatcaaatacaaggtattattcctaatagttttaaaactaccatggtgtcactcacatatcttgaccttagctataataatttagaaaattctattctaaatgattttgggaacttgagtactttcttagaacaccttgatctttctcataactcgttaagttcatttccacaagattttggaattaatgattttgggaacttgactgtcttagaacatcttgatcttagctataataatctcagtggtgaaattcccaaatcattttggaaaatgtgtacactacgatcatttcatgccaccgataacaatcttaggggagcactccctaatcttagtgaattgtcgtttaggtcatgtgcacattactcttttgagaatttggatttaagctccaatcaaatcaccacaatgtttgtcaatgttacaccactctcatctttgaaagagctcagactgggctcaaatcgattgcatggacaagtagaagaaagtattggcaatttaaggcatttggaggttttggatctatctaaaaactcgctacaaggtgtgatttctgaagcatttttctcaaagctctcggggttgtatcatctggatttatcacttaataaacacctgcaattgaatgtctctcctgactggattcctccatttcatttacaatttcttgggcttcagaattgtaaaatggggtttcaatttccaaagtggctaaaaactcaaaacaatctctcacatatagatatttctaattcaggaatttcacaatctattcccaaatggttttggaatttgactgctcctttatctaatgtgaatctttctaacaaccaaatcagtggggttatagtcttgaatgattattatccatcaacaacgacatttcagttcgttgatttgagctcaaatcatttcgatggtccaataccaaatattttattcagagctcgagcattatttctttcaaaaaacaaattttcaaatctaaattcaatatgtaataatgttagtcatgattataattactttgacttggactttcttgatatctctgataatcaattggttggagagcttccaaaatgtttttcgaaactccaagacttacgatttctcattttgtcaaacaataagttatcaggaaaaattcctagttttgttggtaacttgttttggattacatcattgcatctgaataacaacaattttattggaaatttgccttcatccatgaaaaattgtagagacttgtttcttcttgatgtgggaagaaataatctagtggggccaatacctttgtggataggagaaagtcttcaaaaccttaagattctcagcttgagatccaatcattttaatgaaacaatccccccaaatctctgtcatttgtttaaccttcaggtgttggacttttctctaaataacatctctgggagtataccgcactgtattggtaatttttcatcaacgaataataatgaagatggaaacaactttggtgtgataagatcttatatttataattctcttggaggtttctcttatgatgaacaaattttcttgatttggaaaggaactttatctcagtacaaaaatactcttggtctagtaaagtttatcgatctatctagcaacaagctaataggtaatatcccaagagaaatctttaaacttgatggtttggtgtctttgaacttatcaagaaacaatttaagtggacaaattcctacagagattggccaattggtatctctagatgctcttgatttgtcaagaaaccatttttttgggaaaattccttcaagtctttcgaaagtggaccgtcttagcacattagacttatcatggaataatttgtctggaaaaattccaacaagccctcaactccaagctcgagatgaaacctcatatattgggaatcctgaactctgtggatccccacttcttaaaaaatgtcaaccaggtcctccccttcatcttggtgacgaacacaaagaaaatgaagatgagctcatcaccaaagggtttttcattagcttaggagttggatttgtggttggattttgggggatttgtttcactttgatcttcaacaagtctttgagatacgcatctctcaagttcttgaatgatgtagaagattggatatacgtaacgacaagactgataaggagaaaatacttcaactaatcagaagctaaaaggtataacatactaatatgtctttcaattcaagcttaattaattgatacttgtattattaatcatatttaggaggtaacttatttatgaagagtatgaattttgcaggggacaggggatgtagcacttatcaacttcccttcatagaataatttgtaagcttaattaagactattttcaatatttgatcatgtaatggcttgatagaataatgtgtgtttttagttctcttctagcttttaattttaatttcatgtcaacacattttagtttaaagcgctttaagatttataaaaataaattaacagtattctctagccaacaaattaattttgaagttatttaagtacaatattattttttaataattatatgtggtgctcattgtataattattggaaacatatgaacattcccgaggcggcgagggaagttagctagctaggcgcgtaaaggatgaacgtaaagtggtccattcgcgagcctaacttaccatggaaggaggagctatatagctaccaaacattctcacaagaaggagtgataatttctcttactcatgttcttcacacactaaatatgttaacctggcctcttcccaacaacaactacctactttttaatcaaatatttgtacacatgtaaaggtttttgaacccaattacattaaacactgtacagagatacaacttattagaattattttatattagttatgcctaaaaattatgttcaaactaatgatatcagatattggttctctaaaatttgtaaagaatagatttaatagaagttgagttgatttgtaatgtaatggtttgtatttatttggttgtaattggtgattgtgaatttaaaagtgagcaatgattcttattcatcaaaaaaaaaaaaacattcatgatcagttcttccatcatttgaggatatatgcatgtatattatagcttggtcttattccatcgacaatgtttccatttcactatacgtttctaattaaagcatgattacatatttttaatcacatgatcaattaataattttaagtatatgggcatatttcagtgatatataattttttactcata

SEQ ID NO: 43271 - DNA, 1947 bp, Cannabis sativa
acgtagttaatattttcaagaataggtggatttaactggaggatactatgacgccggagacaacgtaaaatttaatttcccgatggcgttcacgacaacaatgctgtcatggaacacactggaatacgggaaacgaatgggcccacaattaccaaatgcacgtgccgcaatccgttgggcgacggactaccttttaaagtgtgcacgtgcgacgcccggtcggttgtacgttggggttggagacccaaatgcggaccacaagtgctgggagaggcccgaagacatggacaccgtccgatccgtttattcagtctctccctctaatcctggctccgacgtggctggagagactgccgccgcgttagccgcggcttccatggtttttcgcaaagttgaccctcattactcaaagcttttacttagcacagccaagaaagttatgcaatttgcaattcaatacagaggctcgtatagtgactctcttggttctgctgtttgtcctttttattgctcgtattccggttacaaggtaatttaattacttagttttatataaatataagaggggttttttttttttttttaatttagggtatgtacttataggatgagctgctgtggggagctacgtggctattgacagcaacaaatgatgtgacttactttaacttcatcaagtctctgggagctagtgattcacctgatatctttagttgggacaacaaatatgctggtgcttatgtccttttatcgagggtaaacaaactaatatcccaatgtcaaaattaattttaatataaatgatgatgttatttaaaatggttgtttgttttttgcgttgcagagggctttgttgaacaaagataacaagttcatgacttttaaacaacaagctgaacaattcatatgccgaattttgcccaactctcccacttctagtacacaatacacacagggtaactaacatgagaactgcttttaatgacaaccagttgtgtatattgtacttttagactcaataaataaaatgggatttttgtgcaggagggctcatgtacaagctacctgcaagtaaccttcaatatgtaactgccatatcatccgtaatttctacttattccaagtacatagcagtaactaagcaaactttcaactgtggtaaccttgttgtcagttcaagaagcttgaggaactttgtaaagagacaggtactatacatatataaatataaatcaattatttattaatgagtttagtgtagtagattgactagtacttgttttcttcttcttcttcttctcattatattgatttgggaagtacgtactttttctattttttaggtagactacatactaggggtgaatccattgaagatgtcgtacatggtcggatatggtccaaactatcctaaaagaattcaccacaggggatcctcattgccctcattgtcaagacatccacagtccttcggttgtgaaggtggttttcagccatttttttactcggcgaacccaaatcctaacattttaattggtgccgttgtgggaggtccaaaccagaatgatggctacccagatgaccgttctgactacagccacgcagagcctgctacttacattaacgctgccattgttggacctttagcttactttgctggaagctccaaattctaattagtttagatggaatctgttttaggagtactttactaattgtaaaaaagggatactacatcgtgctttgttctccctaatgtgattgtgtaccactcaaagaaatcatttgttggtgtagttacgcaatttcgatgtattcacatggtggtaggaaaagttggtaaactaagaattaatcatgtttgttttggtgatgaggacatgacttatacatgcatagtgcaaacaaacattaattgaaacatctaactctgtagtactctgcctc

SEQ ID NO: 43272 - DNA, 2359 bp, Cannabis sativa
  modified_base (67)..(67): a, c, t, g, unknown or other
aactttgatatgtactaaatcaggtcccctaaactttcatctattttagaatttttttactaaaatnagacaaaagtccttaaatttaacattcttaatagtttaggggaaattttgctgcaaaaaaaatttagaggcatgatttagtacatgttaaagttcgggagaaaaattgttaatttcgctaatatgtgagaattggaaagttgacaaagttaataataataattataataataaataaataaatacactcattccagaattggagaaaacgtagcaccacataattaattttgaaattttacgaattcaaacagggtatttgagtcaatgacaattaaagcgtgttaagttgtctggggcatataagtaatttcactaaattaaatattaaataaggtaaggggaccactttccctttctcttccccaccacacccaagtatttttatttttttattttaaattaaaataaatcaaagaagataaaatcattactaacaatattttaaaatttaattaatattttaatttaataataataaatattatttctttggtttcttcttcagcggaatcctcctctctcaccctttctaatggcttcaataccaatccaaatctttctcactttctctctctaaaactttctctacaatttcttctctcttcaaacttttctctctcagaaaatttcgtttacttctttacattgctcaatattttcatcttctggatgtggatttattcaatttaaaatcattggtgagtttagcttcaattcaaatcttttcaagattttgtgtatataatcttgattgttctaagattctaggttacattattgctttcctttagctgtattctctgtaatgcatttcaaattaacatatctgtctgtttggtttccctgaaaagaaaagaaaagaaaaagaaggaaaaagatcttattttggattctttctttttccacttctcattttggtgctttaccagccatttatgaagttgaaatgggcgtggtttgagtgaagatatttgttgagtattaagcaataagaattggaaactgatttttttttttttctctgtttctctttcggattatcggttaaaagtcttctttttctcttagctttaactacctggtgttgaattctctcttctgatttagttcttttcttaaaagtttatgactttttattaacaaaccaggtgaactcttctactatttcgattatctctgtaacattttttttttatatataattctttcaattatgcctaatattggtagtaaattcttggttctatgtgtttataaccctatgatattatgaaagtaagtattgagaaaaacttgacttagtagtttatttgagaagattgataagagaaaatggaatagagtactattgtatttgtctcagccttttgtgggtttatttttggttaaattgaggtgaaacccttaattttccatagctgattttttcttttcttgaattacctactgcagctcaagcctccctatttctatgagggttttttttcatggaagtatatgtgaagaaaatgaagccaaaattcatgcccatgaagtttaatgcttgatcactggaatttcaagtggagggctacaaaatgctgataaatctctccctgatattcaattgctcctacaacgaagaaaagtccaatttttacgacatcaaatgctctgtgctagactctagctctaaaccttgtctacaagctaatggtcaatactgtgttgacagcttagatacctctaactggagattgtttaaattcaactgaaagattgttgcttataataaattgaaatttcaataatggaaaggtaagtccctgtcccatgcctagtgctagtttgttgatttttattttttcttttttggtattattgttttgtttctttgaacccattatatgtatttatttatattttcagatatacaattttggaagagcttggtgatggcacttgtggcactgtatataaggccattgattctaggacacatgagattgtaagctgcatcataatttccttgtatatataaatttagattcacttatttttccaagttatcatcatgttctttcttgatcatgaatattatttttgatccggtgattccaggttgctgttaagaagatgaagagaaagttctatttttgggaagaatactggagattacgagaaataaaggtatgttctgtggagaatttatgtttctttgttgcacgctacatgtaatcctcaaagcattgaagtttcataaactcatacttctacaggtcctccgtagactgagtcatcccaatatcat

SEQ ID NO: 43273 - DNA, 4695 bp, Cannabis sativa
ttttgtaatttttttttcttttttgtatttttttgtttttttccctataattaatgatctaatatatttattcgtttttattacaatatattattatgtaatcctaagaaaattatataacttaatttaattagtatatatttgtaaaataagttagaatgtagtaaatataattttataattttttgttagctaaattattatatttaattattttgctaattttttaaaaatttgcatcataaccttaataatcctatggtcatttttctactgtattatagttttacaataatatgatttttttaaaaaaagaatcagcagataaatcaaaataattttgtatggcaatttgatcttttaagttttctttaacaaattattaaaaataaggtaccaatttactaaaaagaaatttgagagccacatgaagattcaccaattatttcaaaaaaaaaaaaaagaagaagaaagattagttaccaatttactccgtccaggaaaggcagaactaaaacacatggaaacaaatattcattgaaataaaattgaggcttccataaaatcaaaaaccaatattccattacctaaaaaaggttacaatatgacttttcaagtgctaaaacaagcaaaggaattgttttaggcaagataacgatacaattttctgtctgtagtgtccctttccaaaaaatcacgctcaatgagggactcaatgcgtttcttaatctcagttggattagctaagaaccgagattgcagctgtttagtcacctcagctattatgttgttatgatccagagtcttccttgatttcatgatcctcactattgcagcttcaatctgcggttttctgtcctcctccactctctgacgggtctcctgtttctcaggttctgattccttttgtgcaactacggttcctattttaaccttgtagaatttgctggcaaacttgtcgttaacaaagaatgcatcatcctcaccaatgtctttactcatgggctctttccgaaggacgttctttcccttgacaagagctaaggattgcagacacctctttagatcgggagctggaatctctgtggcctgctcaatctccttatagctaagacgatcagcattattgaatagcatcaggacacacatttgataagtcgacacatttaactcgtgcttctggcccttgccaaaagaggcctttatatcagctgtccccatgttcgtttgccaggacaatctccgaccagtatgggttccaagataatatgaccgaaacttctcacaaagtgctgacatttctgctggaaggttgcatgtaacactaggctgagttggccaagatcctgtagtcagaacctggacagtcaatgtagggccacctcctagttcaggatgactcgcataaaacccttgcatcgtgtcttgtgaagttttcatgtctgtaaacataccctctaattttgaagtgaactggtatccacactctgtcttgagcttaactatcaaacttctttcggcatcatcagagacagtttttccagataaaagcctctttgccaaatgctgtttatagtatttttcaaacacatctttttcctgcaggtaacggaacaacatcatcaccttgtcaagaattatttctacgtcctcttcgctaacccccttcaaacctttacggagcttctcatcaacaaacaaagatataaactcaggtgaacgggggttcagattaatgaagtactcaaatgaagaattcaaagcattctgaaatgtcttatcgttgttaaacgatgaactaataatcctatcatacttgtctttttcatccagcagccgttgaacaaattccacaggatccttcaacttttcaggatcagtaactagttgcttaccagtttctctgatgtgagaagtcatcacctcgcgtattgtcgacagaccattgtgaacccggcgaaacaggttgtacattcttttaagatcttcatacttatcatccagaagcatgtttaccagacctgaattttccatatgcactaatctcagcatgtggttcgcaatcatctctttctccacaacattggttatcttactttcgctccttgtgtccaagtaatgtgtgaccctttccacttcctcattcaaccgtctctcagccttcttcaaataatctccacaatcacagcattcaataaacttttgggactcacccttatagaactcagctgaaacatcaaggaaaggtttctcaaagtcctcttgataaacagaaggacccaaatccatcagcatctttattatgtttctcatcagccccctgttaataacttcaccagtccgttccctaagtattagttcaagaagcgtattaagaagtcttgcctgaatcttagtggcgtggacaatattatccctccataagttcagccctagctcatgaacaggggttttttgcgtacttggaatataagtcctatccatgtacatcagtatgtctcgtatcatttgcaaagccttgttgtggtcattccatttcctgtttagttcttcaagaaacaagcctccctgagctgcttcaatagattttgatatttctttgagatgagaagtcatggtggtaacaagccccgtgtacagcttctcaccaaatttgtgaagcaccatattgtaggcatttctaaattcatgaagaaactaaaacattacaaactcataatcctttttataatgaaacaataggtaaaccctacagatcacaatgataacataggtccacatgcccataaaagtatcgttcatagatttttgttcttaagttgttctcagatattttaaataaaaacaatagagatatttagtaagtacttcgtaaaaaagaaggaatacagtaattgttgtattcaagttatcatgattctcaagaaagaaatgctcaatggagagtgaattgaactactattaggatcattacagccataataactaccaaaataaacatcgctatgcctattctagttttagcagtaataacattaacaactggtcaactaacataaacctagctacgcgaatgttataggaataaaagtcaagaagcataagtcttcataagcccaaacgacagtagctggcatcacaatcctatgtagtttttttggctttctaacccaactttacgctactacacaatcaatgaattacataatcttcaaaagttcaatcacaacttactctagggttaacgtattccgtaattgcactcataaattccgagcaaactaacacaagaaaataaaacccctatatcgaaagcatcaaattataccaccgagctagataattacaacagcaatctccataaacaacttgaaccttaaatcacacactaaatcaagagaattaaagaagcgccacctaggaaagggcatttcccatcatacataaaatcttcgaatcatgaaagcacatagaaaaatatttcagaggtgccaaataaaaaagaccgaagaacaaaaacggacctgtaaagctcctcaaagctaagtccactagcattgtgattgtaaatctcatggattgcatgctctaaaatcttccatgtcttctctgcgtatttgggatccaccacaaccctatgtttgaacgcttcaatctgaaaattcctcttcttctggttactcatattttgttcttttcacaaaatcccgaaaatctgaaacgtgtagctccgatccagaagctagacgaatccaaatctaaaacagtagccctaaaagaaaaagatcgacccgaagattcgaggtcaccgcaatttattgaacaggattacaaatagggggaaattagaaacagagcggggaaagaaaggagaagaagaggaaaagaaatggattagatttatggcggattgggtgatattatataaacatttaggaataataataagaaataaatattaaaattacagtttagccaaacaaaaaactgtaagcagagaagaagagaagaaaagggttttgggttgcttgggttgggtgggtacgccagataccatacgtgagaaaaaggaggaggtgtgggggactttcgaattttcttgataacaaatccctttccttttacaaccaaaaacaaaatattgaaatgaacctttttttttttttgtggaataggaaatgaacttagtttcaaacagggccattgcctccgctactgattcgtacactcattcttagtcaattattagatgaattagtatttatttttgtatagatttaatttgttagtgtgtaggtttgggcttaaaaggcaattttgtgatggattgagatctttgagccaattttcgacaatgttttcatcattttttcgaagaacttatgaaacccaaaatgatagagctcgttcccagatttccaaaacatgttaaatcatctcatttggagtttgttcgcgaaagttttgcatgatttactgagcaaggtccaatagcgacaaaaaatggcctgtggcgctatagcacaaaaattgttgtgctatagcgccgattccgaaaaaaatggtttttgcgctaaaacaaagccttgaggagtaccgcatggcgctatagcatcgggtcttatgtgctatagcaccgtactaggaatgtcaatctgggctattttcgcgggccgggccgggcccccggcccga

SEQ ID NO: 43274 - DNA, 2799 bp, Cannabis sativa
tcggatctaggcccaaatcttaaccgggacccagatcttgaactctcgacacacaatttaaatataaaatcaataaataaaaataaaaaataaaatttgtagaaaacatttttatttttttatttttaaaattaaaaaataaaattaataataaaacgtatttttattttttaaaagtaaaattttattttttatttttataattaaaaaatttaaaaataaaaatatttcgaaaccccaaccaaaataaattaaggtcactcatcatcaacacgtatgtgacgtatgggtgagggtgagggtaatatatgagggaggggcctatataagaactacatattggtaacacagaatacacatcaaattattataaaattggtagctattagataatatatagttataatgtcaagaataatgctagtgtcgctttttttagccactctagtggctagcgcctatggttcatcatattatcctcttataacgaacgaaattcacctcatcaggcccaagtccgggtcaggtggcacccccgtgaacggattgtcttgccttagttggcgatttggtgtggaaacgaacaacataatcaactggaaaaccgttccattgtcatgtgaggactacataggccactacatgttgggaagtcagtacagaaaagactctaaaactattaacaaagaggctttcttccacgctagtagcctcaacatttccaagaatggcaacgacgcatgggtctttgacattgatgagactactctctctaacttaccttattacgccgaaaatggctttgggtaattatatataatattatggtcccatgcataacctacctagcaagtactgtcattaattattaattaaataactaaattataattgtttggtgatttgaaaatatatatttcagggcggtgccatacaacgcaacgaagttcaatgaatgggttttcacgggaaatgccccagctttgccggagagtcttaagctttacaataagttggttaatttgggagttaagattgtgtttatcactggtagaactgaagatcaaagagatgttactgaggccaatcttaaagctgttggatacaacacttgggacaggcttgtgctcaagtaagtatatataattcattcattaattaatataaattaatcaaataatattggagttgttgcaataaattattcactcaattattattattattatatgtttattgggagctcacgaaactacatgcggcactcttacaataggcacggtctaattattgaagcttttttttattttaattactttttttcaaaggtgcttgaaaagttatagtagatactctatattttttttttaaaaaaaaaatggatgatttagactttagagtgcctactttaagctaaatagtggttcttactaattatatttggacaatataaattattattggttatttatttatttatgtttttataaggaaaaagacatgtatatacataaagaaatattttaaatgaattaattatagtttatataatttatatcatcacctacctactccccaattaaatattattagtgctaggtaaaaataaactgtgagaaaattaataatgtttatattctacttgttattatttttagagtaatttgcggcataaatattcaagtttaactgtcagttgcaaataaatacttaagtttaatttttggcggcaataacacttaagttatacttctagaactttataagtacttttttgttaaatattaagtaaaatgtcacttagcaatcctaattggttcaagtcatgaatgtgtaccaataaaaaatgatatgtggataatctttaacgttgaggtacttattccagaaatataatttagttattattaccattaaaaattaaacttaatatttatttataattaaaagttaaattcaactatttatatcgcaaattactcttatttttaatttaaagtgtaaaataaaatcttctcatgtaaatgtcaatattcgatttaaaagatctccttaatcatattgtcgtcgagtgtatatatatactaataattatggttgttgcaatgcaggggaagtgactatgtagggaaaacagcagttgagtacaaatcagctcaaaggaagaaagtggaggaagatggatacagaattattgggaacagtggagatcaatggagtgatttgttgggcacaaacattggccttagaaccttcaaattgcctgacccaatgtactacattggttaatattactttctcttattattaagatatccccaccactaagtaatttgtaatttgaataagctagagctacattctactgtactggatctggatgttgtgcaatctttttttttcctataaataatatgtatgttgagaactattctacgtttgaatgtggggacaaaattttaagctttaaaaattactaccataagaggtgatgcacaataattggaggagagaaataatgatagatggcacaatttaattatgtggtgatcgagacacaaattaatttcatatatatatatataaacaaacaaacatcttcttatttaatttgagtgtagctaagcttactttgtcattatttagttattatcatcatctaataagaccagctcggaatataccaattatagctaagcagaccaaagttgcggacaatatgaattcatttaaatataatttccatgtctcataaacaaattaatatacagtcatcctcaagttttatatatatactta

SEQ ID NO: 43275 - DNA, 5438 bp, Cannabis sativa
  modified_base (305)..(308): a, c, t, g, unknown or other
tgcctgttgcatgttaaatttatcatgagagtataaagtttgcatgtgatttagatttatatatctaagaagactataaattactttagaaaataacctgctattgcatagaaattgataatagagagataatcatattatgtcataaccaatagaaacaattaaagtcaaaaccctagtttttattaactgttaatttccttagtagtttaattgcttactcttacactgtttttattttttagttttaatcctttttttttaatttttattcaaccacatagaagtaaaagtttaattttaannnncttaactacaatcctcgtgggatcgaccttactcttggtgagtttactacttgtcacgatacatgtacttgtgtgtacaaaatatcacaacaatcggatcggatcagataactcaattcaattggattggatcggaagaaaaaatccaaatccaataaataattgaataggatcggttgggtcaaaattcattagatgtgatccaataaatacccctacttaatataactacttgattaactacttgattaacatatttttgatatagtgtgaaaagagatattttaagatattttttttttaattaagtagttaaactaaaaagtataaaaattcatttttttttattattcgttattagattaaaatttgatggtttaatatttatatataaatttgtttggtaaccatggtaataccaatatatatatatattaatttgactatatacatataaatcattcattaatatagtctgattaaaaattgattttcgtagaaaaaaaattaagagaaagtgtccctccctgtttcggaagacaggagagagcgaaatgcatgtggcaaagaaatttaaataataatcattaattatagtaataacaacatatattaatgtatagaacgtgatgatttaaagaaattttattattaatatgttttgagttgtagaaatgttattgcctaatctctaaactcattgcaatttttatttgatgatgaaattggtgaaatacaaataacatgatattgaaaaaacttaattcattaaagcaaagcaaagcaaagtcagaaaagaaaggtacaacaaatcaacacatgcaaactaattaagtcttgaaacgtaagtatagtggttaataataataataataataataatattactattattattagggcagtgtttcattgctggttttgatctgcatgttgaaaacattaactccgatatacatcccatcttccatctccacaattttggaagttccgtcgtaaaaagtatccttttgagcatacgaaaatggaacttcgcacgttgcttgtgtcactaccagtgtaacaattgttctagtcttcggaggcacatcaacaacgtaatttgtctttgttgatgtgtcgaaagtatttgttgttccccactgtcctacaacactaatttgctcagctgacaattcgatcttttccttattaactatccacggaattgtattaacttcaacaattggtttaacgtctgatattagcgaaatgctgttgcgaagcgcaattgatcttgttttgttgtactcaagcgtcaagctcatagttttatgttcatccccggggttgtcagccactgcttggctcttctcgatgacactgaggttataaacgtggccattctcgtggcgaaaattgatgttgtagattttcttagatattacgcgctccaccactatgaacttggttttatcgataatgtttgactctgccgtagataaaactatgtctttgtcaacaccaggattattcatagataggaatttgttatatgccaaattacgcaaaacaacgacattgtcggcgactttgatgggaaagaacatcgaacatgtgttggtggggtcggagttgacttcattccgcacatatccgttggcataccaaaattggttcgtggaaaggttctttatgcgaacataaccatcgcctacggtagagatctcatgtgcaaccgattggtcgaagatattgttggcatctctgagcaccctcatataaatgtcttgtttgctattgagataccagctaccattttgcggcctaaaggcgacggtagttttgggaaatatgacaagagattcccaatccaagaccttgaaagtatcaaaatcggtcgcccatgtatcgcctgcatagagaccatcttcgtaatccttttctgacctccaaagacaagcgtaacgctccttgacatgttgaaatcgataaaatacgtcattgccctgagtaattttgataggcttgaacatggtatttttccaatctgtttcgtcttcctcaaggggcttgtcagctgaggccaagaaataccaggaataattggattgcatggtcaagtatttgttgttgtagcaataacgtatgtgaacccatcccggctttgtcttggctctctccaattcgaatttcaccaaaggactcgtaacatcctctcctcgaaaatgcacaaacgtttctgagaacccctttgcgatgctctcttccttagttaactttgtcaagtattttccattttgtttagatttgataaccacaaatcttggcaaatccgacatatttttctttctctgaatgaatacttctgtaatttggtgacttaagtgacataagagtttgtgtatttatagatagattaatgtagagagagatgtactcattaaaagtaaacggattatatattgaatattaaatgacgaagaccgccaccattgttggatccatgatctgaaacctcttgctactcttacaattaataagactataatagctaacattcagattagtattatatatttaattcaaactaattaaattgacagaaaaataataaaaaaaatgttctcaaaccaacaagagataatgatatagacacttttataatataaggatgtaattacaaattaactttttcccttatcatcaacattttcatctgttcggtttctgttataattatatatattttttttattttatatatgattgttatattaatatttgttagttttaaagaaattttgaaatattttgacaatgcttaaaatagagtttaaataggtatatgttgcacacactatttttttactcgtgaaactgagtattttgaattttatttatgataccgtaaattattaaaaaaatttgaaaattggaagaatgtgtggtataactaaaatttataatatcatataacaaagaatcatattattataacttctttgtgaatacagaaaataatctttaatatgtaagaacccacctaagaatttctatgcatattatattaaataatttatttagttaatattaatttaagggaatactgtcagtctttatttattaaacaaatgttagtcttctttcttatatttaataattaacttgtgttcattctatagttgtcaatattttaaaattaatcttgtttcataaaaacttagtcaataaacttagaccatgctaatgtacatgtattgatgtaatatcatatataaaaagaaagaccatattggaagacttgtatataataatcataaaaataggaacccaattaaccttaaatattgatttcttttcttttcttcatctatttttatgtgtgtatatatatattacattattaatgataacttttaattatttttattatttacttattattgataaatcaactttaaattattgatgcctaagtagaattgcttccaataatattaattgagtacgtgttgaatatgttaataaaattaaagatatcatattaatttggagggctcgtagtaataatgcttttcggaattttaaattccctttaatttttgttgtagttagaaattaacattcaaactttgaggtttgtaatatagaatagtgtacaatacaacaaaaataggtaaagatgatatagattaattggggaatttaatttgtaagtaattatagagttgtatatgggtgggtttatattacattgattggagtttgtaaatggtttttttattaataatgaaattcagctgatttcccaaaataataataataataataatagataatgatatagacacttttataatataaggatgtaattacaaattaacttttgcccttatcatcaacattttcttctgttcggtttcatgttataattatacttttttttattttatatgtgattttgtatattataattataataaatatttgttagttttaatgaaattttgaaatatttttacagtgcttaaaatagagtttaaatagttataagttgcacactctattttttttatgtgtgaaattgagtattttgaattttatttatgataccgtaaattattaaaaaaatttaaaaattggaagaatgtgtggtataactaaaatttataatatcatataacaaagaatcgtattattataacttctttgtgaatacagaaaataatctttaattaatatgtaagaacctacctaagaatttctaatctatgcatattatattaaataatttatttagttcatatttaggggaatactagtctttatttattaaaccaatgttagtcttctttcttatatataataattaacttgtgttcatactatagttaccaatatttattcgattcacaaatcgcttaataaaaaataacctaatattcttcagagtaaataaaatgcgctttgatcagtcttcaatcaaaagattaaaacctgaacatatcacaaaactattttgaatagcttctaagactactaaactatctgttttaacaataactttgcattatatcaatattattattgttcattctttcaataattagaatataatattaatatatttaattttagaaaattgttaaaagacattattaatacttagctcttttttcggtatcatatattattagtgtaattgagtttcagaatattcatataacttaaaaaaaaattagataatatcgctaaccctaatcatgaggtactatctataaaaggtgtttggcacctactaaattatacaaaatgtgacgtcacatggcaagtgtacgtacgtcaatttcttttataaatctatcaatcagtttataatatattttcttttttctgtatattataaataagttgcttgattttaaatttaaatattaattgattattcatacacgttcctagcataactaattagctactcaaagtcaatgcatcgagaacaaataattaagggaattaatcattcatattgggttactagtttaaaaatattatataaggataataaaataataagtatttttttcttatgaactttcaatattatttgatcttccaagctcttaattaaattatatgacttttatt

SEQ ID NO: 43276 - DNA, 3223 bp, Cannabis sativa
tagcaaatttaaggtgccatccatttatctcagttaattgctgacatacactgcatatgtgtaccatcatgtacacgtggcatatttataatggaccccctactataattatttaaaaattataaaaagtattttctaaatttattttgaaattaaaaagaataatttaaatttataaaattattaataaataaaaaaataatatattttttttaattctttattttctaatttgtttttctctctctttctttctctctccttctcatcgatctctctctcaccgactcttcttcttccttctcagatttaaaaggccctcaaatacaatgttgtagcttcactctggctaaagccctaaggcgacagtctcagacaaaaccctaacaaaatccctactctttgccgccgagcctaaccaggccagccatgccgccgaagttcgatccctcccaggtcgtcaatgtctacgtcagggtcacaggaggtggggtcggagctgccagttcactcgctccaaagataggcccactcggtctttcccctaagaagatcggagaagacattgcgaaggagaccgccaaggactggaagggtcttcgtgtgaccgtcaagctcaccgtccagaatagacaagcgaaggtctcagtggttccatcggcggcggctttggtcattaaggcactgaaggagccggagcgtgacaggaagaagaccaagaatatcaagcacaatgggaacatttctctcgatgatgtgatcgagattgctaagattatgaggcccagatccattgctaaggaactcgctggaacagtgaaggagattctcggcacatgcgtctccgtcggctgctccgtcgatggtaaggaccctaaggatcttcaggaagaaattagtgatggtgatgttgagataccccaagattaaatatggtggtattttgtatcttttctactctcagttttgtttcttaaagattgctcttttttcttatggcccattttctgaaaatgtctccaatatcaagtttgtaggagtttgatgtgaatggtggagaattgtaagggttttgaattttttttccttataaaattatttttcttggataatttttgggcataatgccctttttaattttacattggcactcttattttgatatatatatatatatattatgctaacagctctaaatggagtgactgttaaaacttgaaacccatttcatcattcagttttgttggataggtattgaatagtcttggatgagcttgcaaatgaactagaatttttgtttgaatagtaaattatacaatatgattcatgggcagaattggttgttcatcctaatagctctcaatgaagatagtcctaaacctatctcacttttaagctttgttttatttgtattgaataatcttggatgtgcttcaaaatcaaccaaaaattttggtttggagaagggtatggattgtttatgataatagctgtaaatggagctactgttaaatcccgtttcatctcaagttttatttatatgagttgaaaatcaactatagagtttttaatcatattatgtgaagggcgaatttgattgttttttatcttaataactgttaaaacattaaacccatttcatgataacctttttctagaaaagggtcactactaaataagctgaacgtgtttccaaatcaactatggatttgggtttgttagaacaccgtttctgatgttctcagcacactggtttctgatgttctagtattatggggcagttctgtaggtgtatagaagtaatgcaggagcatgtaattcatatttatatggaaattccaaggtagggtattccaccagttttcacgaaagcggtcaattgatcgttttttactttatttgtctaacattttctctgaaaactagtgagatgttgggtataataacaataataccatcatcatataaaaaatattaaattatctctagttatgtatatttagttaagtttaacattatgtgatttggaagtaataatggatttttatttttgttacaagattaatacagcaatatatgattatgagatagaaatttctggtttgttgttaagactactattgaaaataaagaggagaggaaatatattaccgaatgaaatttataggttgagttgtagattagatcactttctttaaggctgttcgcgacactacttaggaatctgcaagcctgcactgtaaagatagttgatttttttttttttttgtagtaaaaattgtgtttatttttttactttggaaagatgcattcctctcaccagttgaattgcattatatagatggatattatatagatgaatggattgaaaaaatattatgggatgaagaatgtttttttgaatcatgaatgagttattgttgaacgtgtcccataaaattgatacgaccaagtatttaggggctgtttggaatgcattaatgttaggagaagaaaggtaatcttaatgattaccctgtttgttatgaagttttagattttttaaggcctttaatgcttttacggtagtattccaactaccctgaaaaggtatattattgaccccttaaaaatattccctcaattatattaacgtaagattagggtttttattaaataaaaaatcaaatatttaatatgaataaaacaaaatactactcgtacaaaaaattatataatgttctttcttctgccattactattatccatcatcttcttctccttgctcattcaaacaataataaattagcacagtttttctttcaaaattcggcatcgcgctgctccctcattctagcttcggttgctggttgttgcagtttgaattttgttcgtcatttgaaattggttactgagttctaaatcgttggctttattaaaatatactgcacatatatatattatatgtattttttatatatatgaatcggaattattggtgttgaaattttgtctgatgttaatatattatacccattattggtcctttttctttccgaattcaataacggagcagtgaacatatacatatataaatttctaaatcgttttttttttttttaaagactaaatcgttgcttactgttatcaatatatatatttatatactagtaaaaagttacgtgcgatgcacgtatactaattttatgaggtattttttactttatttaaaagatataattaa

SEQ ID NO: 43277 - DNA, 2620 bp, Cannabis sativa
  modified_base (2555)..(2572): a, c, t, g, unknown or other
ttagatttagaccataaaatccaacacttctgcatccttccccgctagccttggcagtgccattgatcttctaggaatcttctggagcaaaatggggaattgaataagaaataattcgtaagaaatgaagcacaaaagagggtactcataaattaaatacactagaggtcaaagttacaaatcattcaacatatttaaagtaaatactttatacagcagaattgaagttaatccattattttaccatggcaatgaagctactgaatatatgcaaaataaaatgttaatgcctaatagactaatagttatgtcaacctattattggaaatatattaatatttggtcctgcttcaaataacttagaatagttcggaaatttcaggacaagggcaactgacaataaaattgtttatttcctagaaagaaatattaattaccagttaataaaaaaatttacctgcatcctctgggatatcagaagtccacaaagtaaggttgtccctaagaagttgcatgattagtgtactgtccttgtaggattcctcgttcagagtatcaagctctgaaatagcttcatcaaaagcttgtttggcaaggtggcaagccctgttgaaattacctccacatcaatcaagatactatatcaatagcaaaacaccaaatcgcaaccaacttcaatatattctacaaacctttcaggtgaattcatgatctcatagaagaagacagaaaagttcaaagccaatcctaaccggattggatgtgtaggagccaattcagcttcagcagcagttgtagcagcctgcacacacataataccaaacaaaattgagagcgagagaaagcattatgcaggatatttagcagaatatttaagaaataattcgaaagtaaaaaaaggaggcagtttgcacataaaagatcattttttttattttatcttattattaaaaagaaaaaaggaaggttaatacttgcttaagagccatttttgtttaactcttttacttttaaacaagaaaaaatttagtaaaggcacaaacagaaaagaatgaactttaatgaaacattacttaagtgagacaaagaacaacctcatatgctttctttgattgctctgcagcctctattttctcatcaccaaacttgaactctgcaagataacgatagtagtctcctttcctgtacccaataatagtttacaagcaaccaaaactcaacaacatagataatcatgtcaaacctcaaacaaaagtttatgtacaaaatatatcgtattcactcacaatagctccttacattttatagtagaacacagttgattcaccagcagtagctgatggaataagatgttcatcaatgacggtcatgatatcactacaaatggtcgagagctctgattcaaccttatggcggtactccttaatttgcttagcatgaacctcatttcctttagcttcttccttctgttctattgatgacaggatcctccatgaggctctcctagaaccaacaacattcttgtaaccaacggaaagcaggttccgttcttcaacagtcaattcaagatcaagttttgcaacattcttcattgcctccaccatctctgtcaaattaaagagtaagaaagaaaactaggaaagaacaagtaagagtcagattttagagttgaagtcattcatataaagaatatcagggtgtacgaagacccttgacacagattttcaatcaatataacccatttaaatctttctgtctatacattgacaaatttatgggaaataaatatacatgtaaccatctatatgagtacattcctaaaatgaattggcaccaaaaaaagcatctgttagaataagaaataagtaaagccatgtaaaggaacactataagaagattgattagttttctttcagtaaaattagtcaatacaaggattcaagcagaagcatcatcaaatcatatttatcagtggaaaaagaataaaaatatataatgaatcaaactataaacacaacacatgaaatttttatttatacaagtggaaaagcaaaatccagaacaaatcatatgactgtgctaagtgtaaggtgtacacaactattctgagtcacacttctctacatataaagtagattaattatttcaattcaatgcactattcatatataagtttctggttgcttcctttccttcatcaaaaatcaacagttcactaaaataacttcagattcaaagcaagatatcaaataaataaataaacaaataaaacgattccaatcaatcataacagagattgactgtgaaaatcaacagcaaaagcaaacaacataaaaacttgaaattcgaaaaagagactatgctaaaaggttgtatgcatgtgccttaaaaaaatagaaagcataaaagaataaccatcgtagcgctcggcctgctcagcgagcttagcaaggtagacaaagttctcccgttctttagaggaagccatggctgatctctgcgagagtgatttagggtttcgaaatttttgattgcccaaaaaaaaaaaaaaaaannnnnnnnnnnnnnnnnnggtagtgtttgtgtttgtgggtattgtcttttctttctcctaagcttt

SEQ ID NO: 43278 - DNA, 3172 bp, Cannabis sativa
tttaatgagcattagcaaaacttttgaaaaaaactccgtaaatgtaattcgatatgcatcagcctttgccatacctgagaggcattttagcttgccaacaaataggcaatgaaggatcggaaaaatctcggactagtcctactactgaaaggtcttcaagctgtaccatttacaaacatatgactttgtttctcatgaaattcattgttgtttttaaaatgaagtgggttgagtacttacagaagcaaccagatccgagtatggctcttttgagaagtatgtataagaactaccactgtcaaacaccacttgttctgctctgctgctccatgaccctagtttcagttgcctgtttccataatttattctaactatctctgaatgatagaaatccctgaggagagagagcaaaatcatattcatatacgcgttgcaaaaaagaaaaggatagtctttatgagatcatgaaaactaagaactgaatggagcacataagcattcaaagaaagcgctgtgttcaatgcaaaataccgaaagaaataacatgtttctaggtacaaatttgggctatacaagcaaaaccatgaggcaacacataactacatgaagagagttaaacatttgaatgtggattttctcatgtatcaaaagcaattttgatgaataaattctataaaagaatgagtacttcatggatcgaaatattgttgcctccaaacagaatcgtctaaatatgtttcctgccaaagtctccgggtatagagaaaaatcaccaaccattaagaacatgttaaaaggaaataatgctaacaaaactgatgaaaagataatattacttacacagatggggtgttaagcataggtatccaagacattccccaatgtggtacataatcttcacctaagaacatatacccgccaccacccgcgtcaatggaaagacaatggcctaccacattcttaatgacacccttgcttgctaattgggacgataaactaactttagctcggcttaaacctaggattccatcagtctttgcaagagagttcaaaagtatgccttgctgatcatatccacaacttaaaggcaaaaagacatttctccagtcagtaatgtaagaaataaaaaactaaaacaaaaaacagaaattctcaaacttgtagagaaaagtacccgaaaacaatattcacattggtcaaagaaccatttttcattgttaaatgaagatcatcttttgcaagaacacccaaagatgagctactgtcagcatattgaatctcatagtcacactgttgacatgtttcacattgtccagttttctgatttctctgaatctctgtacacaatgagtctttagaaggtagtatattatctctggtaggcttatataatggatttggtccctgcataatggacaatcattgattaaaaaaaaacaaacctttctcctttcaatacagcttaacacatttggtttatacttattgcataactgattatataataaaagcagagagaattaggctttaccttggcacagctactgcatggtgcatcacactggatccatgttaagtcactacctgtatccatgtccagaaaataaggtcttggtggattcccaactagaatatatgtgtaatacaacctgtatggaacaagattaactaaacaattaattaaccttcataatgatttctcatttagacaaaaatggccaagcatttatatgtagttactcaaaacagttttgacatttatagtacaataattgaattatatctcattaatgttttaataaaacctaaaaggcgaaatgtactaaatcgtgttccctaaacttttagttgtaacaaatcgttttgaatccaataatctcaatagttggtggagagaatatttaagacactacatgtcaaaactagaatgttgaaatcttttggattatacttaaagttccagatgaactaccataatatcattagcaattgttttaggaaagaacagaaaagaaaaacaagattcttccatacccatctggataaacattgcccctgactggaaaaatggttgatgagtcaactttagcagcataagaaaccaatttgttgacttttttggttctaattccattgacaaatgaatcacccacaacaacatctcccttatcaaaatccacaaacctccccaatttaagctccacatcgtttttcccattcatcccaaatttgggatacaatgggaaaataaaagactggggtttatcactatcatcatcatcatcatcattggatcttcgaaacccttcaagcaccgttggataaacatgagaatacaaagtcaaggcaaaaatagagatacccagaaagaaaagcagcttttttataaagctatgaaagagtctgaacttgggaaacgggagttggagttgtgggttttgtggggtagtgagattgtgatgaagatgatgatcatggtcatagatttgttggtcttggtgggtttggtaaggaggtgattcagagagtgtgaaagcagtaatggtctttcctaaggaaggattatctggtggtggaagagagattataacgactcctgttagcttaggtggtgggggatcagagtcagactccattttctttctcccaagaagttgcagagtgcatattgcaatctgcaatctgctattgagttaaggatgttgttgtgaaattgacatttgagtttgggttgaaagactcagtcagtcgtggctcacaagtcaaaccaaagtaatgcagagaatggcaaatgtgaaaacagaaacttcttaagaaatgtgtcactccttccttcaaaaactcaccttaggtgtttgatgtttaataataggactaatgtaaagtaaataaaatatgtagggttcttttggtaacattttattttaatttttaatcactaaaatgagagtaaaatttgtgtttttaaaaaataaaaatgtattctataactatttttatgatttgttgtaatttttcttttatttccagaaattgtaattttgcagcgcataggcgtttgtaaacaattttaacgtatggtagatgtatctactatcccgaatgctatcctttgtaatgatcaggaggtctaatttgttttatttataaaaacgcttttattcaaaaaaaa

SEQ ID NO: 43279 - DNA, 2096 bp, Cannabis sativa
tagaaaataatttccataaataaaatattctaataattgcagcatcacaattaactttaagaataccgatattctatttcatccactactcaaaagatacaatgatagaaaatattgcagtaggttcattcaatctcgtatcttgagcactcaactattgtgtatataactgcaatactaacaactcctttaatcgcaaagaaattgttattactaaccaacattgatatgatgacgagtcatcgaaaaaataagaagaatcaacaacaaaaaaaacaaaacaaaattatgttatacagacaaactaaaacactcaaaactatgttacagagttaaactaaaacactgaaaactatgtcgtagagataaaactaaaacactcaaaactatgtgaaaactaatcgcagtaggaaaaatcgaattatagtagcaaaacataaccccgaccaagccgcactttagcccaagaaaggcgagggctagagaaaaaaaacaacctctaatagctatccatttagaaatcagaaaccctaatttttctttaccctttggatataaataatgttagttaagaaaaacggtgaatattgaatcatttattacatatatgtatgcaaaacttcattacaccacatacaaaattatcatggctaaattgcaaggaggagatcatcatgataaactaacatgtaccaaaggaagaggaacgagcaagaatagatatctacaaatactatggtaaagaatggctaaacgatgaaaaagactttttcttttatcaacctcaaatatttatagaactaaaactaaacaacgaaggttcatagatggagacaggagctccaccttcttaacaaaaatgaaaccaacagaacttagggaagcttccttagtaggcaataagagttacaatctctagaaatatccaatggacgcaattatataaagtaaaaaactcatatctggatacaaaatcacgggtgtgccaaatttttttcatgtataatatatgattttctgtgtttactattaatatacttggaaatattactaaatgtagtttgaatatgaggcattaagtctaattgtagtcttaattagtatatgtttcttattcactagaaaaataaaaccaattaagaaaaaaggtgattattcaatcatttattatatatatgcatacaaaacttcattacaccactcaccacatacaatattatcatggctaaaatgcaagaaggaggagatcatcatgatgaactaacatgtagagcaaaggaggaagatgaacaagaagaggaacgagcaagaatagatatctataaatatgtatttgggttcgtagaaatggctgtagtgaaatgtgccattgagctgggaatagctgacaccatcgaatgccatggacgccccatgtctctcaaggagttatcatcagccttaggctgtactcctcataacattcaccgcatcatgagattcttggtgaaccgaagaatattcaaagagatcaaaaacgacatcgttaatgatgaaggagctggtactctatacgtacaaacatccctctcacgactcctcatcaagtccggagaaagaagcatggcatcttttgtgttgatggagagcagtaagcctatgctggcgccgtggcactgccttagctcccgtctcaaggcggaagtaattgataactctttgacgccatttgaggaggcgaatggccaggatttgtggagctacacggcagccaatcctggccacaaccagctcttcaatgaagcaatggcctgtaatgccagggtcacagtggctgcaatattagacagttgtttggaggtgtttgatggtgttggtagcatagtcgatgttggcggtggaaatggaaccgctatgcagctgttggttaagggttgtccttggattaaggaaggaattctttttgatcttccccatgttgtgtctgttgcgctaaaatctgatcgtgttgtccatgttggtggtgacatgtttgagtctgttcctaaagctgatgctgcttttcttatggtacgtacttatatacatatatatagtatataaaattattcagttta

SEQ ID NO: 43280 - DNA, 7498 bp, Cannabis sativa
tagtgagccttacaattttaatattatgtatatatagcatattaaaatatacaacatattacaccagtcgtgcttagcacccttaattaaaacgtgttgtctaacgattggctagtgatactccttaaaaattattatattaagacttaatactaaattagacaaatagcgatattgacacgtaggaaggtactgacaccactggtcatttttagtttctctaaaatatatatgcattatcaatataaaagttcgtgtagtagcttctcttatatatgtttactaaagtcaagaagaaaatttagttaatatataacatattactaaatatatttgttaatatataaattgaaagctgataaactaagtagaattttcaagataaacatatacaaacacactgattcttacatctatgatcatttattgctattttacgaaaaacccttttcaattttttttaccatatatataatatgaagaaacaatagacaaagtggtcgatttttatgaaattatatatataataatggtgtcttgtgaaatttaattaattgagtacttttttttttcaatactaataataattaaaaaaaaaatattaggtgatgatagtcttggtctccttttcatctttcttgttcacaactcggccatctgtcccagcaatcatagcgtacttatctttccttgttaagttggtgcactcaaaacccaatgttcctgccaaaaccttttgaatgtaattggccacttcaaatgctgactttccaccattacaagtcaactccttgggaagttgattcaagaatgtgatctcataagttggcataggattcatgaacacaaaataagggtccaaaagtttgtgacccctaacagtcgtgccataaaacacactttgcttagtgttaatcgcgaccggcactattcggtcagtcaactcggcaaacaatgcactaaacctaagcaaaaagggttcgcgacaagtcgtgccctcgggacaaatcacgaggtcaccttcttctagcaatcgttttatgttagctgcatctttctctctctccctcgaaagtgccaccgccttgattggtgagatcatttcggtgaatttgctaatgctatatgtgacacaacttatttttcggcctagggcaacagcggtgacaacagggtcaagtactgtgcggtgattacacacgaataaaaccccgcttttgccctttttcggggcgggtggtggtgttcccttcacgattactttaattcccaataacttgtaattgtaccaagctagtctttctgggagaggaatgtttaggtatactcttagaattgagagaattataccaattgggagccataagaatgtgagtagtgccactagtggagttggtctttgcacaaaacgaccttcgtggaatattattgggctaagaagcttattcctcggtagaggttcacacttggtttttggaactatgtacccttcctgtgtggtcaaataagtcaaacacgttaattagcatgtaattcaacacgttatcattatttaattatataatgaaatctatgtacattagtgttttccttattgatttggcatgtaaaatattattattaattaaaaacataaatggcacacagctcaaaatttataaaataataatcatgcagattaagttaattcttatatgttctgacacattatttaagcttaagaagttaattaattaatggaattatttgtttgtccttttttttttttattttttttattttctttaacaggcctgtcaattctcaattcatatatttatattgttatatatgtttagtgtacgtacatggtccatcaatattatctaggacaggtatttaccagaattgactagaaagacccagaattttattttgtcaaagtaaaaaataaaaaaaaggtatttaattttatataataaatgtatttataaaaaaggcactcatgcattgaatatatgtaaaacgaagaactaaatataaaataaaaaaaattacatttaaaacttatacaataaaaattatgagatggacatattcacaataaatacacatgtaaagggaagaaaaaaagcataaagagggccctaggcgtacctttaatgcttctatataaataacttaagatttatttttgaaataatagacatagatagttataagtggaagagagagatcatgtgaaacactaagaaaaaaagtcacgtacaatgttcacaacgacaactaaatgaaagtgtatatatatatatatattgactgttaatccaatataaattaatgtcagattattttcctctcacatggccatggcgatgatgagttgaattgtatagtactaattaatcatgtgattatataggaattaagtagggttattgtatacagagagtataatacgcaaaaaaataattaatgcgatctaccatagtactgtaccaacaatatgatttaacaaactttcacaaatattaacaagaatcaaactttcaaataattgaaaataaggtaaacatatatcaaaaaaaggaaactgttataaaaaaaaagtgaaatgaatgaaatcattttcactgtggccactttctattcagtctggtctactggaccctatggaaactcaatgtttgtacaaatttcaattttttttttcatttttaagggtttgaaaagaaaaaaaaaacttggccaatagaaaaaaaaatatttgtgtatatatatacataccatatcaaatggtggtccattggtaatggtctaacaaaacgttacattattttctggtttaattatatatatatatattttggtgaacaaactttatatagagtcatttacgcctccaccaaccctaataactataagataaagatagcaaataataaaaagtgacagcatgttattattactttatatgtatatatgcacattagctagcccggccagtcacataaagttgttattattatatattaaacaaaattgaaccaattaagaaaatactatgcaaaaaaccaagaaaagaaagaaacaataataacatgatcattattattattattaatcaatgaatgaagatattatgttttacgtacgtaccttgcaaattgacatgaaatcataatcggtttctctatcaccaatacccaaatccggtaaagaagagccaaactctttaacaagaacttctctcttgtgttcaccaacaagaacacctcgagttttgacaaatccggtaaccctaccggatttcgtaacctccaattcggtcccgagaaccttatcaacacccaagaaagtcttgacaaaatgttccaccatgattcttggactggccgtgacgacataacgtttcccgaaagaactgaaaaccctccaagtgtccgggtgaacatcctcggagtagaatttgggaagaacagacctcgagacatgctcgatgtctttgatcttcaaacctgaaaaggctatgaagatcaaagtcttgatggctgcggcctcagacaagaatatgtacgtgaagtacacaaagggcactgccatcaagagaatcaagcctcgaatgaggctccccgcttcaatggcgatgagcatgtaatagggaaaggcgttagacgagacgaggagagtcccgtctagatcagccgcaactgtttggtttgaacgattatcagggctacattttgtgattggttcgaaccttaatcgatgatgatgatgatcattatcatgataagcccccatagagaaataatgttcttttcttttttcgtaaaaatattttgtgggcgagtaatgaagaatagagtggagaaatggggggttttaaaaagagaggagaaagagagagagaaagatggtcaagtagtactcgtcgtgttggtgaagtagtactattatttttgttgttaccatgaaaatattatgtggttgagactaaatgattttgaatatgagatgtcaaaatgagatttttgtcatttatttacatatttatatattttaataacaatatatttaggagagaaggagtatatatgtatatattttgcgtgcaaattaggacagtataaggggtatatgagtagttgaaggtcgagaccacacacccacattaacattcaattggcctacttttttagtttataggcgccggccacgccgtttattaatataaagctcggctttacaatgctctttttgttgtactaattagcttaattataataattatcaatatatattcattaattcatttgttaatttcatttttctcatgcattgtaatcttggcatgggactatatttatatataaatgacttcaatgatgatttggttaattagcaaaggaattagttatgagaaatcatgagatggttatgacccacacacgcagtgtggatattgttacgagtgagtaaatattgtacgtattatctattaataatttcgtgatttttttttaaaaaaatttttggaaggtgaaattttgaagtaaaaattatgtggggaaataatgtttgatagaagttaggttgggaaattacaattttacgtacgtgggtatactttaattttgtgtctttaacaagctaagattaaatagaaggggtccacgggtcaatattacattaactactaccccattacttatccttgtatgattttctctcaaaaatgtatatattgtacttgcccactaagccgacctataacataataaaacataaatatatactgagttactaatgacaattgtatatgtagaattcaattatattgatttagaatcagatttcttacagtaattaatgttaaataatgcaaatacaacgatcaaaaatgttttatttgttatatatttacttttcaattagctataggtactatttgacctaccaaacttaatcatagaccgaccgagagtataccatatatatatattgatcattatatttatataggtaagagtacccatttaagaatttaagcagatcattataaagacttagatttgatatattttatttcctagaagaaataattttttcttttttttttttaagaaaatcagaaaattgtttccatccaaacaacttttatatataactctacagcactccttttgtgtagacttgaaaagcatctgtacttttgtatttgaatgtgtatctttataaaactatgatctctcaaactatttcatatttttcttacaaaatttttaggctttacatataaaatctctaattactttatgggactagagcatttcatttcttgccttcctaacatgatataccaaagaagcaaaaccagtcgagaagcaaagtttttgaaatttgttcaattttactctaaagatccatcgaattagttgctgaagaaaacttgttattacattctaattcagccaagaaataaaattttaaaaataatatatatttttttaataaatgaaagtaaaacctttttcgatacaaaaaataaaaatcatcagtttagtaaactcaacttttactcaacttatcaaaccaatcactatcttcaatttctctctttaaaatgagaaaatcaatcacaaatttctctcttaattgtaaaggaatagtaaaaccaattgccatgtcatctgctgaatcataccctattcctgaatattcggagctcacctaatcattggcacaattcaacacattttcattacagtacaagattcaccagctgtccctatctttcaggaaatctttccgttattctttatgcaattgtatactgccatctgtaatctttgtattggctcttgcctcttgccctgtaattgactctttctataaatgaaatgctctgcctcagtctctattgagctgagtttattatacctgatatatacctagaatttcacttggtatcagagccaacgacggcctccgccgatgtcgacaccagaacaaggtgactccccagcaactccagtcatgagctctgctggtaataactctgccgccacaggaaactccactgcgagttcatctcagctcccaaacacctaccctcaacatttcagcaccttaaaccatccattctccctaaaactcgaccgaaacaacttcaccttgtggaaaactatggtttccaccatagtcgggggccataggctcgatggttttctcagtggaaccaaaccccgccctcttgaatttttacttgcaggaacaaatgcagaaggagtcgagattataagtgtcaacccagaattcgaacattggatcatcaatgaccagtttctcatgggatggctatatagctctatgacggagacgattgctactgaagtcatggaaacttctgcagctgctgaattatggcgtgcacttgagaacctgtatggcgcttattcaaaggcaaagatggacgacactcgcactctaatccaaactcacagaaagggatcttcaactatagcagagtatttacgacagaaaaagtgctgggctgattctctcgcactcgcaggtgacccttacccaaaatctcatcttatttctaatgtattgtctggtttaggcgcagaataccttaccatcattgtacagatcaaagctagatcaaaaactacttggcaggagctacaagatttgctcctcagcttcgacagaaaaatagagagaatgcaaagtctcgaagggcctaaaactacacctccaccagttgcttctcaagcaaacatggcagccaaaacagcgtctcaaggaagaggaagaggcttctattctcagaatcaaaccaataataatggtggaaaaggaagtcgtggcagatccaaaggaagagggcgttataataacaactcaagacccacctgccaagtttgtggcaagtttggtcattcgacaaccgtttgttacaatcgttatgatgaaaacttcacgggacacggtcctaatgctcaaaaccagcaaaaacaaggtcacaatgcctttattgccacaccgaagatgctggatagtgatgcttggtttgccgacagtggcgccagcaaccacatcacttgggacactaactctatgagccagaaaaatgaatatggtggtaaggaaactctcaccgttggtgatggcagtaagctcactatctctcacattggtactggttttttaaaggctaattctggtaagtttcttatgttaaaacaaatgctacatgtgcctaaaatagcaaaaaatctgattagtgtgtcaaaactcaccactgacaataatgttctgattgaattctattctgatgtttgtttggtgaaggacaaaacaacaaagaaagttctgctccaaggagtgcttaaagatggcctataccagatccaacaccctcatcctcagtctcggtctgctctcatttccttaccttcaaggtcgacaaagaccatgaaatttgctagtgtttctgtcagtccaactg

SEQ ID NO: 43281 - DNA, 1223 bp, Cannabis sativa
aaaaaaaccactatgggaaattgcttatttggagggttaggagactcagacggagtaatcaaagtcaccacctcaaacggcggcgttatggagttttttgccccaataacggccggaaacatcgccggagagtttcctggtcacggcatattccgaagccatgatctcttctggaagcctctttcccacgacgaagacctgattgccggagactcctactacttactcccactcaccggcgccggcgccggcgccggtgccggagatatagtcagagaaggacacgtgagatcgaacagcattccggcgacttcttccactgtggttccgtacagaatgtcgtttgactatcaaggaatgcttaagaggtcgtacacagaaattttctcgacgagatcatgtccggcgacttattacggcggagccggcgccggcaccggcgccgggtggttttggaaagtgaagctggtcatctcaccggagcagctcttggagattctttcacaggagggaaagacacaggagttgatagagagcgttagaactgtcgctaaatgtggcggcggtggtggtggggaggcggccgccttgtcggctgttgggttttccgatgagtattggagcctttctaggagtagtagtaggaatggtggttattcttcctctaaagtagattcccatggtaggttaattagttatagatcatattaattaatgacttaattaattaaggtaattaagtgtgattagtgctatgtaataatttttgatatataattaattataattattatatagtattacacatataatagtttcatatgatgaaaaaacaagaagctaataagaatgaatttttgtaaactgataatgtataacttggttttattaattgctagctagcttttatattaggattagaatattattttttttccttggaaatatagggatagtatatggaaaatatttaaagaaagaaaatgatataattaagagtgatttttgttgtgtttggaatttatgaaattaaattataataattgtatgaatatattagagatttaattgatgagttttccacaagttttttgtagtaatattatagctcatgatagttttaatatctcatttgatattattattaatgtctctcactcttctaattttgttcatttaaataaatcataataaaaagttttataaattttatgattattagt

SEQ ID NO: 43282 - DNA, 4183 bp, Cannabis sativa
tctatgtttgtggccatttactataatttcccatattaaaagggtattttttaacttacactcaatgacaatgggcctgttggactttattcggttcactcattaacagatcagtgctaccctagaaatattatcaacttcctgcgctatcctcgtcggagatctgagggaatgcattccgtttgactcattggccggataatcaattatttcactcacaacaggtacggtacttacggttttgaggctactaatgaggattaaattcaaagagacgattgaaactttttctgcttgtttgagttttctcaagtgattctatcttggtatagagttctacttcggcattctacatggatataatttagctattatccagttctcttttcttttccttttttcttctttttaagtataattaggtttgtcatatttagttaataatatttagttcgatgtttttgaaattgtgtatattattaccatttgaaacgttataatatgaatatgtgttagtaatcatatgagattttgttctaatctggatggttcccagaaatttagaaatgcagtgagcttagactgtaacaagtgaaagtgaaatcttggttagaattctctctaggagaactccatatggtttcccaaatgttgctttcatgatgaatggtaatattatttatttgttatcaagcgacaattatatttgcttccaagattatgaattgttgggcattttcttaaaactataaaaaataaaagatgtgaatttatagagcattgtaaagaattatctctacatcgatttattttatcaaacaacaaagtgatgattgttaatgtgttggtctatgtctggctgtgcgaattctgtgaataccacttgaagaactgcttcaaagaaagatacttttttaaaaaaattgtcattatatttggattgtattattattttgatcattagtggctaattagcctcaagatcaagagattcccaggttggaacctgggtctcaccccctcaacactagaccaacctagtggcttgtttgcttgtgttattatggatgctattggagccggtttactttttgttgctgtttttaggctcctcttttattcttactatgttgcttttgcctgtggtatttcacagaatggaaaatgcagagggcaaattgaatactgaaatgaacgacaaattgttcaatattttcaaggattttatgactaggtactttgatctaaccatatttattttctcaatgtttgtgcttttcaagtttgctgggagacttgaactttaatggtggagtttgtttgttacagcattcccatgcattttcatgtttgtccttaattatcaaatttgctgatttttcattgggaattcggcataattttgtataacaccatcttaatcaacgatcatcactttcctaatcgttgctgtaatctcataaggtgtttgtttagaattcaaatgatcttttttttaaaaaaataaattaaatcatggacgctgaagctttaagattttgaggaaacgactcataaaaaccatataatttttcacttagagtttgaattaaatttgttgcaaagagatagagttatgccattaaagcaaattcattaagcaaaaggaccaaaaataaaataaaaatggaatattgtgaagaagtatgatatgtcaaatatgctggttatgaattatgctatcgtgtatttgtgtcagccatgtctacttgaatttggaaaactgaaatattgtatttgagatacaaaacaactacttattggataacttgttcacattttttacataacctctttgtaggatcacagagtttgaggaactagtggatgttggaagcagattattaaaagactttcaacaagaactgggtaagattatgtctatcatgtatggatacttgttttacgatgaaattttttgccatgtttgagtaacagtccttttttttacgccgtctttgatagagtttcttcgacggcccccatttggcaggacatcagagttggttaaaaacataattaatattgatgaaacaaagaggttgcagtcataccttgaagctggatgcgtaaaaacatttgatggatttcaaaatattagcaagtgtaagtgcaaaactctttttgtccttataattcttggttgcttaacttaataatttatattcccattccaaacaatcccaactttttgcaaagggctgtaggacttcttgtacgaacaagaaaatatttgagaatagcaaagacaatcagtctcttgttttcttatcacggattggagtttttttgctataatcttgtttttggtgtggatttcttgtccacgtttatgttagtatattatacatgctctgtttcttttcctctcttctttcttcttcttcttcttcttttttttttttgtcaggctctcttttttcttctaaaaattaaaattgtaacacttacagatatttctccattttacatgatgtgctttttggggcttaatttgtctacaattctcttgaagtcatttccattttggtatctttactctgctttttgtttgtccttgtgttatcgctgctctaactaccttcggctgactatattgcgaaaatttgcatgcagaagtgcatagtctccatgttgagcttcacggctatacaagtgaaggtaacattttctttaacctttacagttactttaatactatctctatcaaaaagaactagtgtggatggtgataggcacaagagtagtaacttctctttttgtatctctgttccctgatgtttggtgttcatttcgtatgtgtgcttgcaagtattagtttaagacattgtattgatcttttatataatggaaacaacaggggaaaacatacttattcagctagatgaactcatgaaggatgctatttgtgtattggaaactactggtggaaacttgcaacccaattgggataatactctggctttggctaatggggctgaagaagaagcgaccaaggataatgaggcaagtattttcttgcattcatccttttctaatgaatactttgttcttatttgtaactacctttcgaacgttaatattcttatgtctcattcaaatctccacgctttatggacaagtgggcagtttctatccattatatgtttatattatgtatgccaatatcgtttcctcgtgcttttttcttatcatgtattgattgcccttcctactcaataaatttgtggcttgaaccaaattttggatttggggctgaacaaattattttaatttcagggaattgcattgtctagaaaactcgaagacactgacttggctgtcctcatggcgataatcctcagcatgtttaagcaagaatactcaatgcaggttagtctaatcacctactttctttcttattatttcagtcatttgggagcaaaacattacatgtagaactattcaatgctaaggactgaagtgtcatccaacttgtgcaggaaaaaattatttcagctctaagcctgaaatcctcttcagaggaactagaaagttactccctaatgtggtctctacgcccttttatagaagatgatattatgcatcaagcatggagacgtattcgttagcttaaaacttgttttgcttcaagagcacttcctctttattttacaacttatgggacagctcaagtgagtaaatataaacaaacaaaatctactattacctctgtatatttgtttgtttttcttctttacaatacattgcaatccaaaccaaaaaagcatggtatgatttaccatttatacaaacaaacacaatatgtcacgaaccataagtgtcttaaagtaaaacttcaaaggaacactaacttcagattcagtattgttaaaaaagcagtccacacaagacacggttttaacacttgactagctactggattaacctccttaaaggccttgtaacagcccacctgagacccaaacattgccatgaccaaaaccattccgggccaacttagcccagcccagaacacaaatagatcccaaagcaggcttaagcccagctgagcccagtaatgataaacaacgtctgatcttctgtggaacccaccttcggcccaaactagccaagctgagacacccatcaaggagctggaagc

SEQ ID NO: 43283 - DNA, 2985 bp, Cannabis sativa
aataaaaatggcggaagcaagttctagtttgctaacatctacaacccaagcagttgtgccaacaaatacaaatgatccaaatcaaaatcaaaatcaaagtcaaagtcaaccatcacaaccaattgagtctcgtatcgatgttgccactacaacatcatcacctccacctaggaatccttcccctcattttgtacaaggtaataaactaaaccctattttgtgaattagcatgatgtttttcatcccgagcaacctgattcacgaggtaaatgcaagttggtcaatagtcgattaatttgcatctgccacgtgaattggaatgctcgagatttttagtaaaaaatgaagttcactttttcacctttaatttctccatatgtatatatatgtatgtttatagggtcaagaattttgtactttaaaatatgtgtgaggttgtactatgctgccctaagtggagattggaatgtagtgaaagacatcttaaaagatcacccacaagctctaaatgcatccataagtaacagacaagacactattctccacgtggcagccagagccaaccaagctcatctggtcaaaatgatggtcaacgaaatgaaagacaccatagatttgactttacaagacagagaagggaacacaccattctccttggctgtggcagctggagcttcacaagtcattgaaattctaaggcatcaaaattctgatttggccatcactcgaggtggtcatgacctcttgccactttatatggcttgtttgtttggtcacaatgcaatagcacttagtctctaccctttgactaatccaattcttcaagaaagagaaagaaggtggacttttttcacttgtatccacaatggtttgtatggtaagttttatgaccatgctatatatataagataatgtttaggtgataacaatattttacttatacgacgtaggtccggtttaagtataaacgggtttgacttgtgcttagaacctacttaacttagaggctcaaacaaaattctttttaaatttatactttttttattgatttttaaaaatagtacatttttttctaaattagtactcaaaaatttaattttttctatagccattatatttcaggtccgatcctgctagtacggtacacccttgaaaatgatttatttcaatatatatgctttatctcttttgacattctagaaagctttttatatgatctagttatatataaattttgataagagtgcttatgttactattatttagaattacttataaattttgagaaaattataagtaatgtcagaaataaagtttaaatattttattccagcacgagtgagtatcttttttatactcgtgctaagtaaatatttgaattttattttcgataaaaatatataggcaatcttaaatcataacaaaaaaattggatttaaaaactctttagaatatcaaaacagataaaagggtactatagatttttcttaatattattgttatatccattaaataaaaaataatggtttttttattctatgtgtaatttcatatatttgtgtagaattggcattgatgatgttgaaagattgtggtgagctatctgtggcacgtgacaatggtcaaacagccttgcatgtattagctcgaaagccattagatttcatatcagagactcaaggactcttacacaaatttctcacttattgtaagtctctctctctctctatatatatatatatctatgtataatttcttaattacattatgaaaattaattaaaatttaattccaatattatgattatgtactaattgtatatatatatagtccctggaatgagagtcttaattagaaaatctcacaagcaaagcaaagccctaattctagtgaaagaactttggaagcaaattctgaaagacagaagtgactcggagattaaggatctaataagaggaccgactcgattacttctcgatgcggctgaggttggaaaccatgatttcatagttgctcttatttgttcttaccatgatttattatgggaatgtgatagagaaagaagaaccattttccacattgctgttgagaatcgacatgatcaaatatttaggttgatacatgagattggttccattaaaagtatcatatttgcttttaaagatagtgaaggaaacaacatatttcatcttgttgctaacttaccatctatcgaaagattaaatgttgtctctggtgcagctctacaaatgcaacgtgaactcatttggttcaaggtaatagggaatttttttttttaaaaaaaaaatagttttaaatatttaaatttaatttaaaagtatgatgaacaaaattagataattattttttatataaattttaatttaaatttaaattaaacgttaattcagttaactaatcatactttataacaaatttattaggtatattatttaaaatatttaaatttatttattaattttattatttaataaaattagttagatatttttttttataaataaatttaaaattagattaaattttatagatttaaaaaatataattaaattgtattagatttaatataaatattattacaactgcatacctggtgaaaacaccattgtggattgatctttgtcttgtgttttttctttttattttataggagatagagaagatgatggatccatctctaagagagaaaaagaacaataaaaacgaaaccgccagtgtaatttttagcaaagcacacgcaaatttattgaaagaaggagaatcatggatgaagaaaacgaccgaatcttgtacaatagtagcagccctaattgcaacggtagtattcaccgtagctttcagtgttcctggtggtaacaacagcgatacaggacttcctattcacataaaacacaatgcatacacatttttttcgctatcaaatggaatagccatgttctcatcttcgacatccatactcatgtt

SEQ ID NO: 43284 - DNA, 3984 bp, Cannabis sativa
  modified_base (360)..(360): a, c, t, g, unknown or other
ataattgtaacattttgatagtggattagaaaagaaatcttaccggaatcccgtcgataacacaacgatcgcccacatcgaagggatgcataacgaaaatgaagacgagggcctcgaagatggtcttgcaggtgtctttgaacatgaaagcggcggccaaaagctgtgtcgaaagaaaaacaagcacttttgtagtggctacttcaacaagcacaaaccataacacaattgttactattgcaagtatgcaagtaactaatttgttcagttgttttactgctgtttttgtatcacttaatgaatgggctagtgcttttcttccattgaaaactctcacctgaaataataataataataatnataataataataataataacatccaaatattaaaagaaaataacattttgtttggtaataatgtaaaaataaggactaataccacttaaatgttaagagcattgttaataggcactacaaaaaattttacttttaaccacaacaaaaattataactaaaagtgaaaaaattggaagtaattataaaaaatctatagctaaaggtattaatcacaaaaataacaatttattgtgattaaatattttgtcacaatacttattttgactaaaactaaattagtagcaacttatatctaaatattatattttagtcacaagtaattttttactataattaaaaatcacatttagttacagaaaaattatattgcgactaaaatattaaccttttttgtagtgaggtcctagagatgtctaattttgccacgaaataacatcttgcgaatggttagcagttttttataataattattaaattaaaatatgtgaaacttattatctaattacacaattatattgatatgacactatgtagtggcgttggacatacaccatgaactatcataccactataaatataattaaaattcaagtctcacatattttaatttaataattattataaaaattactaaacattcgcaaaatgacatttcatgccaatgctatgatgtagttttctaactagaacaaaagatgaaaaaatatatcaatcgttcataataattattaaattaaaacatgtagaacacaatatttaattacaggaacaataatatcgatttgatacttcgtgatggtattagacaccagtggtacactaaatgttgtcataccgatattagtacccttaaatatcgagtctcacatatattaattcagcataataattattataaaaaatcgctaacaatttacagaactcaacctcgggacctaatagcaatgctcttaattttaacctttcataaaatgaaatgaaagaagtaagaacaaaagattaagagaaaaaaggagtcataccacccaatcagtaagagcttttctatcaactcttccattctctgatccaaacattggaaaaacaagatcaacttcttccttaatcatgaatctcagcagatcatcttcatcaatatacctatgaatcacaacaaaagttacaacaaaaaacaattcaaaacacaaaaaagaaacttaaatcattatgcatttcttaactcactttgaaccaggctgagcaacattcctgaaaatatgataagcagcagcagttgcttccatctcactagtaatctccttattctgttctttagcaacagtttccatctcatccaactgattagaaatcgtcgaaagccccgaactcgaaacagcatcaatcaaaaccttcatagtccaagctgaaaccttttcttgtttcatcttatgaagttgagccatatcgataacccttttcgatgattctttcgacgatttcttccctcctttctttgtgcttgtgaaactcaattgtcccatactaggtgacctaccaaccctctcagcctcctcaatcaatggaggaccagaaagtgtttgaacaacatattgatggaatatagattcttgaatcctatcaaagaatgtgttcacatggaaatttgaagctaagatctttaacaaaagagtcttcactaaccataaaaatgacccaacaagtaatgtcactaatgtccatgaaagtattctaagaatcttgtttgttgattttgaacgtttaataccatgattgaaaacaagtacccaagttaaaagaacaaaacctaaccaaatgaagatttgaacactcttcttcaaaccatgaacaaagtaaacaactttcttttcaagtaagaaatttctctcaataacaaaaacaacaatatgcataaaccaattagtcatcaaattaccacaaaatatcaccataacaagaacacaccatctccataactccaagctccaaactttataagtttccaactttttaactgtcaaactagccgttaaacaaccaaagaggaatataaacaaacaccattcaatcaaaaaccttgctttcaattttctatgcttttctttatgtaaagcaactttgttgtaaatctcttcagcttcatcatcatgcccatgagaagctgagaatttttgactccgaccggtggagaggttgttcggagatgaagctcgactgaatgagcttctaaaagatgagtcaatcacaccttgatctgatgagttgttgtgatcttcaatgggagctgatgatggctcaccaaatcttgatttgggttttgagaaaactgatctgttcagaatattccggcgagttggggttccgtttggtgttgggatttttgggggtttgtttggacttgggaaaaatcttgaagtttccggcgaaggacaactcaccggaactttctgagttgaatcaaaatcaaccattttgatctgttttggttctgatgaagattctaaggcttttggaggatacccttttggctcttcattaaggatttcgactattacttgggtttcgccattaaagtttgaagctttcttcttctctcttgcttccattgaaaacaaccctgtaaaaaagactcgatttttacaagtgggaatgtttcagatttcgattatattaaggttttttcaaaagaaaaaaatatataggtaaagattggaactttatgataaacagagtaatattttggcgccaaaaaaagaaaaactgtaatacctgaataaataaatgcttagtgacactgaaactgaagcttaactaatctctcactaagcaaatatgaagtgaagaaagagataccaccattgatgaaagcttcaaactttggttgattatatttttataaatggtaagtacgtacaaagtgatcagagctttgatattaacaaaaaggaaaattgtgaagagtttctgataagaatcagattatatattatatattaattataatatttattatatatagagatagatagatatgtacttatatagatgtaatattgtgattaaaggtggttaatttattattattttttgtttagagatactgaaacaaaaagtacacgagtttcttaatttaatcctcgattagtatatatgtcagcacacaagagatgatatatttatttatgttctgtattgtgaatttgtaatgtaaaattatgtgagctattgttttattttattgtgagtttaataggaaaaatgctaagggataaatatcttattatttgtgtattttaatgttaagtcttcacacaatttgtaaaaaatatagagaattgttcattaattatattgccacatatttgatatagtgtccttaagattaaagtgtcttttttatttttaccgaaagagttgtaaattactcaaacataaataatgtagacaaacacatataattattttttattttttaatgataaaatgcaccaaactccaattactacaagatattatatttcttgtcaaaaaagaaaaagatattatatttttagggacacgattttatcagggtttcaaggtacattaaatgagtgtcaggttacgtttctactttttaaccctaat

SEQ ID NO: 43285 - DNA, 3164 bp, Cannabis sativa
aggattattattattttgtaatctcatcatggattgcgtgagctgcgggggtccattattggacattggtattcgtttgtgggattgctcgaccaagagtatggattattttcatgaacttgaagacaatactgagtccttaagtgatgccatgaacgatctcaggaacctaagccaagatgttaaaaaaagagttgaatttgctgagagacaaagtttgcagtgtacaaatcaagtaaaagggtggttggaaaaggtggaaactttggaagaagatgtgaacctaattctgttaaaagctcgagaacaactccgaacccgaaaccacaaatgtcttggtggttcttcctgttttagccacaagcttggaaagtctgtagctagaagactagatactgtgagaaggctactggaaagtggacaatttgatgctgtttctgacaagttgccgtgccttatggtggatgagatgcctatagagagaacagtggggttggacttgacattgggtgaggtttggagtagcatcgaggacaaaagtgtgggaattattgggttgtatggcatgggcggcgttggaaagactacccttttgaaaaggatcaacaatgagttgtttggttcaagaaatgattttgatgtaatcatttgggttttggtatccaaagaagcaagtataacaagaattcaggaagtttttcgttataaattacagattccggatgagatatggaatgccaatgcagcaggagacagatccattgagatacaccggattttaagaggtaaaaaatttgtaattttgcttgatgatgttaggaaaaggtttgatcttttaaaatatggtattcctattccaaatgatgataatgggtctaaagtaatatttactactcgttccaaggaagtgtgtggccatatggaggctgataggtgcattagagttgagtgtttgacacaagagaaagccttggatttgtttttggagaaagtgggaacagatgctctgaattctcatccagatataccacatcttgccaaggattttgctaaagcgtgccaaggcttgccacttgctttgattaccatagggcgttccatggctagcaggaaaaaactagaggattggaaacgcgggattgagttgttaaggaactccttatcaaacttcacaggggttgttgattatgtttatcttcttctcgagtttagctatgacagcctgcctagtacaactcttcagtcttgttttctgtactgttccttgtttccaaagggctctagtgttgtgaagaacaggcttattgatatgtggattggggagggtttttttgatgagtttgatgacatacatgatgaacgtagacaagctgaagaagccatcgaaactttgaagttagcatgtttgttggaagagggtgaatcagaacaatctgtgaagatgcatgatgtaatccgcgaaatggccttgtggttagcttgtgatcgaggccagacgaagaacaagtttctggtgaaagaaagtgtaaggccggacaaatttgcgaaatggaaagatgcagaaagaatatcattatggggtcctgaaattaaagatctttctggagttaaggtttctcccaaccttataacattgcttataactagtacctccataataacatttccatgtgaattatatgaagccattcatgccttgagagtacttgatctgtcaggtaatcatagcttagatttgttacctgaaggaatttctagcttaataaatctgcagtatcttaatttgtctagaactacattgagaactttgcctgttgggattaagaatctcaagagattgaggtgcttcttactaaatgatacttataatctgattgatattccaagggatgttatatcaagtctttcacatttgcaagtgtttagtaaattacaaagcccagatcaaatgcattactgtccaatgtatgatgaaatagtcttgttggaggagttagagagcttggaacacatggatgacatatgcatcaccatatttgaaacactttctgtccaaaaactattgagcagtactaagctacaaaggtgtacaagaaatcttacaattatgtggtcttttacttcactcaacttatcaacttcagttctaagaagactcaagtatttggaggttcttgagatatggaatgctgatactctcaaaatttaccccgaaaagcaaaggattcaaggttctctatcagttgaaagactgcacagccttcgagttttggtgattgttcggtgtgaaatgcctgatatgaattggctggtttatgctccatgccttgagtttcttaaagtgaaagactgttcatcaattaaacaactattgaatgaagattttggtgatgaaaatgcattctcatgtctcacaatgctacatttgcaagaccttccggagctggagagcatcataagtccacagcaagccttggcatttcctgttttgaaggagattgaagtgttgaattgctcaagtctaatgaagctcccttttgattccaacagtgcaaaggaaagtttgattagaattaaaggacaaagggaatggtgggaaaagctggtttgggatgacaattatgttgaaagcttcttcagttcaaaatttgtgtcattggatggtattgccactggcactgaatatgaatgccttccaaaactctcacttccttcagatatttatacactaccatccttatctccctaaaattcatattcttgaaatttatagagttcccaagttagaactcatgtaagataatttgaaaatgtattgaattgattaacttcattttgttttattttttcttttcctttttcacttttgtccctacaaatccagctttttccagcaatatttctcttgccccatcacataaacactcttgagcattcacatgattttaaagacaatccacaaattctaattacttgaatatactacaccttttcaatgtttattaaacttttgggaaaaaaaaaataataaatttataaaatatagaggggtataaccgtaattacagagattatttttctattaataaaaaattattccaaactgttacataactattataaatagaatttttttttcttaataaaaaatgaacaaaagttat

SEQ ID NO: 43286 - DNA, 4495 bp, Cannabis sativa
aaatcatttattagtcatcatatgctattttctttgacaattaaatttactaaattggatcgtttaagtgtttgttgggtgttggctttgttcactcagcataaataataaaaaacaaaacatcttaataaaattacatacaataaatttaaacgaaacaaatttattattacatgattatcacaattataaatatatttttagcttttctataaatattttaatttcattttcaaattttaattttgacttaggttggatttatctaaaattccaaacctaaatataagattttgtcaggttggatagtgttacttaactaaaattgttaggacattttaattttgttattatcttcaaattgttttcaaatattagaaaaagaaaaaggtggaaagaagaggtggtaacgttggtggtcacctttttataatttgtgcctatattctagctaacttctttatcatctctctcatttcaaaaaagcttcaaaaccgaacaaagtgaaacttcttgaattgtatatataaagataaaaaaatataagtatatatattaacgaaaaactattgtacggtatttctaatctttactctctttctctttctcatttgttaacctcgacctcttcgtagagaaacccaccaagagaaatagtggctttatttgtttgccttctcattcttcaaaagggttgagattgaaaacgtaatacatggctgcgtacaaaactgaagatgagtatgattatcttttcaagctggttttgattggtgattctggtgtaggtaagtcgaatttgctttccaggttcacaaggaacgagtttaatctcgagtctaagtccactattggggtcgagtttgctacaaagagtttgaatattgatgggaaggtcatcaaggctcagatttgggacactgctggccaagaaaggtggatattttctgctatttttgtttgatttgttgttttttcttacatgggttttgcttgttttgccttttgatcgtggctttctttcatttttatttgattcttgtgaaaatatatggtattgattgtatgggttttgattatttggtaagatggtagctcttttgagatagtattttgtgctattggttattttgttttgtattgtgggtatttagtgggttcgttcagggcattaagactggttgtttcttgtcaggatttttttcagttttgtctctaaataaactatttttgactttagaagctatgtctttgaaattttgctcaatttgtttacttcttcatcgtttgctatatattatattctattaatcgatttgaagcttcaatgttgaaagtaccgattatatacaaatttgagccattatttttatttatttaattgaatatgagtcattgtatttaattcagggaatgttttatttggggatgttatttttccgagaaatagttgaacttggaaagcctttctatctagtaaaaagtttatttccttggctaggaagagtggaaattgtgagttatggtgggaaaggcagactgatcataaataaggggatttgtgtatagtgctgtgatatttttgctaatatcatacatctttaataaaaataaatatttgcacgggtgactgtcctctgaaaaacagatttttaccagctttaacatagacatttacaggtcgccaagatgaaatggtttcgaaactccagttagaacttggtggtggtagtaatttaatattttcttgttacgtttacaatgaaaattggatattcttctattgaggtatatggagttgatgcctcagtatctagactttcctgagatatttaggagaacctgctgtaaattactaaaccagtatccaaacaaaccagtagcaaatagcaccaccagcagcaatagtagcagcagaacagtagcaaaatagtagccaaacagtaggaaaattatattgaatataagagagaaccaattacaaactagggttcattgcggcataaatgcccaaagttttgagtttgtaagcggtataaacctattgatttttttagtgacataaggactcattgttcgtaaaactgtagttttcttacagtttcgttaatacatagttcgttctgaatttattaaaagaattttaagaagtaattgatgctatatgtttccatctagggtattatatgtattttgtttaagacactaatggagtatgtaatgataaagttagacaaaaattacagttttactaacattggatacttatgccgataaaaaaaatcattgagtttatgcggcctataaacttaacactttaagtacttatgtcactatttacctttacaaactatgggaccccttaggcccctttgatgcaaagagttttacacaagtcattgcataccctttctattctcttacctgtatatagtaatttctcacacaaaaccactccccaaacaaagactcaaatagtctttttatttatttatgctatcacaccatactaatcgtagtacctaacataaacgacctcccgtgaaagatgatagtgtcatctgttagctgctgttaaagtgcaccatagttagagcaatttgaggaagctcatgggatggtcgtgcaacaggatgtatacccgtcaataagtcatcctcgatcaataaatcaatcgagcaacgtaatttgccctcctttcatcaacaaaatgagttgaagttgaagcaaagtgactcgtgaagaagcctttggcctaatttcgtctcaccaaagagtgacaccaagcagtagagtttattgccctctgtcaaaaatccaatgctggacccgcactaggatggcactccacttctcaattattgaaggtatccgtagaactagatcataacaatgagaagtggaaatgttaatagcacatggcagtgccacacctatttcaaaaattgatccttcagtttgccaccattgggaagtgactctaatcaaattatataccaccacaaaccaataaatcaaatttggacaatcattatgacgaatagtggcattctccctcctaaaaacttggtccactctatctcaattgataggttaacgttataataaaaaaaaatatctaaatcattgtgtttgaagaagaaacaatgaaatgagcatttactgagtttaagccgagtagtttcttcaccttgaggaagttgacgacaagggttgatggtgaacagatcgtaacaagacaacaaggcagagagcgtttgtccggatcccatgtctctaatgtagtcgtgaccccctccccaatgtgcaacggcggatccaaaaaggtatagcatccactgcttccttcgtcgcgaattgagttcttgtgtagggcaaaagtcgtctcacaaccaaaactcacgttcaaagtacaagtgcccataataccaacccctcacagtgacccaatagatttatgtttttccttatgtgggccagatctgtgggttgggtctagatttgagtgcataaacttgggcatcgtattattgtgctgcaagggattgtttaagaagatagatttaacgaccccttttccttcatcgtcggcttcagaaaagtgatctatttgccactttgttggtgaatgctaaaggtggtgtcgttagcaccatgatcgactgccacgctagcgactaagatcttactggcggtgcactcctctctggcatcatctcccttacctcttttttctcttgtgatagaaccatcttcggagttgtatccaacacaaccttcttctacaacatcgtttcaagcaaatcctattgctcaggtgattccaccagttgacagacccaatcgacttcaaatgtggcttctttgaatactgaaagtagccgttctggtggttccactagcaaatccttcttttccgacgactcaaccagaggatgaaactagtcggccactgttgttgatccttcgtgccccaagcacggatgaacaagaaggagagtgatctgacaatgcagtgcgggtctctccaacaccttctctaaagctggcgagtctagcaaacgtgcaattgcaatctcttattgccatttccatcttttcaaattggtatgctaatgtttgagactcggagatttttaaaaatcgttcatggtgttttaagtccaatatgatactactcaggttcgcctttatgctattcatatttgcttcctttctttccattcttttctccattcctttagctttctcctccattctcgtagatggcatttaccgagaatcggtgcttggataccaattgttaagaacctgctgtagattactaaagcaacaacaaacagtagaacagtagcaaaatagtaggaaagtaattgaataaccaattacaaactatgggatccccttagcttaggctcttttgatgcaaagagttttactcaattcattgcataccctttctattcctttactcacctataaatagtaatttctc

SEQ ID NO: 43287 - DNA, 2613 bp, Cannabis sativa
  modified_base (2580)..(2588): a, c, t, g, unknown or other
ctttttctttttcaaaaagaaaatgattgcgaaagtgttgaagatgtgtgaatgaataatttacatcttcatatttttcttataaataaaaattaccatttgatgtcttttaactttttctttttaaataaaaaaaataaataaagattaattaaataaaaagtcacattataattatccccttaaaaaatgtcccattataagaaagatctccctctctagatctctttaaacatattaaaacaagttatgatcaagagctatcacaaatttaaaatataaagatcattaacattatacataaatataaaggtaattattaatttcataattaacaaacaaacacatgaatatgaatgatgatgagtagtggtatatgtgtatatatatgacaatgtataacaatggattgattatatatattgaaagcatatacctgatatcagttcctccatgatcatcacgaagatgtttggtgacattatgcttgacccaatctttggcattgtcataatcagaagccatctttttaagcatgtcatttgggattccaagcataacctcaataccagacccatacaatgagctcactgtccaatcatctgcgtcgaaaagcttcactttgttaatcccattgtcttttagaagattcaccactatgtttggatgcaatgggtgagatgccattgttccccaatttactcctatattgctctctccattctcaaatttcatcattaatattattccaaccatcaaaaccacccccaccaacctactactactagcttcgaccatggttccacaattaataattaataattatttatggtgtgttcatattaatcttaatgagattgatgaatgaaactaatgatgatgatgattgtagtagtttgagaaagaaaacaaaaatgaaggtggctagagcctagagacattaataatattggtttccgtaagccttgttaatttgtggtttttacaaagtttgttaattggccttaactgctatcattctaattttagatttttatttatttatttatatttgaatattataacttgattttagttggcacatttatataataagagtgttgtatagtatatagtcaccttgcaaaaaaaagtgcaatattattattttttttttctggaaagaccttaacttcattaatcagagctaaaattttggtgagcacatggagatcacctcccaaaaattaagcaacccattgcagctattggataaatcccacttagcaataacatgcatgggccgccacattacaatccttcttaaactaaaacacataattactagaagaaagcaggtccaacagatcaaagaactcaagagtcaccttcccctctggaggttttaccatttttgattgcttgaaccagagacaaacaatctgagagcaagtcccaatccttgccatggaagtcatgaatgacctttgcaacgccaacaattcattatggagaaccgacgtcaccacaactttcttagcaaaaactgccttaacatggccttccgcatccacgaccacaactctaaaagcagcaggacttcaagaaagctgcatccaccataactcgcatcttcccaattgataagtcgatattttgtcttataaatatggccaatgtatgtattaatattcttaaattgattctttaaattattgattagtgtaattataatttgttaggctattttaaagactaatcattcatttagagtcatttagaggcattttaacacattttggtagaaaatagtgaaagttggcgagctcggtcggtttgacaaaattgaacataaatatgattttttacaactttggaagtagaactggaattggagctaaatgtgaaagttttagaactcgttctcaactttccaaatcatcttgaattgtctaattccgagtcgtattaaaaaagttatggcttaaatactaatctgaacacgcaacaaaaaaatttcagcaagaggctctcgccgcagcgagcctcaactttcgccgcagtaagagcgcagtttcagaattcaaaagtttatcttttttttttaaaaaaaaaatcaaaggatttttgggggcatttatgggacttttaaggttcgtttttagagacttttagactacgtttttggaagagaaactcaaagaaagagaaagaagaagaagaaggttgcggcaccaaatgttcatcattatagttcttttctttttcttaatcctttaatttttattataattttcattataatgattagtttggagtaatttctttttagtcaagagttatttttaaaccctaaaacatgaattcgagattgttaataataaatgttattcttgatttctctcatattaaattgtttttatttgaatgctataaatattgttaattcttgttaggtgtacaactaattgatgttttgtattgttctactatcatcttagaattacttattgcctaatagtttaggattctaagtagagtgataattaatttgtaattaaatagtaatgtcataggtattcactacaagaaatgtcactnnnnnnnnnacatttttgtgctggcaaaagttgg

SEQ ID NO: 43288 - DNA, 5311 bp, Cannabis sativa
  modified_base (462)..(466): a, c, t, g, unknown or other
agtaagaataataaaaaataactatctttttagccattttagctaaaatttgattaaaaaaataagaaaaatgcaaaaagacctccaagatgtaatattgcaattaagtattatgtttcactggtacttaagcattgctattaggcatattggtgcctagcactttctagacgtgttactttgcgattggttagtgatattttttaaaaattattataataaactatataaaactgtatgagacctgatactttttaacatttcacatattaattattgtatgtttaaatgaagtgtatagaaattaaccaggaatagaacatgtccaaaaactatcaagaaacataatgcatgaaacaaaagatcatttaaggtgaaatttataaaatatcacaaagagatttcaaaataaagaagagatgaaaactataacaaaataacagctctctctctctctctctnnnnntctctctctctctctctttatgtctatcaatctcttgaccctaccttaccttaccttagcttgccatagacatagcttaattgattacaaaataatcaaattttgtaacaaagttgtgtgacagacagacagaagacagacaagttaatactaccaccaccactaccactactactactccctcttctcacaatcacttcaatcacatcatctctctctctctttctctctctcacgtctcaacacaacgcatgcatttaacactatcatatcatttcactcactcactcactcactcatatatatctactaattatgaacttatgcattatctggtcattaattaatgctaattaatttcttttatttttgcaccatgcaacaaaactctcagatatatacatacaagtgtgatgaaagagttagtgacagaacagtcatgaacacaaaaacagaagtcatctaaatcagtgtgagcaaagctaagcaaagctgaccatattctctcacaaacacaatgttcttctgctcattctcactcttcttcttcctcttctttcttctttattttctttctcttccttactctgctctatctgtactcctcaacaatctaagccatgcaaacaaacagacacttccaccatctgaagctgaaactctgctcaacatcatggaatcaatgtcttctgaccaatcatggaagacctcttatcctcacccttgtcaacaagactcatcttggcctggtatagaatgcaaacttggaaatgacaatacttttcatgtctcaaggcttgactttggtacttttccttacccaacttgcaagaaaacagcttctttcccttctcaaatctttgctctgccttttctccaatctgttttcttctttgattgtttcactcttacaaaaacaactctatctgttccagaagataataatgtcttcaactcctcacttcaacagctcagtctaaggtccaacccagctctaattggttcaatcccacctcagatttctaaacttaagtccttaaagatcctaactttatcacaaaacaatctctctgggaaaatcccagttgagatttttagcttaacttctttagttcaccttgatttgagctataacttgctcactggtactatcccaaatcaattgggcaatcttaaaagcctagtgggtgttgatttaagctacaataaactttcagggacaatccccaacacaattggccaactgagtcagcttcaaaaacttgatttaagctctaatttgcttactggtggaattcctgatgatattggggaactgagtgtattggtcttcatggctttgagtaacaataaactgaataaacagtttccagaaggaatagaaaagttgcagagtttgcagtacttaattatggatgaaaatcccatgtcagtacaattaccattaggacttggtaagcttgtgaaacttgaagagttaaggcttgctgattctggatattcaggtaccataccagaaaccttgtctcaactaaaaagcttaaccactttgtcattaccaaacaaccatttgacaggtcaaatcccagttgggtttagtggtctctcacatatttaccacttgaatctcagtaaaaatctcttaggtggtactgtgcctttcaattcaagttttttaaataggcttggtaaaaacttggaccttagtgggaacccaagtctctgtttgagtccctctgaagcatatagtgtcaaggttggagtagtcaatatatgtggaaaaatgaagaatggatctgccaatgccaatcagccattgatgaactctcatgctttatctcatcaaccattgtttttgcttggtctcttattattgttcatgtaataaattttgttacatagcttaatattctaagttattgtattattagctgtttttttctttatgatgagatgtagatacataagaatccaagaaagaaaattagcaggaaagtaggtataaaatcatttctggtttgtttaaattttcaggctacaattttagtgacattggtgtgattgttttgtcttttgacagtttaattattatgtagtatgactgatatgttttctacgatcaactttcaatatgcaaaagttgtaactggttactatttttggagcactcacatcctttgtctactcaatcttttattataaacctcacttctttttttaattttattttatctaactcattcatattacaccatatatcaattttttttttatatttttattatatattttattcattttaaaaattaaaaaaataaatatattaatattacacacacattccaaaaacatttgaaaaaataatataatatttatagcttaataaatagttcttttgcacgtatagttaaatacttttcataagataaatgtttgaatcatgagataaatttttgaattttaatagctcatttgataaaacaatattttttacctcttaactaagagcatttccaacagttttcctatttgatcttttaaaatactttgttaaaacttagttttttataatatttttctttatatcatttaaatattatatctttcacatcacatatattttattaataaaagtaaaaaaaaaaatacacaaatgagtaaaaagattaaaaaaacaaaaaagagtagaaaaatataaaatatgtttacctatttactatagctatatctagagaaaagttttttagagattggaaacatcatgtataatagtttaagagatttcaatttaaattttccatttagtatttttgtatcaaagcaaaaatattcacaatcatattcaatatttttggttgaaatggatggagagccttctgcaattatttttcctttgactacttttattatttagagggttccttagttatatatatttattttttaggaacatttaaagttgctttatcagagttatttctctttgcatgttttttaataactcatttttgtccaatcaatagactctgcaaaggaagaggtagtgcaattgctcattgtggagttgggttggggccctgggggaccctagaaagtagaaacgaccatacataaatattttaatcaataaataatgaaaaaaaaaagaaaaataataatgattataataagaagaattttattatatggatgggaaagcaaccacacatcaaattgtgaaagaaaaattaacccaatacaaaatgtacaattaacccattttatgatataaaagatgggccattattcatcaatataagctcataaattttgtttggtgaaatggaaacattttcaatttggtcaaaatatttgtccatttgaaattgaaattgaaattaaaagagtacctacctgaggaagaattatgaaattttgaaagagctggatcccattattactaataacttactacacagaccagactattttataagattattttactatttataaacagtttaatggtacaattttaactgctctcttttactgtttacccactaacccttataaaattcagctcagaaagtaatcatcttcaggagaaaaagtcaggttgtgtgtcatatcatcaaacaattatttatttaaagttaccttatgtatatataagttgttgggagaaattaattacaaatatataaacattttatatatagtacaattaattgcatattattattattatgttcacctgaaactaattgatcccccccttacaatgagggaaaaatattctgaaataagaatcaaatccttagttcctgtttcaagtaacacaacaaacaagtaaaatccaaaaaggaccaccaaagggtttttctattataatataatatataaacatatatatatttatatgtagctaaagctaaggtgtctcaacttatagcctaataaagaaatagagaaattaatggtttatctattgtcacaagtcacaccagcctacatttatcattttttcatgtttggttctctgaaatatgtgtcatttagtatagggaaattactgtgtccacattggtttttctccatgcaaaagtacttgggcagagctaaaaacacatctatgaaaatgggtagtgaacaaaattttaaaaaagtgtttcttagtacaaatttgggctacattttatacaggttctgggttatgataaaaataatataataataagaaattcagagatcacatggggattcagtagtaaatacaagtttctaaacactatttgggatgggtttaacttgttcttaagacattaacgtggtttacaattaaacatgtttgtaataaatttgaaattgttgttgtggttaaaactaaaagacaagacataacatggtctctgtgtctcaggttgaaaaccacagttgaaaaaagaatctttgaattgaactcattaataaatttcagtagatgtaacttaacgaagtgtcaacaatcagtaagaaaaaaaataattttacccttactcaaatcttaatattattatttatcaccttaatttaggtatggcaaaatgatgcctttccggatgggtcggagccccgatttgacaggcagttggtaatatttttagagtgtatttagaagtaatggtataattattaaacactgtaattacatcactttaaatagtaattatttatgaatttctaatgagatagtaattatacacgaaaataataatttttgtacttatggaaaattttgaataattacagatcaaataaatatacaaaattttataattaccttcaattataccaaatttcaattttctcttaagtttccaaaca

SEQ ID NO: 43289 - DNA, 2647 bp, Cannabis sativa
atataatagcttttagggaatattgctagtcaatcgcaacgcgacatgtcaagaaggtgctaagcaccactaatgcctaataacaatgctcataaatatatgtatatatattgtgtggtatagaataataagtacatatagctatattgttcgtccacacaattaattttaatttgagtattgatatttttttcatgatgtgtagtttattttcattgttgtttttcttacttttaatagaatcactctaataatttacatcaaatatcacacaaagtattctactaaatgaatatcttttacttaaagaatctcgccttttataattatttacattaataatcctaattaactcatttatggtataattttatcatgactacgaatttaacatcttcaacaaataaaatcacacacaaaatatttactaaattattattttacttaatgtttatttttatttatgttgtaattcttgttagtttcatcaattagtgttatgttattttgattttatttaatattagtatttgtttttatcgttgtttaaatttgtattttccaatgtgttagtattttaaattaataattactttgtgatgaattttaatttgagaagtaaaatgtaagattaatttttaaaatatattaaattaagggcaaaaatgaaatatatatatatatatattttttacaccaaattggtgttgacttaaaatctaatactattaatagtgtagaatttggtacacaccaatgtaatacataatttgatgtgtcattaaaatgaaatagtataaaagattccacactaacttgatgaaattgtacatcattagaaatgctcttagaattaaaaattaagaatgtatcacctccatatatttagtactggatttaatatctttgccatatcaaaaaccttattacatttataaatattgtatttcttacctattgatagggataataatttataatcattcatctaatcaaatgactttaattaaattttaaaagaggttttttatggggttttttattttttacattttaaagcagttttttttttattattattattttacatttttatagaaatccatatagtaaccaacggagcaatctttaatcgcaatctaaatccatatagcaacccacataaaaaatatcagagcaatccaaaccgtaaaaataaaaaaatattaaaaaaatatagtatatatggtgaggcccttttttttatttgtatactataaattgaacaataatactataaattaatattatatatctgcataaactatacaccctacttttaaaataatgatgatgtaaacatcgattacataattgatgacaaaatgaaacttaaatagtaattttcgacaagaatatagtacaaaagatactaatttcttaattgtatagaaaaatatgattcaatattttctctgatagagaaaataaaaaatttagatcctctattaccaactgaactaatgagctctcttgaagcatatgaaagaagatcaaaaaggcaataggaaagtgaagttgaaaatttctttcagtctaaaattaatccgcagtctcagaaaccaaaagctgatgagaaaaagacacaagaaaaataaaaagaaaataacgacaagcatattcttcatgtgtcatctgcgaaagaaaaaatcacttggagaaatatattaggttttaatttgtgatatttttaagtgtgtttttacagaatttttaattagttttagtctcattaattttgtgtaattttatgcttttgtttgttattgtttttcaagtttagcaaataaatatattaggtttatttctaggttgttttggagtttaggtttatttttattgttgttatggttcgttgttcagttttatgttagttttaggttttaaatgaagacactttggctttttattagagaaaaaacttgttatttttcgggtttcttggtgctggaattatcaaatattgcaaaaagaaccttaggatcaaatatcttggctcagtgcaagtcggaggtctctaaaattcagctttttaaaagttacttatgactaaaatatagtatttaaagattaataagtcttgccagctggcatgtgtgagattttttctctccaggtttttgaaagtttgttctgcgatataactggtttcgtgcgactaaggctccgtctccgattggtgcgactaaggttttccgttccgattggtgtgcttctactggtggagattggtgtcgactggtaggtgattcatcatcgttcggttttcattcgtttttacagagcttcggggctgcgtgttgggattgaaggctatcggggtctggggtgttttttctggtttcctcacgatcagattgtcgctacgttttgtctctggtttggtgcgactgggtattgtttctctttctatttggctgcgtttttctgttttggatttcttcaaggttttttgatcgattcttttggtgttgtggctgttttcggttgacgactgattactctctctatcggcttgctgcgattttattggtggagcatggcgtcaagcagtcatgccatggaggacatggagcagagctatgggaatatagagttagaggatgag

SEQ ID NO: 43290 - DNA, 3057 bp, Cannabis sativa
tcgtagccatgacttccagcataaccattgccaggtacataggaccaaggagtataggggaaagatccatttgctggggctgtccctgtttccacagcaatgaaaacgccccgacaatttttacacgaaagtctcttgttcacatacttccgaagatactcatactgcactttacatgaagtgcaaactgtccagaacgtgtcaagtctaccgtgagaagcagaggaattggagcaattattatagcctgtaacaacaccagaagaatgaacagaagacaaatttgtctggttaacaactgtggaggattgtttgtttctctggtgatcgtaagacttctttttggaattatctgacaacaaggtccacgcctcagaaacaagtttgaaagcaccatcagctcccacacatttgttcttatcaggatgaagcaacacggccattttcctgtactgtttctttactgcatctttatctgcaaaaggtttcaacccgagaatagaatagtaatctgtttcaccattggatttaccctcagaagcaatataaacgtcatatgtcgtgaccatttgggatataccctccagtcccggatacagtgtcttggcctttaacgcataattttttgcaccagcaaagtctttctctaaaaatcgcttctcagcgatctctttcgctttcagagcttcttccttgtttgcttccatgtagtgtagtaattcaaattacatcaaaaccaaaactttgaaaattaagctacaaccaagacaacgtgcttaaccacgaaagaagctcaattctcaagcatacccacattttcatttctgcaaataattagcaacaaattaaaatcgcaatacatatgtatatataaataaagacggttgatgggcatcaagtattgcgcttcaaaaataaataaataaagaaaaagactaagaactgtgattgaccatgtcgtattaatgacaataaagtcagaaacgcaatctcttacgtttacgttccagcagcagctacacaaaaagtctaaatctgaagcaaggatttatgattgaccttgcgatcgaccgaagaaattaaaaaaacgtaatatcataaccgaagatttgaactttatactgttaagatttataagacataaatgcaaaccaagaaatacaactagaatttccttttcctacataatcctcgatttttccaaccaccaaacactatccacaatcaaaatcaagtccattcttcaaaatccccaaataagtaagaatcagctgaatatcctaaatctaagatccgaattccactcaactcaaaccccaaagaataatgcgctgagatcgaaaacccatctcccaaaaactacaaaattaaagctcaaattccattcctgacaattcaaaaaacaaaactggaaaactgaagtagtacacactaacgatgtagcacaaagattatagtaaaatactcactgaaacttgagcagaagtggaggtgaagaagacccagatcgccacgtgtacttgggagctcgagctaaatcaagctgagctaattgtaaatctcactgtacctaaagcacagacagagaaaaaaaaacgcattttcttttttatatataatttatatctatatataaataatatgtgattatagtggaagtactaaatagtaaaggttttctagggtttagggaaccaaaattttcagagaatcggataaaagaaaaattccggctaatcggcggcgaagaattctagattccgtcgattgagccgatcggaaatggagacaatttactggtaataaaaaagaaattgtgtggttttttttctttattttttaattttctgggaagaattgtaataaacggtgtgttaatagtgtttaatggtggaggatgctattttgcgcagtggtgcgttatgggcatcattttttttttcttttcttttttttttctttttcttttttggttttatgttctagggttgagatatgttttggtagtgggtagaaatggacttggttttgtttaattaaaaaattattaaaaaaattaattggctcatctcattattatcaattataatattaggtaagagaaaattatttttataattttcttttattttttctatattggaaaatagaagcaaatactttttgtgtagttgattttttttttttttttaaaaaaaaaatgcaagttaataccaagagctcttacacaacaatattccttgatagagtttaatttctaattaattacgacattaatatgaacaaaataaataggtatctgtatttgttctttgttttccttttttgattttatgttaattttttttttcttaacatagaatgcaagccaatacacaacagcactcattgaattgagattaattttattattttaggacattatgagtggtcctttcaagttatttactttatgtgagtgccatatatatgtactaaataaataaatactattttaaatttaacatttaaacaatcgacttctaataatataaataaatttagtttttaacaatttattcttttcacttggaaccacttgtgttaccatcacatgaaattgtactatgacaccaataattcgtctactttctagctatatatgtaacacaaataaataaataaaacatattagaattaaacaaaatgatggtttcttcataatatatattaagaattgtgagtatatcttaggaagttgtaaattaaggattgatgcagaagtgtagtttgttgtttctcgaaataggttaaataaatgttaaggatcgatgcatgtatgttacgtattcattcatgtggtatgggcaactaataatgttagaaaacacaagaagactcaacgtacctctaatccgattccaacttccaactaccatatagctattatagctaatgtaagaatcaagggattcatttttggaacacaagtacaaaaccttattacaggacagggtgagtaatgctaaaacacacaattatgtgtaatgaattttagcaatatatataggtgactat

SEQ ID NO: 43291 - DNA, 5036 bp, Cannabis sativa
  modified_base (571)..(576): a, c, t, g, unknown or other
tatgctatcttttctatccctcattggctatataagaagtgaacttcagttgatttctgcgagcaatttagaaggaaattagaagcattcaacggagtgcgaattttggagattgaattcaatactggaggtattttttagagaattttcagcattctttttcttcttttttctgaaattaatatgtgtgaatttgctacaatgaacatgagtagctaaacaattctttagggtctagatggagattgtttgatattgatatggttttaatatgatttaattttctctcaatttctatgtattctatttcattcgtagttaattacttttaattgcatgatcaccaattaaatgtctatgattttgatgcgagatctgagaattgagtgtcgattatgctatagtgaaataaaactaaatttcgatataggacgagagtacctatatggtttggatagcttatagggtttctgtgtttaatgcctgttacatgtttaatttatcacgagagtagaaaattttcatgtaattgaggttaattatttatatatctaagaagactataaattannnnnntaaacctgctattgcatagaaatcggtaataggaagataatcatattaagccataaacaatattagatacaattgaaattgaaagctctaacttttattcactatcacttcttttattaatttacatgcttcttactttcactgtgtttagtgtttcctagttttaaatttttcttaaaatttatatagccaaatagaagtaaggatttaattttaacgtacttaactacacgtgatgtcaacctggacgttgggtgagtgagaaaacgcaccgagatgtattttttgatgcctaagtaatattttgacatcacttagtccatttttgtgttctaacgaagctggttactagttctcgaagatattattttgcagaaacaggaaactcaaaactatctagtttttgagtaaatcaccttgtcgaaaaaatgaaaatatgaagttgtgaatttgactcttttaagttcatggatctcagttactatgaaaaaataaatgaacaatcgagacagaatcagaatcggattagcagaaccaaacacaccaagccatttgtcaacatgggcgccaggtgcttattttggagcttttgtgatgttgttttggcacttccaatgttcttaaactttagggcgaggtctcctaccccatttttgactatttcagagagaatgcttggagtaaaatttacatttgagagatcaaaaccagcacaccaggttgattgtcagcctgggggccgttagacccagcaccaggtcaacctgggcactgggctcagttttgatgcccttcggattgtggttttctccccaagttttcttgtatctttgttattttttatgatggaaaaaatgcccagaatactttttcgagatatggattgaaaatggcccatgttgacaatatgtcaacctaggcgctaggccgagtgtcaggtgtcaacctgggtgctggtccagtttcaggccacttggaagttctctttggtcctcgaaaatagttgaatcttaatctttgctgaaaacggagaatatgctcgaaagaatttttgaaaaaactcattgaaaattggcacaggttgacaaaatgtcaacctaggcgctaggccagcaccaggtgtcaacctaggcgctagtcccttgctctggcacccacgatgagctgattcttccccaaaagcacttactctcccatttttgatgaagacaaagaagatgaacgagtcatatattttatttgatgcttgtaagtagcacaaattgactgattgttactttgggtgctagggtgctcgggcaccaggtgtccgtgtgctcaaaaataaaagttctctgaatttgattctaatgcctcaaatatgtttgtgatatgtctagttcatgtcccaatacaaagtttgactcatttgcactagacggtcccataaactgaaaccctagttggggttgtcaacttgggcgctacgtgaaactctaggtacccaggttgattttggatatgctgcttcatgtatttttagctcgacgtctggacttggttgctgcatgttttcatggtactaatactaaaagatagtgagttggaaatgacttatcgaaatatgaacactcattccagagttcccggagttaacttggcgtagggctagggacccctccgaagtcaaccgctataactcgagactactcaactccgagatattatttttcttgccacgtgtcaaatattaatgtccacgtcaccaaagaaagtttctaagttaacactatgaataactacaatatatacattttttttttattttggtattaatataaatattttttttggtagtatgaatataaatgttatttcttgtatgaagatctacatttttttacataaaatttcatcaaaaataataaaaaaaatattttaaatttaaatgattactacaagaatcatagtttttagtgacgacactattagtgtcacacgaaagtcctcactcatgatgaggatatcagtgacgaaattgatgagtcgatactgataaagcaattttttttataaattaaaaattagttgcgacataccattttcaatgacgacattgttgttaataattgcatttttaagaaaatgaccaatggagttgggctagaattttttcgtctaaaagcatcactgacgacaaattcatcactgatggtctgacaggtcgtcagtgaacaatccattagtgacgactttgtcatcactgatgttggggtagaatcaattttaaagcccaatccatttcttcattttatcttctttgtttcatttcatttaattttttttctttgtaagaagaaaccaccatcctctctaatccattcccaaatcgatcctcttaccatatcatttcatttttttttcacattctctttgaaattctaccccctcttcgtaagaccaccatccgaagctccgactcggaccaccaactaaagtcgctcgcaaagttcccggaccaccgaatcctgtatcaccggtaagtataatttttttgctctctttctcttctcatgtaaatatttttaatttttttgtgtatattatctgtaattttatttatatacatttgatatttatatattttgtcaacctctaattcttcgaataaaatttcacaaattttcaataaggttgtctcaatttcaaccatcaagtcatactttcttcacttttataaacccaattaaaattttcaacactccaaacaccatcattcaacaatcaaaaatatagttgtactgcaattcaatacaaaccaaaatcaactgaatcagaataacaaaaactgaaaataggcaaaacaatcgagaaaatatcgaagacctatcaataaaccattgtgaagtataatatagatcaagttacatacatctatcgagatagtgttgacagataatcgataaatcatcgataacatggccaagaaaaattaaaaagcaaaagtatgcataagctcaaaaaactatcgaaaacatattgtaaactatcgataaagatcttccctgacattacttcattaaaattaagaactcgtcgatactatatcaaaaaaacatcgaaaacaatacgaaaatctagaacacaccagaactagatctcatgattttaacgaaaaaatatcaaagtcaaaccaatacaaataacaaccacacagatctaatgaaaatgaactatacttttacaattttataataaaatgctttgaaaaatacttatcccattattccacgtggtccgacctttgattgacggtggaggagctgcgacagcagttagggtgcgatagcggcggatggggttacatttgggatggtgtggtcctccaatcttgtggtgactggaaaatggtgggtctgacgattgataatgtgatgacttttgaacttaggtgaggagagagagggagagagagagatttatttttattctagaggggtataatagatattttggtaaatcttaagtatatattagtataatattattaagcgcttttttgatatggggtaaattgtaatgcatgctttataaattttctcttatattattaaattcataagtaaataatgacataagtacttaattttaagtttaaattcaataatttttttagtatttcttatatataataagactcatcttcacgtcctgcttaaaggacaataatacccttctattgcagctggttgaagtgggtttattgtatttttcatacaattatatattttttttgttcaccgcctatcttctcctcacttatccccaatcctgcttcacctacttcattgccacttttctccaaaaaattgacacgcattcgaacccaaagtctcttgttctcaaatctcacgctagctatctgtgctaccttaatgctcactttgatcatggatatcaaaaagttttgatattttttcttttactttcatttatattgatttatttatttttcaaagtcatgtttaattttatttattgtgtagagtatctttgatctgagtttagggttttataagaattaaaagttgtttgggccatgctgattcaatggtaattagtttatatttattattagacctaaaatttcaaattaattcaactctacagatttctatcagttgaatatttttctgaaaaactcttttcacttagcttgtatgaaaaaccaggtttacattgtttagtgttttcttcttactatcatttaccttattttctctatttacccaaattttgttgtatttttttttttttaatttcttatacttcgttcaatgatttgacattttgttctacttaatagttcaattgcaaacgaaatgtgatttaatttatgtctttgaattcttctataaatttatgatgatatatagcatgtaaaaatacttgtacaacacaattatataagttctataatt

SEQ ID NO: 43292 - DNA, 1888 bp, Cannabis sativa
tcttcatatgttgccataaaagcttcgtgtagtagttgagcaatagttgtagcaagataggttcattttgctcagcatagccattgcatgagagtaaggcatttcatcatattcaaacatttgacaactgcatgttttgttctccaggtttactatgtgagaatgggtgttgtcgtgtactttgtaaataaggagatttgatgtttcaacttgtagtgatcaagtaaaccaatagtaagtttacaacatagatattattgtaagcaatttaaacactatatgtaattaccttgtactttaaattcatattcctttgtgtcaatagtgtttttaaagtatctttgccagcattgttattgttttttgggctctaatcttgttttcctaataccatctttgcaccaatgaatgtagacattctagtaatattataattggtaagtctcttactgcttttaggattgcattgactgattcgacaatatttgatgtcaattttttgtattttctgctcatgccatatagccttgtccactttttaacaccaatttcattcatcaagtaatctcttattcttacatatatattgtccaagtctttcatgcctttttcaaactcttcaatattataagcttttgaggcactgttaaatgcaagcttgagttcatcacctcattttttaaatttcatttttatattcttcatcatgtagtaataacataccccatgcattagatagaaatgtttcatttactgcttttagtatactttcatgtctatatgatatgatgcattgactctttttttcctcataggtttcttttattttgttaaaaaaccattcccaagaactgtcatttgtattttgtacacttgctatcaataaagtgccatcatgtaggtttattaagaaagatccatttgtgactattattagagtacagtgttgtcaatctcttattgaagcacctattgcaaagtataaatatttgaatttgttatcttcatctatgacaaggtctgtaatggttcttgttgcagaagtaatcaattagtatattagttcagtaaacaacaaggtaaccaattagtatttttattaaattcctgatatgtttattgtttgtaggcaaagtaacttaatacctgagttggatatttgcatcatgtataaaatccatagtatctcactatatgattcttgcgggcagtgacgagcatccacaatagatttttttttttctatctctccatactttttggtaagatattgagacactgtagtcgtactgccatatatcatccacaatttcagttggtgtgtaatctctttttgggtttacaaacttatttttttattacattaccaactaggttgcttgtatcttgtggatggtcgctagaagtaaatgtctaatgaacatgtatgtgcatgttctatttttcttatgataaacatctcaatcttgccatattttgatactaagaaagtccatttgcatttatcatcaagacatactagtttatagttaaatgttgatgacattttaccttaaaaggttgattgtgtcttattgagtgtaggcagactgcttattttagagtttagagtttcgttatttgtaaacacttgcccaacatatatttcaacaacatgagaatttaaaattatttgatttagttcgaggctttcttccattgctttttgagtttgttcaatgacatattctgccatcttggttgcatattttgtccttgtaggtagcagttgactggtttgtatactagattgaccaatataggtataattgatgctaacgttgtgtttatttgcttttggtgatgttgaaatgttaactaaaatagggtatttggtttcatcatcatt

SEQ ID NO: 43293 - DNA, 2188 bp, Cannabis sativa
ttttttcgatgactaattacgtattattttattcacctatggcaggaatgaaatgccaagtgatctgaaacctaagtctaaaaagaaaccaaagaaagccaagttcaaatccctaaagaaaggatcactagcttctgcatcaaaatccgtgaaagaagagccatcagcggatgctatgtccatcgatgaggacactttctctcaagagatgctcacgttctcagatgcagcatctccacattcagtcatgaccaaaaaacggaaaaaggttcaaattactatgaatggtagtgaagagaagacttcaaagaaaaagtccaagaaactcaagaggatttttgttgagagatgctctcttgatttagatactgattttccagtagtgcagcatgacggacctacagattcaaaacctgctgagagtataactgaatctgagcagagaccgcttagcagaagcagaatgggaggaaaaatatccatcacttacatgcccttaaagcgagttttaatgataaaaccagaaaagctgaagaaggggaatgtttggacgagggattgtgttccttctcctgatgtttggttgcctgtggaggatgcaatattatgtgctgtggtacatgaatatggcccttattggaacttggttagtgacgtcctatatagcatgactgctggtgggttttataggggaagatatcgacatcctgtccattgttgcgagaggtttagagaactcatccaacggtatgtcttgtcttcttcagacaacccaaatcatgagaaggtcggcaatgcaggatctggaaaggctcttctaaaagttactgaggtagtaattttaagagctttcttgttaaccttcgtgtctaatatatgtatttaatgatgttcatttcatgttgagctattttaatctaactgtttctataatcctcttgtgtcaggaaaacgttcgaacgctgttagatattgctgctgagcagcaagacggagagttgctccttcagaaacacttcactgtattgctgtctactatctggaagatgacctctcgtgttggtcacttaaagaatcttgcatcatcacgcaatagtgtctactctggtggaaaaaaattcagttctggcaagcagatttctcatacttccgatagggaacctggagaaagactaaaatctatcattatgggaaagattaatactaggttagtagcagctgcacttgataatgttgatagtggaaaacaggatgacaaagcatctccttctaatcatagtagagacatatcagcaaatactgaacggttggatataactctggaattccaaggcgaaatgggagaaaaattggcttttctgccttctattctgaacttatcaataatttgttctgaccctctttcatttgtaagcaaagatgatgaggaggtagattatctcaaaacatctgttcatgtggctgagaaccgtttcaggtaagggtctacataatcacaaactatgtttattgctgtgaatctgttagcgacttctgaagttgaaatccatcttttctgatatgcaactatattccttagctggtcaattttttatgagagtttgaactaaaaaataattaccgttttggagccacgggctctaattgcacttctttgctaaaatctgtattcatgggagaaaattgtcttgaaatgttaattgtgcgcatttagtagtataacatttaagaaattacatgcttttcataatacatatattagcaaaaagtttcatgatcaattcctattgacagtagttcatatgccttgttaaacaaattcttaaaaaagcagtattgctacttataggactcatgactcctcttttcagggctgctacaagagcttgtcttgaagacagacatggctgggcttcgtctgtattcccgacaaatgacattagatctcgttcggcagcaaaactaccgtcgttgggaaagcacaagctccctttccctgatttgaacaaaccttctaagtcaaaattcaagaaatcagctgagaatggtgagctacgccaccttcccagtgagcagaacattctccaaccgttgctaaccatggcagcaccaattgatctcaaccttttcagcccgagctcacccctcagtacagatattcagattgatggtctggaaagtaatttgt

SEQ ID NO: 43294 - DNA, 1555 bp, Cannabis sativa
ttattatttgccttcgccggtcacagtggcgaattgtgacagaatcatgtttcccctttatggctcgtggctatctacggcctcttcttaccaagacgtgttttctagtgctaattcgattcctcgtctgggctcctcagtggctttgctggctgcgtccaagactgttcctcctccggtgagtttaaacgtagttggtggtaagtcgatgctccctgtttccaagtcaggtcgaggatcgagacgagcgaagatggtgacagctcgtgtgtctggaggtctgggctctcatagcgtgtcgtttggaaaccaagactattgcttgtaaactgtgagttggccattacccctgtgggtaatggagttgatgttggttctacggagcatgaaaagcccctgctatttttcctatgtcagaagctatccatgttgatcgttccttggaaaatcaattttttaagaagagaattgtgaggtaggccttgacttgcatagaatagatggtgttattgggccagtcaatgcttctactgggccagccattatttcaaatgaagagagtagacccgtgtgtttgggtcaagtggagaaggctgttaatggtgttgtattgtatctagagcaggttactataggcccaaaggatggtgggcctttagttgattgtggcaagtttgatgtggggtcggttatgacttgtggtgcgaagggtccgtctttactttttgttggtgaacagaggcccatattccctgcctagaagagaaggccttgtctaattttttaaaagcctaagaaaattttttaaaagatctaaagcaatttgggaggatggatttgttcaagatcaaggccttgggaggtgacattggtgttaaaactacttatgagacaaatgctcgaaccactcctttcaagaaaagaaaaatgtatgaagactcttcttctctttgctctagaactcataaaattttccggaagcacccgagtgctgttcacaatttaccgtgggacacaaaggagcaagaagagaatcaagcttccaaggttgcctttgaagaaccctctgaagatctcccagaatccctaagtcactctgatggtgtcttgaagaaccctctaactggcatttttgtcaatgaagaatttggctctagtttgtctctccactctcatacccctctggaggagaatatcatatctcctccacgggagccattacaggcattgcttataactgtagagggttagggcaaacctctacaattcgcgaattgaagtccctggttacatcgcgctccctggattttgttttcttgtctgagcttaaagtggatgctacttctctggtacgtaccctaatctcccttcacttttattttaacatttttgtgtcgggtattggtacagatggaggtatcattctagcctggaagaatggttttacttttgagagtatatcatgttctcgtaatcatatatttggcattgtctattcgtatcccccgacccacccttagctcctctcttatgtgttgttaggctatttttagcc

SEQ ID NO: 43295 - DNA, 3310 bp, Cannabis sativa
aaaaaatattgaatttgagttagaaagagataaataaaagtaatgttaaatataaatatatttttaatatagtgtaaaaatagatatttttttaattaaatagtaaaattaagtacaaaaagttaattttttttattatcggttattggattaacctttaaattattaaaaattaatatttaattatacttagtttttaaaagttctcaagataatacacattaaaaaataatataaatatattcatcataaactaaactaagttctcaatttgagattataaacaatatagcaaatggaagaagaaaatatggatgtgggtggaaattgtgactctgttaattattttaattatcataaaatcttatgtatatatttttattttattattaatgttaatattttattttaatatctcatatatttgaatctctataaaataataataataatacgagaatttccaatttttaaatttatagttagtgaaaattattttttgctctagccaggtctgcaggctcttctctaggtgtaggtgcagcttgggattgtgttttgctattgtaatttgatttttgttgcttctattagtcttgtctatgtgacatagttttgagtattttagtcttgtctgattgatatggttttcagtgttttggatgtgtgacatgattttgttttaatttgtttcgttattggttattttttattcgtcgataactcactatcacatcactgttattggttaggaataacaagttctggattgaaagggttgttagtagtataatgacttatcttacacaatagttgagtgctcaagctatgagactgactgaacttgttgtaatagtttctaatgtcatgtcttctgagcggtagatgaaacttaatataagtattcttaaaattaactgtgatgctgcaatatttttcatctgatttattttttcaaatgatctagaaattaggcgactcattattaggcgatcatttttctaattgtaatcttgatcgtatccctaataaaaaaaatatctcaatttgtttgcatattaatattttagctgattgttatttataaaattacattatttattataaaaaaaaatattaatacatttgtttcatttaattttattgttaaaattatttattgggaggaattttatttcttttagaaatcattgaataagattttataagaatgaaaataataatatgaaagggtgataactttttttttttttcaatatatgttcttatgaaatttaagatatcaattatttcttttaaaatttataaaaactattatttttggtaaaaaaatttactgttttacatgtaaataattttttatatatgtatttttacggtatttataaaaataacacaaaaacaataagaaaaccatataaaaataataggaaaacaacataaaaaaataatatacaaataacaataacaagagtacaatataaaaatacatcaaaagaccgtattttatataaataaaatcttaaaaactataaaaatattataaattccatacaattgtatttttataattttttttattatttttgtatattttaaaatatcatttttttgaaaaatttatatgggtcaagtttaattaaaaatatataagtccatatgtgtgtatatatatatatatagcctaatgtactatagtacttctcatcgtaaagactaacgagtaccaaatttatgatcctgcaatgttaaaatttgaaaagtacactatgattaattaaacatgattaagagccatatttagtaattacaagaatgaaatgataatataaaaaataagatcaacatttatatatataaataaatttagtatgattttttggtaaaggggtggtgttaatatatacgtactcacacaataagagacaacctaattaaggtgagagagtttacacataattaattttgccatttaacacaacacaacacaacacgtgttcaattatctcttaattaatttcccaataaaaaaaataatacataattttgtgtacgtaatatatatatatataattatatatatatatatgtgaataccaatatatgtatataaatacccatgcctttaaagttagtaatactctcctttacactatattatataactgaattatatcacctttttttcttctatatatccataatacattctttttatttttaaattagatgaaaaataataaaatcgaaaagttacaactttatgacatcaacaaaaatatgatagtattattatatacaaaatatgtatgaaccaaaaattatttatgaagaaataaaaagaacattgaatttgtctagcatttgaattgtattacataataaattttttggggtgcttttacaatatattctagaaaaaaatacactgatgcattttttattattttaatatttatataattttgtttaggattgtttacgttaaaaaatttagaataatttacaataagaagtaatactcaaaaattatattttataggcgtatgaaataaaagagtcatacataaaacaaattgtttgaattttattgtcagcgtgttaaaattttcaaatttcttaaaattttatatgatatcttaaataaatatagcgtacacaataataaaaaattaaattaaataaaaataggtgcacgttaaattttctaggcaaagtaagccaaaaaatcgttagaaaaggataatgaggtggcaaacagtgacagaatcggagttttattttatgagagcttatttaacataaaaaaaatatatacttatattataatcacttttactagatttatttaattttgtggagacttttctactattttgatctataattatcgaattaaaaaatttatatttaattttttaaaagataatatttttattggtgagcgctataaccccacattagtactagtggatctgtctcaaatggtaaattaattttttttagtttaattattttttatgattgtatatattataattatttaagacatgcaataaaattttaaaaaaaatatatgaaataatttataaatagtaatatttaaattatattttataagcgtataaaataaaagagtcatacttataataaattatttaaatcttatttttaatgtgttaattttttaaaatttaataaaatattttaaataattataacacgtaaataataaaaaaaaaattaaactaaaaaaatgataagaatgacaaaatataaagaaagaggttcataagttttggtaagcaaa

SEQ ID NO: 43296 - DNA, 2730 bp, Cannabis sativa
  modified_base (26)..(27): a, c, t, g, unknown or other
tcctttccattccattccatttcatnncctccaaccaaacgccaccttaagctctttggggaagatctatatctttattaatggagatctatgagcatccactatatatgtatatcatgtaacaaaatgctcaagaagatgaagacttgtcaataacataaattcatatttgcattagatatttgcatatatttatatttgtcaataattgtctttatagaaagatcttgattagtatatcaaaacaattaaagacctggagctagcaacactatttcaatttacgagaaaagacaatgcaagcttgtgttgcaactacttgggtggagctcactcccaaaagactatcctatgagaggagggtagccaagtgactatagaccaccaactaaagccatggttagttgatgtgggatccaaataaattgttttcaacaggcagctaaatggtcagcatcttttgaatgcacatacatgagactaccctacgagaagatagccaaaggttgtttacctgcatatcatgtttctttagtccagcaccaagacgaagggctcttataagggcctctgatctttttgaaaagaactcatcataaggcaaaccatcaggcggcgagagctgtgcatgtgtaaggacaaccaatgccctattccaaattgcttttccaagactatctgttatggctttgacaacctctctgtccaagttatcaaccctatatgaatctaatcgatccacatagagtagaacatctattgtcttgttcaaaagaaagctattcaaataacaattggaatatcacaagtcaagaagcatatttgataattgtaaattcagatgagatacgataacaaaaaagaaaaaacctcttaatgttattaagtgccatatcattgatatatcccccttctatgagcccaggcgtatcaataacattcaatgtaaatcccgcccttgagcgggacaccatcaccggtcttgtaccttcagactatcaaaaagaaaagcatacataagctatgtaaaatggaggcataaaccagtcaaaacaatttacatcatatcacaagcaaccaaaaaaatgtaaaggaaaacgacaagtacctgaaaaggactaatagaaactgccctttctccaatgagtgagttcacagtggaagattttccaactccaccttttcccatcacaagtatagtcaaagtattcacattctacaagtacacccatgaacaaatgttaataaaatatcaagcttttaagcccacaattgagtaaacaaacaaacaaaattattcatgataaaacgaaacatggattttagaattaagaatgaaaaactaataatggaacctcaatcttgagctttcctaacaattcaaacaacttggtttgagtagctggtgcaaatgtgtttatccctgaccattctcggataacttgggaagccatggcacctaaaattgaaaataaacatataaattagcactaaatacacaaatatacaatgctaccaacgaaagcatttgtggacacagattttggaccaagccatgaatttaaaattgcaaaaatcacatgcaaatagactattgaatttgactttggtcatagaaaactatggatcaaaagtcaatcaaatatttagtaatcttaaatcgacttaagaaactcctcttgcatagtactcacagaacacaactctaattagaaaatacaaatgcataactagtatctgcaatgtactctataaatataaatacatcgtttcgaaaggctaaaatgtgagaagaggcgttttcccgtagtacctaccgcgaggcgttagcttcgaggtgcattgaggggtaagcctcgacaataagaataacataaaattcatataacaacacataattccatatcaaagtcataaaattcatgaattactaattataagtcttaaaatcataaccaatatcattaaaggttcaaaataaaaatcattgacagagatggaaggactgctttgaggagatggactggttgtgtgattaaagagaacagagaagatgagacctagctgtgttgctgcgtgcgtgactgaggaggacgaaagcttgctgtattgttgcgtgtgtgaagagaagagaagagaaggggagaggaggagactatcgtgaaagagataagggtaagagatgagtgtattttggttaatttttacaaaaaaaatactatcacacgtaaattttttaaaaaatactgtattttttacaaaacagtagaatttaaataactaaaaataacagtggaacaactaaaaaaaataacagtgaaaactttacatagtacacaatatttttgaaaaaaaaatacagtattttttaaaaaaattccatcccacactataaaagtaacaaaattgaaaatttcaatatatatggtgtaattatctttatttttagggaatcaatccatctatatatctattaatagaattctttccttcttgcagtgcacccctccttgaattattttgtcatgcaatacttattgaatacgaagaactaaattaattgaatattattaattttggaattatgatattaaaaaaaactaaaaactaaaataaaattaataatacgcgacttggcacgtaacatttatctagtctatatatatctataggagagatatgaagtgatgacgtggcaacgaggctgtctaaaattattttaaatgttct

SEQ ID NO: 43297 - DNA, 1710 bp, Cannabis sativa
  modified_base (44)..(49): a, c, t, g, unknown or other
tagttttacataaaaatattatataaaatacaattcaatataannnnnnacaatacgacctaatacggcattccaaacgagcccttaatgtgtattatagacttataatcattttaaatcttttcttgtttggttgaattataaaaatatataatataaccccaaaatttattgtaaaatttggagaggattaaacttagtatatatttttaaaattatataaaatattttcttatcggtaaattatataaatattttagattattttttatttcattttgtttacatgattgagatttatgaattaaaataattagacagggattaaataaatataaaaatttagaatttttttattcagaaaaatatcaattaattttatattgaatgagtcgtgttaaatattttgtaatgcataatttacaaaagaaaaaaaatatattttaatctttgttttggtataattaggcggggcctacaacttatcaaattcgtcgttattaaaaattccataaataaaataaattaggtactttgaagttttactagtaataattaatttatagtattacgtagaatctaataaggttcattagtgtcttataactaggttatgccaatttaacattacttatatttataagagtaattgatatttatgctatgcttaaaatatttatatgaataatataccgtataataatatttaattaattacttaatttattaattaataattgtattagtgtcctaaagattgcgttagggttttgggtccacagagtttgcttgccagcttgtcaatataatatattgagccatttatttaggtttggttgttttcttgaacaccacaatctataagtttgcttttgcattattcttacttgaatatatttttagtagttttttattgctcggaaaataaaaaaataaaataatatgtgtgctataaaatattagttcttagctgttggcaaatattaataaaaaaaaattatcaaagaatattatatttagtaattcactaatgtggagagtccaacaagaaagaagtagatcaagcctgcaattaggattaaccatgtatatatatattataaaataaaaataaatatatattttaattatagccctattcattgcataggggctacgcataagtttattataaactttaaaatagtacaatttgattattttaatcctgtcatacttggcataaattattcaataaactaatatttgaaagaaaataaaaattattcttgttaaggtgggtcaaagaaattaacaaatttacatttatgaatactattaaaaaatcactatttcttatatatactaaaaaacaaaataagatcacaatccaatccacaacttgacattactaaaattaacaacataaataaagttaaattcagaaaagaaaaacataaatcaagttagtataccgattctaatatacaattagatttaactattaaattgtctttccatttttttaagggtaatggtaacatccttctatttttttttcctattaaaattatcgggattaatttattgcttttttttttttgttaaagtccattaacattaatttagaaagtcatggatggcaaaagatatataagagcaaagtgctttattattattctaagtagtcagcaaatatattaaataatatccctaacataatatatatat

SEQ ID NO: 43298 - DNA, 6336 bp, Cannabis sativa
  modified_base (5421)..(5428): a, c, t, g, unknown or other
tattctataaaaaaatgttatattgtatactatatcacttaattaatttaaaaaattcaaaatataaaaatattacaaaaattggataataccgcgcaaagcgcggcttaatttactagtaataataataaagcaaatttcatattttaaccctaaaaatcctcaccatttgccgccctgaccatctccgtcgacacgcagcccttccctactgtggactggcgccatcacccacctaacgaaggtatcaatcgatgtgctttggttagggtttcaatctttatgcaaaatctcaacctttgaagcttttcctatgaaattttacgttcttcagtgactctctgattttgttgcttcagtctttggaagttaggtaactaacaacttttctcttttgattccacagataaatcacgacaaagtttgtaaatctccttctactaatttgaggtacactactcaagcaattcccgttctttcaattcaatttttgttcatctttaatgctcattctatacgtgtattttacatcttttctcaaggaaattgcttaattatttaagttccataggaggtttgtgctagcaaatataagttaaagatatggatgatccaatttctgtctgtaggtgcttaaatcaaatcaaccacgaacattttaagtgatacataattgaaagtggagttttcaagagttggagatttgtgtggttgaacttgaactgttctatttttctttcctttttaggcattcatttgattttgaaactattgagttgccaggagtaataattcaaatttttgctgtctaatagtttggtttttcataagtagtttattaatttaaactgtctgtttatacattgaaaaatccaaggattttgaagtttgctcaatttggatgaaattttatatgttatacgtatgtccatttgggcctagatgtaatcaaatgtttttaaatttgaaaaccttatttttgatcagtttataatggcggctcctggtgtggagtggcacgtgcgacctccaaacccaaagaatccgatcgttttctttgacattacaatcggcaccatccctgccgggcgcatcaaaatggagctgttcgctgacattgcacccaaaacttccgaaaacttcaggcagttctgtactggggagtacagaaaagctgggctccctgttggctataaaggctctcagtttcacagggtcattaaagatttcatgattcaagctggtgattttctcaaggttacctgtctctttctctctctctctctatagtaattgctatgtggcacgtaggtaccggggactcaaacatcagacctacccctcttgagtcatcctctctcttctttaagttcctcaacaactctattcagattttgatttggaagattcttttggctttgcagggtgatggcagtggttgtgtttctgtctatggtcataagtttgacgatgaaaatttcactgctaaacacactggtcctggcctcttatcaatggtatgcttccacttctatcacactaatgttatgttgtttctgatcactcatataattttttttttctttaaagttccaactcgaagacattctcaattctagtttccagctaatttattttataaagtttatcttattattgtgagttgttcattcaaattatccaatcagatattgttgtttgatgcttgcttaggataactttgcatcacatgaaaataagatagctacaaatgcaaatgactgagtgagttgcttgtctttttacagtgaaataaataagaaaaaagaatagggtatgaatagtttgctcatttagaaacagaaattcctctttttgattaaataccgcattttttattgatgggggaaagaataacatatggtgatgataaggtatgatctcctacaatggaagatgataagagatcatcttgatgaatatcacaggttccaatttcttagtaaaaagaaacacattaaaatccctagtcttatagatacaaacagctacccataatttgattaatccctcaaattctacaccctaaagatcctattgtttttttctagccaaagagcccaaggagagtagccagctgaaaactttgacctctgaagggattacggtcttccaaatgtagggaaattatgagaagtgcctcttgaaatgattaggataaagatagtccaaagttcttactggaatagtattatttcataccaggtggattatatgaatatatgataaaaaacacattggaaaattatataatctcagccctcttctatctagcattccaaacacatccttaaggaaaccaactttacataagataagtcacagaatttctagtgaatttttttttcccttgagtggtatactggtatagttgtgaagtttcagctaacatcgtgtagttccttggtatactgatatagctgtaaagtttcaaccaacacagtatggttccttcaagtttctcattgtaatattccttggggttggagccctctttaggtttgacagaattcaaatttaaagtccctctctctttatgatggctcttcccactgaaattttatctgtgtgtaattcacataggcatccttggggttttgggtatatcttgttctccaacccttgagaagcgatgcaattctggtggagtttttactaaaatttgcagtgtgcctccaaaagagcttccaaatcgtgtttggaatttttctcgccatttctcctctttgcttatgtatttttctcgtcaacatgctaatggtgatactgaatatgcactgctaatattatttagttatcaattagtttctttggtgaaatcctttctttctcaagttttatgagaaaaaagatttgattttgtagactgatggcaagtttttcattttcctcctctttcaggcaaacagtgggccaaataccaatggatgtcaggtaatctcttaaacttttaacattcgaacagacatacataaggatacccacaaagccactactctcaaatgcatttactaatcatatattaagtgattggcactttgtgtgtgttttcaaatggcctagtattcatattcaacttttcagttctttagtactaattatttatttcttcttacgactaacatcactaaaatttccttgtttatataaagtaaatggcatacattatgatctgcattcttccccttgtccttttcattataaaataaattccatagtggaatgaagagtatcaaaattttcaaggagtttttgtttttcgaatttgttaaatattcaaattgtatcaactaccgagtattgactaaactttttctcattccattgttgagcacagttcttcattacttgtgctaagtgcgattggctggataacaagcatgttgttttcggggtatgtacagtacattctaagatatgttgttttctgtgacaaattgttttctttccctggtaaattttctatatagatagtcatgatattagatctgaagttgatcgtggaaccgatcgaaatttaaaaaattgtatatttaatttattatgtataaggtcatgctttatagttttcatgcattcaattgtgtttttttttgtttctttttcttttgggtgcagagagtacttggagatggtcttttggtagttaggaagattgagaatgtggctactggacccaacaacaggcctaaattggcatgtatcattgcggagtgtggggagatgtaagagacttttcactgcaactctttttattattgaccacttaatgtgtagagattttcttattataaaaataaaaagaataatattatattttagtttttatgaaaagcataaacgaaaacatacccaaattggtaagctagcaagagcggcgggtcatatgaaagatccatctttggaaatttaagagaggtgaaaagggtaagaaaatagaaaagtcttgatgatgatgagatattatttgaaaatactatctgctattaacaaatgttataattaggttaaaatgtgacatattatatattaatgtgaagttaatgtatataatgtgtttggtgattaaattatataatatatagtttgataatttagtaacattagaaaaatggatttgtaacttatgaatcacatttgcttaattgtggaaatatgcgagttattacacaaagatgtcatgagattaaaaactatgataatgtcgttgttggaaaatgtttttaactcatttatatcagtaaaatgagtgttgaaacgtttgtggaaaagttggctgggagagggagttacaaaattgaaatttgagttggctggaaatgcatctggcgatgttgcctggcattgggcgacatgtcacctggaagttgacgttatggggttttcgatgttttaaacgtatttgaagaggcttaatggttttgctcccaatttctaaaaaaacattgcaaaatgtgtctcttaaatggggacgttttcagcatcaatgccaacattctaaaccctatttactcccctaaattcaattggtaactatcatgaggtgtgaggttcaaatgtagttcacctacaccataaatgagtacctatgactcactctttgacacatttgttttctatctattgaacactagttagaagactctctaggcttgattattctcaaaaacttttacatctttcaccgagtgcttggtagtaggggggaaataattttttggacaaaggtgttgaaaccttgttcaagttttagtgatccccctcttgctacacttatgcgttcttttttctctcttatacaatagtatactatattatattctccaattgctttttatatttacatgtatttcatgctttgagttataattataatcgtattcttcttttgtctttgtgtgtttttagaattgtaacacttatttatatctttttatagtccttgtattgttagtattgagttgtaattttcttgatttattttattcatcttaatatattgcttctattgatttgtatttttccttaaagagcctccatcttgttgagtcctatcaagtcaatgccaaagtcataaaaagactgctcattgagccaaccccaaagccataaataagattgcctttcgagcctctatcgagagtcatcgagattatcaaaaaaagaaacaatctttttatctgactgtataaggaattgtcagtgcagtgtgctagactgggagggtgaagcaatgtcatgtatggggttcgagatgcctgtttgaggtggagttttgttgatatctaggaaatagaaagtgggggaaaggtaaggatgaagaaggtggcggttcgtctggggtggcatatgtgtgtgcgtgtgtgtgtgagagagagagannnnnnnngagagagagagagagagattaataagagaagtatttaggagtactaaaatacaaaataatatatttaggtatagtgtaaaagatgatatatttttatgaataaatattgttttggatcccgtgtttagtaaaaattattaattggaccatctgttttgttaaatgataaattaaattttgtattttgaaaattgtacgaaatagtaccttgaattgatttttttttgaataattagcatatttgccccctcaacttatgacactactgtattatgccccctaaaatatatggtctgttaataatacccctttatattttacacttgtagaaatatagtccttctgttagcattccatccattttgctgttaattgctaattaaaacgacaggtgtcacctatttatttgtctaaaaaactaatattctaaaaattatttaatatatataaaataaaaacacataattaataaatacataaaatattaataattaaattaattttaaaatagaatgtttacacaaaaatgttaaaactgttttttaattaaaaaaaattaatcattctgcttcttcatcttcttcttttttttttattttttctttttcttacttactttctcaataaccaaaaacgttatattaccacctaaaaatatgccagccgcttgaactttcgtcaaatctctcgtccagtccctcacccattcctcatcgttcgccacccctacttacctaagcaaatagaggacgaaagtgagaaagaaagagatttgagagatgagagacacgtaggcgcatagggcttcaaatcagaataatgagacagagggagagaggagtatatgagaatgagaagcatcaaacttttgggttttgtgagtgcattagatctgatttagggtactt

SEQ ID NO: 43299 - DNA, 4623 bp, Cannabis sativa
  modified_base (3102)..(3104): a, c, t, g, unknown or other
tttttttttttttttatctttgtagctatttttttgttgcttatttttgttgttttttagtcatttgttttacgtatttttgtatatttgaaactttaaaagagtatttataaaaatataaatttgtaaaaatgtaaattaaatataaagacagtaaaaatgtagaaataatccaaaatcccaaaaagaaaaaagtgaataatgttgggccgatgggccagaaaataaaataaatgatgggcgttagcccagcccaggtgaagcgatattgacctagatgaggagagtagtagggttttaaccatcgatactcgttagagatcttctctcccaaaaccagaatcggaggactgctgccgcctctttttctctgatttctccaacaatggttactttcagggtgagactctctaatacattttcctttttcctaccttttcatttctttcatatttggtcgagttttggtattttattattattatttctgcgttaattggttttagagaagctgattttgatgatttggattgttttttcttggtcagtttcaccaataccaggtggtcggtagagctctgcccactgaatcggatgaccaccccaagatctatagaatgaagctttgggccaccaatgaggtccgtgccaagtccaagttctggtatttactcaactcttcctggttttgtttttgactatgcattcaattatggttgtttgagtaggaaagggcttttatactcatatatattcaagttttatttgttaccaagaattttgctaaccaatgaactcaagtaattttgttttgttgataattttttggattctgaaatgttatttgttaagatgtttatttatgaaagttttaagtttatttatcaactctttcttcttttttaaggtacttcttgaggaaactgaagaaggtcaagaaaagcaatggtcaaattttggccattaatgaggtatctatctaatttatctaaacattactttggttaccatgtaaatgaggtattgagattttcattagctttgatttaggcacgctcactaaaactttgtttacatagaggtattgacagcactgggagtccactttttaagtcaagtttgctttatgggttagtttgatatctaacattgttgaagtatgtgaattctctgcccgaaattgatgtttcttctcactactgagtttattctatgtaacaacaagattaactcatacatgttactacgatatggttgtgatctttcttttatttcaattgacttgctttcgatggaaatgtgttgtactcactgtttaggcgcacacagattcatgttactggaatgtaatagtcatgtcggtgaagttagaaattctttcttaaggttttgtatctggcgatgatttggaattttaggtcagataggccaaaaactactcaagtaagttattgttggaaaccaaatgattgttagcaggatgtacgtagagagtaactgtttgtagtctgtagactctgtgcttagatacataatgaatctttatactttgcctgttttgatggaaagattttccaagttgtttccattgtagacatcaactagatatgtgaaatgatatatatttataagaagtaagaacattatgttaatcaagcatatgtaatgatttatagcataaataatgaagggatgatgatggttttccttttgtagtttcattctagatcgaatgatattttgcttacatattattatgaaacacacctcgaaataagtgttgatgtcaagtttttgggtgcagatctatgagaagaatccaaccaccatcaagaacttcggaatttggttgcgttatcagagtcgtactggatatcacaacatgtacaaggagtacagagacacaactctcaacggtgcagtagaacaaatgtacaccgagatggcatcacgtcaccgcgtcaggtttccatgcatccagatcatcaagactgcaaccatccccgcaaagctttgcaagagggaaatcaccaagcagttccataactcgaaaatcaagttcccgttggtgtttaagaaggtcaggcccccaaccaggaagctgaagacaacatacaaggcttcaagacccaacctgtttatgtaattttgtttactgcattttgtttcaatcaattatccagtaaaaactagatgaagctagacatggtgaataggttggtgattcacatctttagagaatttttttcttgggttgttgaacttcattatgtggcctagttattatatttgtatttgagtttgggagattttgattactatgattttgacgagctttggtggtaatactagttttaaagttgcattattgctagtgttggtttaatcacgattacaccctctaaccactaactctgtcattggggttcaggttcttgggttttattagaaaaggagtaggacaatctctaatgcatgggtgaaaaatgtgataaatttggcagaacaaattagtaaatgctatatttggccaacatgttgcaattgtgctttaatgcacaatagcaaattgtgtctatgggtagaaaatgtgttaaatttgtcagaagaattagtaaatgctacatttggcatatattttgtaattgtgctccaatacatttggagcataaaaagtaatgatcaatatatttaaaatatatttttttaggtagctaatttttttaacaaataattatgtaaatgaaaaaatgtattaaagtaagtcataaatactaaatgacaatagtatgagtagtgacatgacaaatcattctaattaactttatgaaaatctccagcactatacagtataaaattttattacattatatgtttaaagatatttatttacaacaaattatatattttttttttgagaaaaaatattcatagttaaattaataaaagcaattagacctcgcggttattattagaagcaaatgagagaattttttatgttttattttttatttatttatttatttttttttatttctgatgatctattttagtgtatacaaatgatatatataatacaatgtgaacacctagtaatactannntaaatggaaaatacattaaatgtaaatctacaactattttaaagctagcttgatttcctacactccccctcaaactagatctatactaaacattcctaattttgaacttagttccctaaaattaagacgatagctttggttaagatatcaactgcttgttgtcttgagggaatatgtttcaaggtgatgatcttgttttcaatattttcactgatgaagtgatgatcaatttcaacatgtctggtcctatcatgatgaactggattttttgctcttgctatggttgattgattgtcacacagagaacatctattgggccttcatgtttgattatgagttcatcgagaagacgtttcagccatattccttcacaaattccatgtgctaaggcacaaaattatgcttttgcaatgctgtgagctagcacttgttgtttctggcttctccaagatatgagatttccccaaatgtaggagcagtacctagaagtggatcttcggtcattgagagaaccaacccaatctgcatctgtgtatattttaagatatttgttgagagtttttctgaacattaacccttcttggtgttcccttgaggtacctaagaatccagtagactagacgacatcccatccatatccatgtgttcctcaaagggattattgagaaattggctaacaacactcacaacgaagcttatgtcaggctaagtgtgagttaggtataataactttcccacaagacgttgataccttcctttggatcaacttttgttccgtctatctgtacttcaagtttggtatgagggtccatcggagtttcacttggcttgcatccggtcatcccattttcctataagagatcaatgatatattttcgctgcctagatctttaatctcaaattcactggagagaagctgcttgagatgagaaatttcttccatgaaattacctataaccacaatatcatcgatataaacaatcaatgatgctaatttttcaccagctaagtgttttataaacaaagtatgatctggttggcattgagtgtaaccatctcctttcaacacttttgtaaacctgtcaaaccaggctcgaggagattgcttgaggctgtagagagatttttttagtttggatactttttccttttgagaatcggtcctcaaattctggaggaatgcccatgtatacttctttcacaaggtcgccgttaagaaatgcattctttacgttaagcgtgaataaaggccattcattgttgactgcaatagataagagaactcgaatgatgttcaacttagcaacaggagcaaatgtctcttggtaatcaatgccatatgattgggtgaatcctttagccactaatcgagcttcgaatctttcaatgctcccatcaggcttatacttgaccaagaagatccatttacaaccaactgtgcatttgccattaggcagatctgtgatgatccatgctttattcttttcaagtgcttttgtaacacccttactagcatagg

SEQ ID NO: 43300 - DNA, 2010 bp, Cannabis sativa
aaaatttcctaacactttagctcgaagatcataagccagaggtttgacgtcggagatcttgatttaagaagggtttaggcatctcaagagttggaagtggggcgacccaattggtaagaaccatatgagatctagcacaagatgtgtgactgaacatagcagttaaaaacccatgatgaatctaagattccacgagcttggaatgcggaccacctacgccagtactattagtaaatgggggtagctggatcttgtttcaccttacacgttttatttctcttttccttttcaaaaactgtaagcctctagtaactccccagggcaaagacaatgttgtaacaattatagagaaaaatgaagaaaaacatgaattatttttaaatctttatgtgtgtttctaacaagtgaccaggaacacaggatctcacttggagggtattatgtacagccatgtacctctaaaaatttgcttggtatgatttaagataaactgaagtccaaggtccatgcctttggaaacagaacctcaggaaactgagagcaagttatttcttaccacagataattaaaccactagttgcatcaagttgaaaaattaaaggaagtccaagcttctaaaataacaaaaaataaaaacattgaaaaaaaaaccaactaaagtccaaaatgttcagaccattagaactgaaaccccatggaatcaagagtaagttgctttcataagctttccatctttaaaaagttgaagtccaaaaggtccaggccattagaaccggaaccttagggaaccaggagtaagtcgctttcataagtttcccatctttaaaaatggacaggttaaaattaaaattgttgaaatcccaaggcccaagtctttggaaccaggaccgcaggaaacttggaaataaaaaaatttataaaaacttaaatcaaaatacaaagcacagaaatgaaaccctaaggttcaggccattagaaatggagcccagggtatccaaaagtaaattctcttagcaaaaaattcacaagtcgcagcacttgatgaatcagttgctaagattttatagtaattaaaaagcaatttagtcctcatacaaaagaaattgctaaaataattacaaacataagagtctcgcggtaaaagcataatcaagtgtcttcgcaatataaaataggggaacccttgttaccaaaatgtaaaaaatatacataaaaaagaggatgcggttaaaaataaaggaaaaataaaaaaaggataactacaatagttagaaaactaaggctgggcctccacatcaatttaggaagatggcacctgagatggaatctcattagttcaaaagcattgtgctcggctcttcatccaggagatcaagaggtaactctttagctgggtggttaattccgtgttggcggtgattcttccacttcctcctctttaaaaattgaatctcctatcttatctttggcgagtgtttcccttctctcccagaccaaaaatatttggcaaaagagtgcttccccctcgccaagcccctcacctttaaggagacatctctgtccctttgcccgagcgcgtaaagggaagtaatgaaggcatcacataagtccctcactctctttttctccgccttcacaatttgctcctaggcctgcctctaggcctccactagtttagcattagccttcgccagtttggacatagtctccgctgcctttgtactggccccttctagctgtgtttttagatcattcttagtagctattgagacattctcgacgtcagtcattagttttaaatctttctccaagacatagatctaaccctatttttccccaagctctttggtgagctcagtcactttgcctatggcctccttcagcttatcctctacatttttgagcttttcttggagctccttctcccctctctccaatttttcagatatggcctatggcatggctaatgtttgtctacaagtcatcaaccttcttttccagtttgcggta

SEQ ID NO: 43301 - DNA, 2469 bp, Cannabis sativa
ttacaaaccccacaaggtatgtagtccaatgagctttacaatggtaacatgtggtgttcatggacaagactatttgacaatacaaaaaatgtatagagagaaaagagtagttagttagttagttacctctgcagatgttcttatgtttttgttttccattgcagggttttggcaatgttggttcctgggcagccgagttgatccacgagagtggtggcaagattgtggcggtaagtgatatcagtggagctataaagaacagcaaaggacttgatgttccaaacctgctcaaacatgtgaaagaaaacaaaggtgttaagggattcagtggtggtgattcaatagaaccgagctcgatattggttgaagactgtgacattctcatccctgctgctcttgggggtgttataaacaggttcttttcataaagttttcagctttattcttcctactggttttagtaataataatgtatatgaataaagtttctacctttggtttattgaatgaagggaaaatgcaaatgagatcaaagccaaattcattattgaagctgctaaccatcctactgaccctgacgccgacgaagttagtttctttcttaaaagacagttacaaatcagagaaaggaaattctaatctaaattcacttttttgtagatcttgtctaagaaaggagtggtgattcttcctgatatatatgcaaactcaggaggtgttactgttagttactttgaatgggtgcaggtaataaattttcaaatttggaactaactttctaccgaaacagatgatcataaaatcatgacaagttttcggtttttgtttcctgtgcatttatgtagaacatccaaggttttatgtgggatgaagaaaaagtgaacaaggagctgaaaacttacatgacaagaggatttaaagatgtgaaggaaatgtgtgaaacccacaattgtgatcttcgaatgggagccttcacccttgcagttaaccgcgtcgcacgagcaaccgtcctcaggggatgggaggcctgagctgatacctactttcaataaaagatgagaactttttacaagttcttctcattctcttctaatgatttattaggcttttactcatttggttggacaaacttgaaccaaaagttcacatttttttttcctcttctattggtgttggcattaattacattagagaaagagaaacaaaaacaatttaaatcaattctaaaggcatacgagggaatgttggtggtcttatgttgatttgagattgtattgccttatagttccaccatattatgattaagcatcatatatgtgatgaaataaataagattgttatctcatttataaatgttctatcccagtttgcctccttttaatagttgttgataaaagatagcagaagcttaaatataaccaagttggtgcaacatcatataggtatattactcaaaattttaatttaacttgaattgagatgttcaaaacaaaattaaaaaccattttgttgaaatccgaagaagaagctattgaagttcaggttgcagttaggataaaattacaatgctgaagaagaaaaagaaaaataacataaaaacactctattgcagtgaagccctatgcatatccttaactgacaacacaaaagaggaagaagagcactagagaaattacaaaatgttctaaaatctccctcttccacccctaaagccaccaccaccacgacctctggacggaccgcttcttcctcgtggagcacctcttccacgaaagcttccacgtccacgatcaccaaagccacctctgcctctgccacgtcctcctccgccacggccagaaaatccttggcccctgcaaatgaacaaaataataacaaccatgagaaaagaattgtcaccattgaacaatgctttaggttgcataaacatacaaattacaaaacacatatggaagttttaaggcatagaaaagtttactttggctgtggaagaaatcttgcaagtggcaaaagctttgctgggtcaatgtagaacttgtcaccagatgaatatgaagttgcaacaacaccttccatcattttaacagagaaatactgccacaaacaaacatatagtcttgatgaaaccaaaacttgtattaacaaaataaccatacataagctacatttcaaattgttattctgccacttttacaatttagtttggcaaatattcacatacataagctactttcactcaacaaataagtcagaaaactcacagactcattgatggggccaaagatttcatcaactttccctatctgggtcttgttctgaagataaattggagcattaaagtaaggtatcttttcctgtgtaagctttgttactgcatcaccctcacaagcatgaaggaaagtagcaacctctgtaaaaacaaacaataaagatcttaacttcaacacaaattaaacaaaacccagtttt

SEQ ID NO: 43302 - DNA, 1942 bp, Cannabis sativa
tgtccaagtgtctataaaaataaaaaataaccactttgttaggtatgatctagacacccacttgtaaaatagtttaaagaatcaagaaaataacttgttaacaaattgaactctttaaaaaatacaaaaaaccactacttgttcaccaattatttagaaaaataggaagaatgaggtgttaagcctcttgcagaagatgtcaaaatctgaaataaacaaggcaatataaaacaaataatttgtgttaactaagatatggtaaacatatattgacttttgacttgtcaaacaaaaacaaaaaaaaaactgagccatgagactgagtttgagcttagccatgaagagtcatagactagtcaaaaaaaaaaaaaccaaataaccccaaatagcattgaggtggagaagagttagctacatgctcaatttctcaaatccccttatggtgaagttgcggtttatctgttaaccatgaaaattgcggtttctttgaaacactattttgtgttgattaagagcgatcgagaacttgtttcaattggggtattgataactatatacttcaaattaacaaactatagcattgagaaccataataataagaattataaaatttgagtgatatacaatacagaagaggagtattacacttacaaatctccaacttgtatggtaatgaatcaagaatatccaaaattagaagaagccaaggttctctctttttcctttctttttctcacattttcgccgccaaacaaaaggggaaccaaggaaaatccgaactcctaaactacaccgacggcttataactgataaagcccgggtctttcaaggaactgtacatttttaatgaaaatgaaaatgaaagaaacctcaaatgatcatacccaattaccatcgttccaatcgcgttttggaaggaaggcaccgtgctcgctcctacttcctgttagtctatagaaagctggtttgcttcgaattgttctcaagggtcctgacctgttcccatgtctaattgggagagatgtttcgtcaccaatcaaactcgaggttgaaaatggtctgttatccatttcttcaagttggcccgagctgtactccattgttatgaaggaagaagcttgcccgaaagttaatcgggggcttattgctcctgcattccaccagctactatcggaaactgcaagatcgcctttgaagtctgagtctggaacagaagactccttttgactgcagcagtctccgcaagtctcatcagtgtcgttgtatatcaactttaaagcctgcacaacttcgcccataaatggtctgtgagtcacctcagggtgaacgcacatggaggcgatagctgccactttagctatgtcatcgaagtcacagcatccaactaaagtaggatccactaattgctccaaaccttccctgttagccaatagaggccgagcccaagtcactaaattctcctgtccctgaggttgggacatatcaacaggtttccgtcctgagagaagttccagcagcacaactccgtaactataaacatcgctcttgacaagtaggtgacctgtcattgcatattctggtgcaacatacctgaattttttcgaaagaatgcaaaacatgataagtaagaacatcgattctcttaactaaaaagtggtaataaccgatatgtgtataattgttattacccgaaagttcccataactcgagtagaaatatgctgacttccttctgtggcttcccttgccaacccgaaatctgaaactttgggggtgaagtcatcttccaacaaaacattactagctttgaaatctcggtgaatgacacgagggtttgagtcttcatggagataagctaatcctcttgctgcaccaagggcaatcttcatccttgcatcccagtcaagaggcccctttgtcttgtcaatacctataaaaacaat

SEQ ID NO: 43303 - DNA, 2589 bp, Cannabis sativa
ggttcgagtcccaggtaaaacatgatgtaatatataaacgcttgaatcaaaaaaaaaaaactagctcagtgtcatggcagccttctccccttcaaaactaaagtagtacagctactacattttcttctatgcacaaaagacaagtgaaaaagtaacatatactaataccaccagaaaatttcatagactgactttttgaaatattacaggctcgatcgctcgctaggcgctagctagtacaataaggcttcatacgattggaacagagagaaatatatatatatatatactaatacacaaaacatgcaaatttgattattatatctgaaacgagagacagcatattatcccaaagacagtgcatgcatcaatctagtactgatcaggccacaaaaatgctccttttgcatattcccttttctcataaagagtgcccttaaaattaagaccatattccatgagaagggtgtccaatctccactcgtccattttctcatagtctgccttggaataacgagggtaatgaagaggcatttggaaaccagagtaattagacgacagcccctccttagtaatagaattcacttgtaagctcttcacctgatcatgatgatccccattaacattggtttggtgattagggtaccccactgcagaggccatctgattagacggagtacagctgtttgtgtccttagtagtgtaccccaaaacgtggcacgccgagtgaacaacccacctcaaggctgccatctctctcttctatctctctatggacagaaagagacaataagattttggagctaaagaaagaaccaaatattttatggtgtttttcttgaagcaaactctcaaagactaaactcgtatttatagctaaaatgtaggtgtacagactaatgaaactgaatgacgaaattaattttcttctttataaaataataacgccaatcgaaaatacatagcgtatattagaattgaataataattaaattaacaaagaaacacagatgtgtatttttgtatggcttgttgtagtgccagcatagcatacaccgtatatgtaaattggctattctttctttattgtggtgattaatttgtcactttgttttctttaattaatatatttcctaaataattgaaagagttgcgtgtatgagaataggaggaggaggagccattactcatgtcgtcatagtcaataatgttcagtgactttcggatcaagatttaagagaattaacttatatggcttttgcgtctacatatattaatgcacagcttaattgtagagtggagccgaagaaaaaacctaaagggtgtaggacagaatacaagaggggcgttattaattataattagtaataagaaaacgaaatgtaactgatttaattgtcaaaagctgtacgtattgccttaacaaagaggtaacagtattgaaaaaaagcttggctgtgaactgagagcaagttcaagccacaatttttatacacaattagctgtagagcttgtccattgattttttattctaatgataaaaattgttccaaatattctattacgtactctcttctgtttattaattcttttgaatttttttgctagtacaactctaataaaataatgctaatctccccagtacaaataaaaaatacatataataaatatataaaataataaattattaataaacttgatttttagctaatttatacttacatagtttctcatactgcaattgttaaggaatattttcaattacttttatcgtttttgagaatacttttttttgaaaaaagaaaaaagaaaaatcacaccacaaaactctatatatccaataattcaatcaaaattaactaaactaatcaaattcgatctagtattgcaaataaaggtcgggttttttgacatagcacaaaattagcacgagcatgattaggcacaaaaaaatataagtttagacacgatgctataaaatggcacgacacgacacaaaaatatatctttaaacacgacatagcacgggaagcacaaaaagtacaacccataaaaaagattaatagatcagtctgaaagacatgacacactacaaacccaaaagtacagaagtaagacatatgaaaaatcttatatataatttattattattattattaattatagtaataataataagttatgaattatcaattataaataagttaaataattataaaattttataattttataattaaaaatattaaaaaaataaaaaattaagattatatattaatttatttatacgatttatataaaaatttaagtatttctaaataaatatttaaattctaatgatactaataattttttatatataatattatttaaaagttatataaatataattaaatttataaaatatacatatattttagtaattataaatatatatatatatatatgaaaaaataaaatatgaatttaagccctaatatgaaaagggaacgacctgtttaaagtaaaatttattgggcccttataggcgacggttttaaaatcgtcgcctataagggcccaataaaaaaattgttatctacttctcgc

SEQ ID NO: 43304 - DNA, 3156 bp, Cannabis sativa
agaattgagccatatataagaacatgggctactccactcattaccaattggttttgagatgattatttagttaacttgtgttatgtctctgattattcaaagatccatctaaaacgaacataaagtaaattaatcttgtttcaatctttgtgctgtaaaaattatttcagttatctagtttgagaaactaattcaatgtttccgatagggtggtcgagaagaagcttatgcttctaatgttagcaaagaggttcctgataattctcggccaaggagaagtaagcggtccaaacgaaagcgtgctgtataaaagattagtgatgtttgtattttacggtgagtcttgtatatctcagaaaaacgatatttctaatatgtagatgccagttttgtgttggctcattcattttgagatataatgctaattgcacaaagtaataatattcactagactttaaaattcatatttaaagcatcatttctcatcacagctattgtctgtattctgttaaagcgaatatcatgtggatttcagaatccttaaaaccttattgaagatgaatatatcttgtgaatattttattaaaaggaactttaaaataatgaacaattatagagaaccttattgcagcaaggaataggaaatagaaatcaagcagttttctttattgcaattctcattctcagaggatttggaaagcagaatttggagtaagttttctttcttgatggagggcttagcataacctagagcttgtcactggggatacattctcgtgtccgaagtttggtgagcaggtgttttgaattgtctcagtcatttctgtgacctttttgaattacatgtctatttgattagttttcctatccattatccattaagacgaatatatatataatacatgcaagagagttaaacatatgaagccttatttttctcttagaagaaaggagcattattcagcagttggttctgctgcattgcacataattttagaaactcttgatagaatctgaatattgtcttttgtgtcctatcattgcttaagatggtgacttctgtaattggaggcagaaatgtatattttaactttagtgttgacaatttagttgctaaatgtaatttttagagaacaaatcatcagttgcattccatttgtacaagcataataccagaataatatgttttccagcctaaataaatacatctgatgtaaaactcttaaaggaaaatactgatccttagtcctacaccatcttgtctctcacctgcatttatcagttcattgtctggatggtggacgatgattccctactgggttaggtcctgatcgtctcatatgagtcttctctccattaacctgtttattaattgtaatgagttcaggtacatgcataactcattgagaaaaatggatggtaactacaatgtcacttttggaagagataaactcaccctagcaggtagtacaaatctggtgtcagaccttgagttgggctgtgcaggtttgaatctgaagtgaactgttgccagcaattgagtcaggtaatgcaagttagaaactgtttacaatatttttgcctcacatttaatgcgatgaaagaaagcttatatattatacaaaatcctgcacaacccactacaagaacagaacgttgtatagcttgcctgattcaatatcttgaacagtaatggtagagtgatagtattggatagctacgaacaggatgaatgccaaggaaagttggatgagagtgcggactcctcccatgctgggcatgagcctgtgcatgccttggtcaatgggataggtttaatattacaagcatttatttataagacacgtttttggtaagtaatcatagccgaagtggaaatttttgtaggagtgtttatcttcagtgagtgcttgggtatcctatgccattagatattgtattggtaagataggaatattggctggtctgtcattgtgagttgacttcttcccagttatcattgcatccatgatagtttaattaagtacctctcctattatttctttgtaattgttcaggccatgctgtgggcaactcgattattgggccccaccgatgcatgtttagttaccatgtctaccgagagtttgttcttttgtcattattctaggtaaaccatgagacttccatgctttttaaagtagttggatttcctctattcgttttgttggtttatttatacttcatcttcatgtgagctgaaattggaaaacaagtagattggttcatattgaagtgaaactaacaattgtgttctatgttgcataattttctccaataacaaatagctttgtataaaccaatgtaaggatgtgcatcagcatcatttgtttgtctcgaattaactttgtatttcgttcagcaaaaacagaaaaagaaaaaaaaaaaaaacttggtgatttctatagctgtctttttttgcaggagtggcttgtactcaattatttatttgtttattttactagaaatgttgagtagagcagaagtgcctgaggggaaatcatttccattatagtgcttatgcttgatttgcttgttgactttgctgctgatacatgatttctttttttgttggaagcttatacgacttgaaatattgtagactcaatccagatgagttgccatgagatattttcatcttcttaattcagaaaataaattgaaccttacctacaagttcatcaaattacacccaataaaggggtaactccatttgcatggtggattataagatctatagtttcattgtatcagggagacaattgagcataaaaattggtatcaagtagcacactaattttcatcctatttatttttccttctaatgcgctactctttctcttttgtaattacatagttattgtacactgccattttttttcggaaatcgattaagaaattttaaattaatgaattttagtacacaaatcagtagaatttggtaattgatgccttgacctttttgtttaaaatcactataccactacactagacactgtttgccatccttttccgtgagtacgtagtaatatatatattgtaagggttttggataccttgaagccttttgtggctacttttaatgagaaaatgattctttgtttctgtattgtcatt

SEQ ID NO: 43305 - DNA, 2126 bp, Cannabis sativa
  modified_base (1497)..(1505): a, c, t, g, unknown or other
tctctctctctctctctcagagaaaatgctttaagaatgaaactgcttttataattcaatttcaacccagtgttttattctctttttattgtccttgttgcttttatggcatttttcccttttattcacctttagaagaaattactcagtgtttcaaaacacacttttataccatcaaaaaatgttactgataacatgagtaatgcatgaagtttacttatcttgtggtgctattcttttgtttgacaggacgctaaggatccagaaactcttgccaatctaattgtatgctgtcttcaccttggcaaatcagcctctcgtttcctcacgtaagacttctgctgattccctcaacttattatttttcttttgcaaattaaattgtcaatgtaatctaaaaccactgcaggtttcttgtaagaagtttctgccacattattggatttaatatattagcaaattcttctatatttatgtatacacgctcatagctcatttactcctttgtcattcattgtcgtactacaatggtagacacacacattgatcataatcatctagaaaattttaattttaatttaatttagaaggtgacgttttcatcaagattcttaagaaaatccacttaaatcacataaaatttgactggctgttgatttcagtgtgtttctattgcttttccttgcacactttatattatctactgtggcccctcaaagaataacaatgcataaacacttatccaaagtaaatgttcagagagtttaattttttgtgtgaatgcgaatatgtgtttttgcagccaattgaaacttgcacatccagaccacatccttatcaaaagatcggcaactgccgaagagagctttgacagagcagttcagacagttgcttgaagaccgaggtagaatggtttcattctcatggaagagaggacctttgtcattacgttgtcttaaatcctttgtgggcatttttcattttggttttgtaagcttagaatataaatttgacatgtttatggcacattcaaaattttacccaatcccaagtattcttttttctctcgttgttggataatgtacttcatataatatatcccagttaaattcataaacttaagttgttgtggttgctatttcgactccttgtccaaagtaatgaacagtacgttaacaattttactttgatagatattacataactttattgattttacttttaatttgcgggttaaaaaaaaggttttttacaaaaattaaggattttgggtaaaagtttatatgctaaattttttacaaaaatattcagtttttgtaaaataattgtaacacaacaaaacaaaataattaaaacaacagtaaaacaactgaaaaataatcgtggacaacaaaacaaaataattaaaacaacagtaaaacaactgaaaaataatcgtggaataacaataaaaatttaacactgtacataatataaaaggggaattatctcatatannnnnnnnnttaattttttttaaatttacggtttgggtttctaaagtggttgcagctctagttgtagtaggagtttctatacgattttttgttgcaatttagattgcagcgctagtggcaataggtttctatgtaaaatttcgtaaaaatgtaaaaaaaaaaaaaaaaacggttttgaagtgtaaaaaaaaaaaaaaaaaaaaaaatacacagtattttcttaaaaaaactctgctccaaaataaaaaaagaaaaaaaattaaaaatttcaatatgaagtattgaaagaaaaaaaaaaaaaaaaaaaaaagcctattcaagaagaaaacaaatttttttcttaacaatttccttgggcaatattgttgttacagttgtttttttgtaatttaattgttgaaatttttcttataaaaaaaaaaattgttgaaaatttatttcttttactagcattaccaaatctgatcgaatcattgaatccctatcgttgaaaatgaattgaaaaggtacagatatttatattatcatattatttatagggtaaatactattttggactatgtgttttgcaaaaattattaattggaccctctattttgttaaataacaaaatgaactatgtattttcta

SEQ ID NO: 43306 - DNA, 3478 bp, Cannabis sativa
ttcaatgaatgagatccctttcgtttttgtgtcttccttagttgtgatttaattactagaattttgctccaaatgcattattatagttcttcgtatctcctataatttgattgattgataatgttgatcagttactcaaacatgtttccactcggattttctgaattttccaggtacaagattccgaccactgtcattgaatgtcccaaagccactctttcctttggcagggcaaccaatggtccatcatcccatttctgcttgcaaaagggtataatattcttgaataatacaaacaaatgaaatgattttggatttggatttggatttgtgcaatttctaaacatcaaaacaatagtcacataactcattgttgcttgttacagattccaaacctggcacaaatatttctcattggtttctatgaggagcgtgaattcgcattatatgtatctgcaatctctaatgagcttaaagtccctgttaggtaatatactttttgaatgcctttaaaccctctaaagagaactcaaaatattgttaattttctgatcattcttctcttctgttatgctgtcatagatatctgagggaagacaagccacttggttcagctggtggactctataacttcagagatctaatcatggaagacagcccggtttatattcttttcttttcacctttcttatttcaacttttgtcattttttggttctggaaatgaaacacattaacttgttggtggtaccaatttgttttcaagttcaaaccttgatttggttgcttgttcctttcatggcagtcacacattttcttgctcaactgtgatgtttgctgcagttttccattgccagaaatgcttggtaactatgcttaaggaaatttgcaatacatgtttataagatcacaaaatcttagtttctaacttttgcttcatttatatcttaagaggctcataaaagttatggtggaatgggaacaatcctagtcattaaggtatgtaaacacatgtacaagtgtcacggcagagatcttcccttccttagttactccttatgacattaattcttttctcctacaggtttctgtggagtccgccagtcaattcggggagctggtagcagatccaaccaccaatgaactattgcattacacagagaagcctgagacttttgtaatctcaacgctggaaattcacttgctctttcaaatttactagctttcttagatcaagagatcagcatattaaatttcagtttcttttcataacatagctaatctacttctcacataatgaatttcaggttagtgacctgataaattgtggtgtctatgtattcacaccagaaatttttactgctatagagggggtttccacacaaaggaaggacagaggtaattgatatcaacctttggttaatttatacaacttaagtttcaaaattcaagctcaaacttttttggcaaaaaaaaaatgcagctaatcttagacgtctatccagctttgaagccctccagtcagcaacaaggtatactagacatataatagtagaataactccattcatatgatacccaagtttgcttctttagtatattacttcaatttctaagtgtttcagaatattaaaagttgggttttcaaatgcacttttgtatctatattgacttgtcatcatctaatcaatcagttaggaacttaggagcacactcatatatgaggtttcaatttcaactgctagattcttgttaatgtactgaatcttaccccacttggatgcatcataggaaggcagttgatgtctttgtttttccccttaagaaacaaaacctcctatattcaaacagtgatttgataagtagttttgacaaatcttttccactccatcctatggaaattgtatccaaatttaagtaaatgaattcatcatacaaattattatttgtaaaaacatctgctcttttttgcaggagtctgccctcaaattttgtgagattggatcaagatattctctcacctttagcagggaagaaacaactatttacatatgaaaccaaggacttctgggaacaaatcaaaactccagggtaagactagcctcaaccctgctttattaataaatcctttgtggccttttattctggacaagcataccaaagtttcaagttgatactttcagaatgtcattgagatgctcttctctgtaccttgcactattccggctcacctccccggatattttggctagtggcgacggcataaagagtgcgaaaattgttggtgatgtttatgttcatccatcagccaaaatacacccaactgcaaaggtatgatcttttatttcttttccaatcccttttgcttacttaatcgaaacgtggtgaaatgtatgaaacatttctataataaacgtgtgacaaaaaccattattgatttcttattgacaaagtgtaaatttctaaatattctattacttttaacacacgtctgtgataccacacaacagataggacccaatgtctcaatatctgcaaatgctcgcataggtgctggtgcaaggctcatcagttgtatcatccttgatgatgtagaaattaaggtacggaccaaaatcaagattaactcaaaatgtagtgaaaaggtttattgagattgttgctgcattgtattgttgtatttcaggaaaatgcagttgttattcatgctattgttgggtggaaatcttctattgggacatggtcccgagtccaggccagtggagattacaatgctaaacttggaattacaattcttggtatgcttttttattgtttatttttccttataataattgacatttcccaatctgaacggtgttattgttcatccaggtgaatcagtttctgttgaagatgaggtggtggtaattaacagcattgttctcccaaataagactctcaatgtcagtgttcaagaggaaataattctatgatgcaaccgttcttatgtccaaaagagccaaaataattcaatgattcaatctctcgtatgtatttcaaaaaaaaattaaaaaaatctctcttatgtatcataagttcagcactggttttctagtcatttttgttttctaataaaagaaaactgtccttaatttattatttctgtaaagtgaagtccacaataaatcattttttttttttgttatatgatacatgaacatataaacacatacagaggattttcactgccaaggttcagtatgcagccattgaagccatggtgtagtattaccaagatctcttatattattattaacaaggtttgttaacattgttcaaaataacaaagacaatcaaacaaacaaggtttattatcaagaattcaagtaataacataaaataaggaaatttaaaccaccaaaacaagaaaaatacccaaccagaaagagtaacataaatagaagtgttcataaaatagtcgatccaattcaatccgca

SEQ ID NO: 43307 - DNA, 8020 bp, Cannabis sativa
ataatatagtttaactcaaaagggtaatttaatcaaacattccgattacgtttcataataaagtaaataagataaatcacagttattttatttctaaaaaaaaattagtaaacaacatattacaaatattaatttcaattattttttatttattctattacatttctctattacaatattatgattttgaatactataccattattatagtatatagtagcaatgctcgaaaagaaaattcacaatgaaataaagaaaaaaacaagaagaaatagagaacttgggccatacctaaagcccaatagaatttaaaagaagtaatatttatttatttattgtgctttttagtagatctttctagaagaaaagagatggtagacgcctctaagaaacttttgagttttgaccactctccacttcttcttacattgaatatataaatttattaaattaaattaaaattgaaaataataataaaaaataataaactagaaaattccacacaaatccctgggtgttgttctatatcttagggccctaaataaaaagacaccttcgtcacaccaaacctcttcgtttcattctttgccattttctctatatacacacatccagaaacctccaaaacctctctctctctgctccttactttaccacctgcgttggatcgctctcaaggtacgcttccaaaccctagtttacatttcagattcagatgactcagatctctatttgcatattgctgttagatctgaatccttttgccattgggttgaaatgttcagccgggactgttgataattcgttttcccttggtttttagattcatttgtgttcttttgaactggttggtggttcttttgaaaatagcgtgatttaattgttgattgcaggatcgtttttttttttttttttttttaagttagctcaggttgtttgcgaaaatgggtatttgattttagggttgtttatttgttttcatttctcttgtgttatcatgcgtgttatgctgatgtgatttgactgtgtttgactgcgttttgtgttgtgtttattggaaatgttatgcaattcaagttggaaaaccctaaacatttaaatataattgtaacactaacaagtatttggttttgttttgagcttagttgatggattttggaattaaatttatgaattttcagattgtattggataaagtttagcgaggatgagcgtggttggttttgatttcggcaatgaaagctgcattgtggccgttgctaggcagaggggtattgatgtagtcctcaatgacgagtccaagcgtgaaactcctgctattgtatgctttggagacaagcagaggtttattgggacagcaggagctgcttcaactatgatgaacccaaagaactcaatagctcagattaagaggctaattggccgtcaattttctgatcccgagttgcaaaaggatctcaagtctttgccttttaccgttactgaagggcctgatggctttcccttgatacatgctcgttatttgggagaagtaaggacgtttacaccaacccaagttatgggaatggtattgtcaaatctaaaaagtatagctgaaaagaatctgaatgcagctgttgttgattgctgtattggtattcccgtatactttactgaccttcagagaagagctatgttggatgcagccacaattgcaggcttgcacccactacgtttggttcatgaaactacagcaactgccctggcttatggaatttataagacggatttgccggaaaatgatcaagtgaatgttgcctttgttgatattggacatgcgagcatgcaagtgtgcattgctggctttaagaagggccagctgaaaattttggctcattcctttgatcggtcgttgggaggtagggactttgatgaagcactgttccatcattttgctgagcaatttaaggaacagtacaagatcgatgtttatcagaatgccagggcttgcctaaggctgagggctggttgtgagaagttgaagaaaatgcttagtgctaatcctgaggcacctttgaatattgagtgcttaatggatgagaaggatgtgaggggttacatcaagcgtgatgaatttgaacaaatcagtattccaattttggagcgtgtgaaaaaaccactggaaaaggctcttgccgatgctggtcttacggtggataacattaatacagttgaggtggttggttcaggctctcgtgttcctgctatagtcaaaattttgactgagttcttcaagaaggagcctcggcgaacaatgaatgcaagtgagtgtgttgctaggggctgtgccttggaatgtgctattcttagtccaacctttaaagtgcgcgagtttcaggtatatttcttccccagactttgtaacaaatgatgtggtgtgctatttagtttttgctttgcccgaatcattcgagaattactcttttttcttcattcaattgtcttgtgttgttaattatgtccccctttaatctgaaggtgaatgagagctttcccttctcaattgcgctgtcctggaagggctctgctccagatgcccagaatggaggggctgaaaatcaacaaagtacaattgtgtttcccaaaggaaaccaactgccaagtatcaaggctctgaccttttaccgatcaggtactttctcagttgatgtgcagtatgctgataccagtgacctgcaagcgcctgctaagatcagtacttacactgtaagtcgtcaaactcttaacattaaaatttattttgtgaattatctgcttttttgtttggctgactatatataacattggttatgtttgtgcacgtagattggtcctttccaatgtgcaaggggtgagcgctcaaaactgaaggtcaaggctcgcttgaacctgcatggaattgtctctgtagagtcagcaacagtaagtctaaaattgatcttctggctttaatcgtactcaataatttttttggactttgtatatttactttgacttgtattagcttttggaggaggaagaggttgaagttcctgtctcaaaggaagcacctaaagaagctaacaagatggagactgacgaaccttccagtgatgctgtcccacctagctccactgaagctgatgttaacatgcaggatgccaagggaactactgatgcatctggtgctgaaaatggtgttcctgaatcaggagacaagcctgtccagatggaaacagataccaaggtacattgttattcaatcttcatgaatgtcccatttcactgttttcctttattttaaattatgctatacatcacaagtaacttatgtcgaatcctcgttagcaacattaactatgaatactgtgagaaaggttaggttggtgacggaaaagagaatggttgtctctacttgcttactttttttgagtgtttattaaatatacggggaattctttttacctcgttgttatctgtgtttaccataccttctgtttgtgcttgggtttctttataactattgcttgtttgtgcaggttgatgctccaaagaggaaggtgaagaaaacaactattcctgttgtggagcatgtttatggaggaatggcccaagctgaccttgaaaaagcagtagagaaggaatttgaaatggctttacaagatcgtgtaatggaagagacaaaagacaagaaaaatgccgtcgaggcttatgtttatgatatgagaaacaaggtatggaagggcacatgtgcttcatcttattgtttgtgcattctattggtcttatttgagctaacaaatatcttttgctcctccagcttaatgacaagtatgaggcatttgtcacccctccagagaaggaagagcttattaacaagcttcaggttgtagaggactggttatacgaagacggtgaagatgaaactaaaggtgtttacattgcaaagcttgaggagctcaagaaggtacattgcaaaacgattctctcttttaatattattttaagttactttttagacttaactgcaagtctgaatgctgatggtgacttgtaaattctacagcaaggtgaccccattgaagaacgatacaaggagcacacagagaggggaactgtgattgatcaacttgcgtactgtattaatagttacagagaagcagctgtttcaaccgatcccaaatttgatcatattgatatatccgagaaagagaaggtaatccttagcatttgccagcaaacctggcaaccctcaacttgacacttttgcccgttgtcttgaatccgagtattaatctgttgaactctaattctacttgttgtgctataggtcttgaaagagtgtgtcgaagccgaggcctggttaagagagaaaaagcagcagcaggattcgcttccaaaatatgcgtctccagtcctattgtcagctgatgttaggaagaaggctgaagcacttgacaggtaacttgctatccccattctcggaagtcttgtattgcaatattttccaatcatttaatttaattagttattaatattccttgttctgtgctgagcagattctgtaggccaataatgatgaagcctaaacccgcacctgccaagccagctaccccagaggcaccacaaaccccacctccccagggcagtgagcaacctcagggtggtgatgcgaatgctagttccaataatgccgaggcagcagccgagtccggggaagcacctgcggccccagctgagccaatggagaccgaagctcccccaacttctgcatagttctgtagattagtgtctccgccattttcttgatttttatgctgcaaagaaaatcgttttccatgtataaggaacactttctcctatctgcctgagacactttgttatggtgaggctaacaacggtaaagggtatcaaatggatggtttggtggcatgtcagacttcatcatcatatatgtaaagccaactttatttggtgatcttccaggttttacaactactattaagtgggtctctggaatccggatttttttaggagggtttttaaagagagatttgttactttttttttctttttcttttcctgctcctttgttgtttgggatgaaggggttcggacctttatttttttctttccccaagtgtctttgtgtttgtcgctcatgagtcttataattatattttggttttttttttttacttctagaactatttatttcgttttgcaaatgaaatgtaatactgcattgcaatgagttcttatatgccttcagttcactaacaaaaatatggtttaaacaagattctcaatcactaattggttggggcacttaacaaataacttccattgatgtgatttgcattcaatctaatctaggagataaaaaatagaatccaattgatttattcattcattctaaaatcaaaagtggctaccaatctcgcttaaaggaaataacatagtaaagtaagtgaatcatagagtagttattgtacaccataactagacacaacattaaacaatataaatatttattgcctagaaagtaaaatggggtggccaaaaaggctctcaaatattaaataacatgctacctgaaactacacaaaagatacatcacccactagcattctcggctgagacatcaatttcctcgtcatcatcactttgttgtatcttttcaatctcagcctgtgctctctcaatgatttgccttctctgcagctccaaatctctttggaaatccattctcatcttctctagctcaaccatctgctgtcttttactgtcttctatcttctcatatatctccccaaatttatggatagtattagcaagcaacctaaatgaagatccttcatcatggtcgttgtcccttccagattttctctttttcggtggaagcccatctgagtcatcgcttccttctagttctgagttcccaggactatccctcatttcatctaaaccattagcgcagttcaaataaactctgggattcatgaaaacatactctcctgaatccatcccacaagaaagtccaggctgttgattagcagtcgataataaaagatccatctttctgaaataaccccatttgctagttacacccatggtcgagttagccttctcttttttgtatttcttcttcaaggtatccagacgattgcgacattgtgtatctgtcctatcaatctttgatacctcagatactttctcagcaacctcttgccattcctcagaccgaagactcttttttccacgttgaagaaagcgttcaccccaagcatctaacagaactaatgtttccctctcagtccaatctgtaagtgaactccgaccaccgaaagatactctcggggcagaggttgttgcaactgatcgtggtgctgatggcacatgaggagcaaactcaaaactcgaaaccaagctcatcaactttcgctttttggggtgtctctgcaagtcttcatcatcattctgtctatcataatcttttcgtttatcatgatcttcatcttcagcctcatcattctcatcgtccatctcatcctcctcctcctcctcatcatcatcttcatcatcaccaacatttttgtccatgggtggatacccattattttgaccattgtcattgtcattgtcattgtaatcctcttcctctcctaattcatcatcttcctcatcctcttcatcatcctcatcgacataatgatcgccaaccgatttagaatatggaccactctgaacagagagcttttggcgacgggaagaaccatagtcctgatggtggtttaccccataaggatttggtgggtaccttgcatcatcttcggtgtcatccatgtaaagctcaaaaattgagtagaccaccaaaaagctcaatttgaccaccaaatccttacagaaattataaccctaaaaaacacactctactctcgtcatccaaaccccaattcattcattcatcatctaaatcgatcaacaacaccaacacccagtaacttttgtcgcccttatttccagaaaattattcaattctgactcagatcaacaaggtcaccaaatgttttatctcataacctaaaatcagaaggaaaaacaaaacaaaaccaaaccctcaatttcaaattctcaaagaacaattttttccttaatcaattttattaaaaagaaaaaggaaaaaaattcatcaaaaaaaactaaaattttactgaattagcattcttttgtcgggaaaaaatcattagtttatggattaaatgataattgattcataaaattcctaatttgaagttcaaacagaataaaacaataatatgattcttacctcgtagaaagagctgattagcaaatgttgaaatagaaaaacttgccaaaatatcctcgatttaatcgcattccaagctcgtggatcataaaaacgtaaagccctaaatttattggcaactgaagaaattatattccttactctttgtttgacctgagaactgagaaaagggaaaaaggagcgaggaaaaacgattcgggataaaagacgacgactgctaaaatgcgccggtgtgaaataatgggctaagcccaaattaataattaggcccataattcagaaaagctacattatactactttttttaaaaaaaaaaaaaaaattactataaatttataaaaattatttatatctatgtaaacattgtttgcttacaagtttataaatattgtttataaaaaatatatattttttgatatttttttttttatttttgtaggattccaaactttttgtatattcatttatttttgtgtatttttttttttttttgaatttccctcttttttctgggtgtcagtttagtttctatttttttttttttttgagaaagtttagtttctattttagaaaaatattttttattgtcttttctagaatatctttacatacactttaactagaaaagaattataatatcagtcatttgagggtagttcaagtgggaaggagctgtggtgaggtgaggtattt

SEQ ID NO: 43308 - DNA, 2632 bp, Cannabis sativa
aaaaaaaaaaaaaaaaagatcccaacaacgaaaacgtataaacgtaaaattaaaacaaaagtgacgtttagacgtaaccaagtcaaaatgaattaatcaaatgaaaaagaaagagttacacggcaattatttattggaggaacatggatattctactatgtaatctttttcaatagaaaattgttaaaaaacactagtgcctaacattctcatcgttgtaatcctgttattagtgtaataaaatattgagttccatataacttaagaaaataatttttaagaaataattaatcgtaaagtattatctatagaaagtgttagacactactgatacccaataacaatactcttttcaataatattcactttaagtaatgtgccacctaagcattaaaaaagacaaatttaacttcattcgtactaaaatttaacattataaaagaacataatagaagaagttgatcaagatattttaatttttttcaagatggccttacacataataattagcatgtcattaagacaattgaagttgaaaaccaaagctcagacacaccaagttgtctcgctctcgctgttcaaataagatctttatcatcatgaaaactataccaaatgttttagcaacacatggatttacaaaaatttgagcacaccttggaaaggcatagggtgttcatagattttcttcttgcagtgttcctacagccattttgtaggatgtcatgcaaatatggctcacctaaacaccagttaccgtcttagagcaccataatttcttgttacctatgaaatgagtacaagaaaaaggtgagaatggaatatgatcatgaagaataagagaataaatcaaataagcatgatggattgagagatgatgtagaagtactctaaaaaataaaaagggttaatggtatagtcatgtattataatagagggcatgaaaagggagagaggaaatgaaaaacaatccaacccgaggttgagatttgttaaatctcttcgcaacgttatcctcatcatcatcgtcatcatccttgctcataagcattcgatgcaatgcagagttttctgatttctttccccgcttagaggattgtgaagaacctctacctcttcctcttggagcagcccttttgcgtccttttccttggacaccttcattttccttcagaagaaaaaccacacacaaatcaagcatgcaatgaagagaacaaggtattactagattacatgattatcttcttccttttttgtaattgcttcagtgagcaataatcatataaataagtgtcgatgaccaatcagaatggtatgacatagaacaactcttccagtgttcccaaaaaatcagcaatttggcatttctcaaaggttctcattcgaaacagtaaaaggaagcctattacattcaaaacagattaagatggtagttcataccgaactgtcatcaatctcatcaacatcgaatttcccagcatcctcacttgaagaagaatctacattagtctcgtcaacagcaatattttgaactgcagcggttgcagcagctgaggcagatctgtagcagcagcagcaatattagagcaacatatataatgtgtacaagccttgtatttgttactattagtgacctcatcattttcatggtataacttcttcaaaagtaacagcagtgttaacagttaaattaccttttagaacttttaaaatataagaaactgttagcccttagttccagctagaatttgaaacccaaatcctattttttcattaaaaaaaaaacactagactccctgcctaatcccaagttgttaaagagcaaagtaatccataacaatttctacacttggggtcacatacttacccaatctagcaagctagcctcaaattgccaacatagcagtacaattaatgcttaaaataattatgctctttcaattttctctgtgttaaagactccaagctagacaaacaaataaaatggacaatattaaaatataaaagctgtagcactaaatctcgaatgatctagtaatctctagttcatatggtaataagatcaaaagtaacctcagagattggcgaaatccaagagttgaatcaagagttgtctgcttcatgttacttgatgccctaccccttcccctacccctaccccgtcctcttgtggaggttttccctttatcaagctcagaagcaacaccagataggctagaagaccccctccggcctcttgctgtactctttataccagataactgtgttgcatcttcatcatcactaaaggaaacagtgcttccagctcctgctccacttttacttctcaaatcctacaaaagtattaacaaaatataaatttagaggcaaaaagttgaatgcaaaagtccaacagacataatgtggcacaagacagagcaccagctgcaataaaagtacctcagaggattgtaaatctgaggtgaacagtgcactatccttaggccgtgtagacctctccttcacacgctcctgcaagagatgcaagtctataaatataagtgaaataaaactttcactgtgatcacaatattcaacaaccataaatgccttcgatatttctagtcgacactacaaagatgagtaatcaatg

SEQ ID NO: 43309 - DNA, 1518 bp, Cannabis sativa
atccgtgacgccgttacttacaccgagcatgctcgccggaagactgttaccgccatggacgtcgtctatgctttgaagagacaaggccgtactctttacggattcggaggctaaaggaatctgtctgtttgatattttggggatagttagggtttgtttaggtttcgaattggaaatgttgtattgaatataatcgattaggataatttgattttggaatgaaattgttatctgtaccgaatgcttcattcaaatctttcttactttgtttattgacaactttaatcaaagaattcatttttgtgttatctctaattgtccattaattattttaatatgttgtttgtttaattaaaacaaaggattttggattaaaaaccaatttatggcaatttatgaagattattctacattctttctttttctgaaaaaaaaaactggacttggaagattaattataaggggaatcttcctaagaaagagctttatttttcttaacagaatatttcatctcagcaatatctactgtgttaagagctttacttaactacacattcattgttttgagaccttttttctgagtttttagaaatgcttggttacaccttggttctttgcttgttcatgttggatttgaaagtcaagttatatctaactaaacgtttagagctatttgggcaagttaatccttcaaacccttctagacacaatattggttcaatggtcaaactcaacgaaatttatcattgaaaactcagtattgctaatattattactcttcaagagcggcagttaatttttttttctcgcgtttttaccaacttcaaaaaaaaaatgatctcaattaaatctattagaagttgttttacatttctacaatgacaattactctaggatgttttaggcatttgttgaaaaaattcttaaaaaactttagtgatttctagattagattaactagattatactataaactagtctcctattttgatacaaaactcaattactccttgtacttcccattcaaccgtcaacattacattatactatacaaaggttactaatcctagttatgaatttgtatacatttgaaaaataaaattagagtttgttgtccttaaatttatagttactggagattatttttttttccgaccacgcttgtcgagtttctctaagcatatgtgccgctttgttgggattatgtttttgctattacaattcaatttttacaactgaaattaatcttgtccatatgatataattttatgtattttgtgatttccaataaaaattatttaataacatcaattaagtagaagttcccgccaaccaagaatcctacaacttccaactcacggccgatgtgctttaaataatatcctccaattacattcaagtaaatttaatccaacggtttacaagcaaagtagacaccagacgcggatcgccatctaatccaacggtcattatctcacatctccacatctataagtagttccccgaacaaatcatcaa

SEQ ID NO: 43310 - DNA, 2252 bp, Cannabis sativa
cgcgtagaaccacttagatttccattcccccatattagaaactgtaccttgtaccttgttaatcttagaattggtccatttactaaagcagtaaaagccattgtcggggcctacattttttatattataaaagtagctaaaatactccatcattggctccccttgaacatactccatatacatcgcataaaaccccagaattatgcgataactatttggggttagttagaagggagagacatcgtaatgtctgaggatggctttaacaaaaggatgaaagggtaaagataccccacatcaaagaatagggattgaaaccaccacgtcttgcgtggggataatcgcagggttagtaaaagggagatggtgtctttgagatgctgaaggacgcatggttcctattcgcactaaattcaacagtgaaaatgtatgcaggtaagatttggtaactcccgagaccagatcctcgcatgagaagggtttattcagttgagcgtcgtcaactgaatctatctcactaccctcaacaccttcttcctctttcgactcgctgtcaggaacctcaaagtcttctccaatttcttcaacttcgatgtcaagggcatgtgtcaagtgagtaacgtactcttgagttgacaccgtagattcacttttactggtttaacaagttcttgaaccatcctatctatctcatcagtagatagcgagccctgacgcacaactctagtagtaggagcctcttcctcagagatcgaggtgggtataaaactatagctcttttccagctcatcaacgaaggccccacctcaaaaataagcattgggctatccgaaaagtcgctcatctgaaagattaaagatgttttcagtgtggtgaaagtgcgagaataacaaaagtgccctcacccacataaaagaaattcaaaaagtatcaaggattaacaagacatctcaagaaatgactgggtgtatctcaataacataatgatcatatcgctacatgaaaattaaggtagtgagacacacccaccatttcgagaactcagccaatcctttcaaagtataagtcacacatgtacaactaatggtgtacctcaacaaatggctgagggttccccagtaccccaaggggcatgcattcctcgcatgaccattgagttaatgggaaaacctcaccattttgagaaacatggttagtcctaacatgcgactataaagtaagaaaaaagaaagctggtcgcatgtctcaaatggttgtgtgtatcagcagtgacccaaggaacatgcgtacgcttgcatgaatattaagttactgtgacactcccaccatttagaagactcagaaagtttttgcaacaaaagcatatataatcagaaggctaaaaataaatcctaagttccaacatggattgaaatagctaaattccaaattttctactgtgtacgcgagtattcgagatgttcatcacgaatttcgcaaacattcaaaatacttagaaaaaaatatacaaacactcgacgtgttcttcttgaaacctatgattattcaagtttcaagtgcatatttcccagagaaatgcatagttttgtcagaaagcatataaagtttcatatatatgtcctattgtctcatgcattttctacctcttaaagcacagaatacatattggttttcttttttttttttgattaatcaatgaattgtattgcacaaacaatatttacatcctattagcacccatacaagggcctagaaatctatacacaatacatttccattctatacatttcaattataaagcaagaaacccatctctatcaatactcttgattttcctaggcaaaaacatagtaatccaaaattttttgactcccttttatatcctcaattattctagtaggattaatctgagacttttgccaaatcacagcgtttttcgacttccataagctgtacaccagagctgcagttacaacagcaagaacttttttcctgaattttgagatccttgctttcccgatccatctgaccagttgggctagactgctggtttgagcatgccagttcaatcatcgtttcatctctagtaggcagtatctagcaactttacaatcaaagaacaagtgttgacaattttatggatgaacatcacatatatagcaagttccattcacctgaatgccaaatttaatcagcctgtcctgagttttcagcctattaagcatagccatgctgggttttatgccctaaat

SEQ ID NO: 43311 - DNA, 4890 bp, Cannabis sativa
aagataaatggtttaaattattttataaatagaaaaatgaacaataaaaaaaagttctcgtggagagagattgttcttagtgtagtttatttattttatttcaaaagataatttttaaaatattgaatatttactcgatttttatttaatatttgattaattgtttgttaatagttagtaaacgatatttcctaaaagttatttttttaagttatataggacacgatacttaattatagcatatcaatatgacactgaaaaaaaatgttagacaacagtaatgcttttcagcaattctcacataaatttttctttgagcattgatattgggcaccagtggtgcccaacaccttctataggtgtcagtctataattggttagcgatatttcttaaaacttatttaattaagttatatgagacctgccatttaattatacaaataatgtataccactaaagagagttctaggcaccaatagtgcactttaacaattctctttttctttcttcaataacattcttcttcctttttttttttttagtagtgtgcaaaacccacatatttatgaagaagcaaaaaaaaaaagggtaataagaagttaaaggataatagaaaaggaaaagaagaaaaaggggcattccgagaattgaactcgggacctctcgcaccctaagcgagaatcataccactagaccaaatgcccagattgaaatcttttctattttctggttatatattcaataatttaggggatgacaaacctcactcacctctaaaaccctggcacacgaccaaacacaagagaagaagacagtgaaaatattcgaaaatgggaagagcggctctctttcatcttctgagatcacagtccaagacccttcgttcatcctcctactcaggtttcttcctattatttactattcatcactctctctggggctgtgattctctgaattaatttttgttcagttcaatctttggtctatcttttctgttcaaattttcaatccaggttttagtttcatgatgatgatgataagtactaactcatcgctattggaaatttctttttgtttttttttttctttaattttcatttttggaaatggtttatttatgtgacttaggtttgtgccaaattatctgaaatctgaaaatataacgcaactaacttggttactcttgtaccagggattcatctttacaggtcggttccaaatcgattgaacagtgaggcaactttgagtccctgtatccagatcaatggtttccagaaaagatgggcttcacgagccactacagctgaagacaatggaaagctcagtattggcccaagaaaagtagcagaagatggggaaaatgaaaaagactctgggattgtctactatggaccaatttcttcgaccataaagaaagtaaagcttttatcactttcaacatgctgtctctctgtatcattaggtccagttgtgacattcatgacatcacctgatatgaatgtgatcctcaagggtgcagtggcttcatcagtcatattcctcagtgctactaccactgcagcccttcactggtttgtgagtccttatgttcacaagctgagatggaggcctggttctgatacatttgaggtggagatgttgtcttggttagcaacttacattcccaagactatcaagttttctgatattcgtcttcccgagacaaatcggccatttgtgacgtttaaggccaatgggaacttctattttgttgatgcagatcactgtcataacaaggccttgttagcaagattgactccaaaagcaaatccggagactggattcaaaaatttgtgatttatgatgttgatgaatgaggaatatttatgttattctatcacatcataaatagagattttggcattttgagatttataagactgcataccttaagtataggctgtttagttaatggtcattaagaaacaaaataattttggttgtgagatttttcctcaacactgaactacactttttcttttcttgcaattacaattctttcttttgtggctttctattatgtaatttcccggtttatgacttgaattgtgcactattcattcatttcatttgggatcactcttctatattttacttgatctttaatttttactctttccaatttttatttctcaaagtggagggcctaatgtctacccctcagatccaccaaagcaattatgcagaagtgaaataagtcctttttttatttctatggaatggtaatgaaactttggttaaggcaattatacagcaaggaatgcatggccactaaaattcagagcttgtcatgggcatagcaggcttagtaagatcattgtttcagattaaataaaaaaaaccttagcaagatcattggctatggtgtgttaatatatctcatttttcaagttctttttcaaatttgcaactttaatttataaatacagtatataaagaaaaatagttgaaaaacttaaaacatgcatcaattatgatcatccggcagcataggacaaagactaacaccgttgctgctaaacaaaattcaaccaattgacaagatttgaaagaaaaaaatgacaatagctgaaaagacagaaaaaccgtgccaccgtctatcgagcacccagttctgagaacggctgcatgacgacgatggtagaaactttttatatgaagcgaaacagacatctaagactccattggaaaaacaagtaaaaagaacccatcggcaaatactgcctttgatttcagtaatgtcgaactgcacgattcacttcttcttggcagcggatttggtaaccttggcccctgaaggatccttcttctccacactctttatgactccaacggccacagtttgtcgcatgtccctgacagcgaaacggccaagtggggggtactctgagaaagtttctaccaccataggcttagtaggaagcattttaacaaacccagcatcaccattcttcaaaaacttgggctccttctcaatctccttaccagaccgtctgtcaatcttggttaggatctcagaaaacttaacggcaatgtgactggtatgacaatcaagaacaggggcgtaaccattgccaatttggccaggatggttcatgatgataacttgagaggtgaagttagctgcctccctcgcaggatcatccttagagtttgaggcgacaaaacctctcttgagatccttgacagcaacattcttcacgttaaatccgacattgtcaccaggaccagcctcctgaagtgcctcatggtgcatttcaacagacttgacttcagtggtcagtccagtgggaccaaaagttacaaccattccaggcttgatgacaccagtctccacacgtccaacgggcacagttccaatgcctccaatcttgtaaacatcctgaagagggagacgaagaggtttgtctgtgggtctcttaggctctaggatctggtcaagagcttcaagaagagtcgggcccttgtaccagtcaaggttggtggatctctcaatcatgttatcaccctcaaacccagagatgggaataaatgcaattttatctgggttgtaaccaaccttcttcaggtaggaagaaacttccttcacgatttcatcataccttgcctttgagtacttcggggtggtggcatccatctgcaaaggtaacaataaagcaaattaataacagcatttccagatatacaagcacaatgataacaaaaaatatatatgtaatacaaaaacttatttataaagagtattaactaccttgttgcagcaacaaatcatttgcttaacaccaagagtgaaggcgagaagagcatgctcacgagtctgcccatccttggaaataccagcctcaaaaccaccagttgtggagtcaataatgagcacagcacaatcagcctgtgaagttcctgtaatcatgttcttgatgaaatcacgatgtccaggagcatcaatcacagtacagtagtacttggtggtctcaaacttccagagagcaatgtcaatggtaataccacgctctcgctccgccttaagtttgtcaagcacccaggcatacttgaatgatctcttgttcatctcagcagcctccttctcaaacctttcaatcacacgcttatcaattcctccaagcttgtagatcaaatgaccagttgtggttgatttcccagaatcgacatgaccaatgacgacaatgttaatatggagcttctccttccccatgatgtaattttatctggtaagcaaacaattaaagatgtccgaaaacaagaatgagaaagctatttccaaaatctgaaatattactacaagcgtaagcataggaatactgtcgaaaatgattctgatcaggatgattctcataatgaaacgacaatacaggagaaaacctagtatcaagaaatttgttaagggtgtatagtgtacaagttacctcaattatccgtggattgttatgttttatcatattatataataacaatatcataattccaaaaaaaaaaaaattgaatagaatgcgaactacatatcatcaagtaacgaaaattcctatatcttacctatataaatatatgcctatctaacagaatttcttgtggaatatttttaagaattcagtatcgtttacatgtcaaatactaacaacaatgctaaaaagatgaaaatgaataaaccataattgttcacaacttctctaaacaggttatcaattggtagctattcaatgaagtattgtccattttggttcaaaacttctctaaacaggttattaatattcaatgaagcattgcctattttgcttcttctattaatatatgtaggaacaaatacaaatgggattaccatgaaagaaacagaaa

SEQ ID NO: 43312 - DNA, 3485 bp, Cannabis sativa
  modified_base (2481)..(2482): a, c, t, g, unknown or other
ttttttttttacatacagttcaacaaatcatcttcatgtgtttctatatccagctttttttgtcatttcaagaccttactttctttgtattggtcttctctattaaggtctagcaaaaacaccccaaatcttgccacgaccaaggctctccaaaagcctcttagacccctctacttccatctcaacaatcttgtgcaagtactcacaagcaccagcagcaaccatttgttttcgacatttttttgaatgcgaaagtgaggccaatacagaaacaggatacttcttatccaaattctgaatagaaggatccaaaagctgaattgcactaacaattcccttctcatctttcttaaacatctttctatttcctgtatataacaatagattagacaaagcttttgcagcagcttctttctctgcaacagccttaccatccaacattttgatcaaaagattaatgcatccacattcccccatttctttcctggttttcgagcaaaaaccaagctcgaaaacagctcgagctgccgcgattcttacacctaaaacaccacaatttagtactcccacaagacggggtatgaacccatctgagcaaagaacttcagcaactggtgagaatgaagccaaatgccttaacaaatcaatagctacttctagactctgaacagaaggtgctgagtcccagaaattcttcaaacactcaatcccaccttctttagcaatacaaagtttcaaactttcatcatcagaagccaaattacaaagacacccaattgcattttcctgagctaaagccgtccctgaacttgctacccccaaaaggaccacaaccccattttcctcaacaaaattctctttgatttcagggaaagaggctaaatttcttaaaaccccagctgcagaagcttgagaaccaggtgtaccaccttgacaaatctccaatagagatgaaatcccacctctacaaccaatcgctctagcgttctctttagagaaactcaaagcttggagagccacacaagctttctccttaccaaacccacttccagaatcgagtaccctaagcaaatgattcaagagaagcaaaccttctgcgatcaaaacgtgtttgctgctatcaaccattgaaactctcgaaatcgccgccactgttttctccttcatttccaccgagctcgaatccattaacctaaccaaaaccggaacaacgccttgagcaacggcgatcatcacgttcttatcgtcttcctggagaagacccaaaagcgagtccatcgccgagtttctcgactcgccactcccaatctgtaaccgagtaatcaaattcctcgactcagatcgtacaacctccttcttcgacaacgagctggaaactgcgccaacttcgtgaagagctccactcctgattaaaatctcaccatctttaatcaatcgatcgagcttagcaagcacggagtcgaggtcgctctgggtcctaagcttcccctcagccatgtcaggactctgacacctcttggccaacaaaacggcgtcgcttagagtaacggagaccgaaccgagaaggtcaacggagagagtgttggatacagaaccggagagtgagtcagcgaagtcagtaagctgagaacgaaggtcatcaagtttggcacgaatcaaagcccatttgcctttgaagttttggacaagtgggatttcttcaaaaagcgaagttaaaagctggttagagagaacaatggggtcactttctggagctttcatggcggaagaaagctcagaaccaaaaaaaaaaaaagtagtaaaagcaataaaaccccaaaaatgaaaacaaagaaaaggttagaaaaagtagaaagttatgagagaaagaatagggctttagatattcagagcctagagagagaaagtatagttagtagggtataggggagtagagatgatgaagaaggagaagagagaaggatagtgtaggagcaggtacagggtagggtaaggtggggtcttattattataataataagattggttgttgtgaatgtgattttgatagagaggtttgattatttgtggtgtttcttggtttacgcgccaatttcagagcgtgattccctcgcattttcccctcactcacttaactttctgattctctttttatttatttatttctttccattttcattttgttctttgaatttaatttatttttgggtaaaagatatcttcttgatttgttttagcaatttcagtgcaaatatctttcctttaatcgaggttgtatttaatacttagggatattttacttactctataagtgtaaattatagtataaatatttaaaatttaactctcagttgttaataaatagttaagtttaacttttaacggtaataatatttaaattatatttttagaatttaaactaattattttaaaaaaaaagtttaaactaattctcttattaatatatttaaactatttttnntaaaaaaaataaaaatttaatgagctaaaaccaattaataattgttacgtggcaatttatttaacacttaacagccagttatttataaaaattactgctcaaaattaaatttaagtatttatttacaactaaaaatttttatactgcaaattactcatatatatatttatattcaaagagcactcacaatattttttttaaaaagaaaagctttaaaatttttaaagaattgtaataaaaatatgctacaacgaatactttaaactcttgttttattttaaagtttctttaaaatacactattcatgctctatatttagagaatactatttattgttctaaatacattttattaattattttaggtttaaattatcatttttgtatagagatatgtgtatatattaatatattatatatttgaaataaataaaatataataaaatctgaaaaaataagattttagttatgtgttttaaagaagctaatgtatagtgtaatgtaaaagtgtgctgtaaaataaagaaattaaagttttagtaatgtattttaaatgatggagaagagaagctcttgagagtgctttaagagctttaatgacatagatatatttttagtattttttttaatggatacttaacatttaagtgaaaaagaatatcaagaaagaatatcctataatgacatcctttatatcttttctttcttatttttttataattgatttgccataaagtaagaaaatttaattattcaaaatatattaaataataataaatattattttaataatttttagaggtgcttattattggaatatttttaaataaaaaatgtcaaaaattatgtagaaaatagataaaataaaatattatattttttttggtaatgtgaaggtttttgacacccttaaataatgtcacctttacactatgtttggtaggagggggagatgagtggatggagaggatggaaagagggactaaattacttgtttggcaaga
